United States Patent Application Publication US 2008/0274467 A1 - sequence listing, part 6

SEQ ID NO: 674 - DNA, 111937 bp, Homo sapiens
  misc_feature (1)...(111937): n = A,T,C or G
taacctgatatttacaattaaatattctagtattatctttggtttgtaaatatcaaaatggtagtaactgacaatttcaaagtgtaactaaaatatgaatagtaaaatactctccatgcctttttagagctgctaaagagagggagaaattaggtgtgtgttttgtttgtttattcatttatttataaaaaggaatattgaatgctgttatcttaaactcatgtggctgtattggtaggctgacttttttctcaagaaaatattttagaaatttttgtgtcatttaaaatattttctatattgagatggtcttctatatttatttatttttcaggcaagtttatttggaagcatttcccgtctggaatgtatttgattacaacaaaagggcaggcacaattctatttctggtagtaaagtctgttggttaatgcgtccatttataattactgtcactttcttttttttagaaagactattaaaccattttgaaaacttacatagtttgatatttatttccagacactagattttttaaaaataaaaatgtatttgttaaatattaaatttctgaagactcaataggtctatgaaagcagatagtatctttatgccattgtgtatatcctttgcacaacagataatacaggtctcagcaataccctggttgtatcatgttgatatctttggatcaaacttgcaaaattagcattatttagtatttctaggagtggcattatagatcttcctgctttaacaggtctatacaaggatatcagcacaaagaacttagtcccagacaactgtacattaattaatgggttggccgaggcttgaatgcagctgactttttagaatattttagagagaataaaactgacacttattgaaggtttatgatacaccagtctgctagatgtttactgatgtgttttgtcaatgaaactagcccacagttcagtatttccccgtcagtagataagcatgcactggccaaagaggttaagtaacatgttcaatattcatggtcactcaggtagtaaatgttagaaagccaaacataggtctttcccattcccaatctatgaaattactcatttttaaaaatgaatttaacatgtattgctttttatgttatttaaacttaaaatgtggcccaaaggagatatatatcaaataatttaaccgctttagaagtataccatttaagtgccttttgaagaaagagactggggcatagaatgtccaatgtccaatatccagaaatgatgactgagctatatttgcagcagttatggactttggttgatgaatcaatcttttcgttagaagttaagtgtttttccttttctgaccatgtatttctcattaataaagcacagctatctttttttctttttaacctttctagcttcattccaataggataagtttttactagtaagtagcaccatttcataacaaagggatgaccgtgtaactagtgtattttaaaagttaggcccactaatattataataaggaaagccaaaatcttgcagaaagatcttttgtaggtatgactgtttaatgaactgaaatcacttacttacagttgtctaaaattattcatagtttttagaggtgaaaaaaataccactcataaaatttcatcttgtgtaccagaaaatgttggaagtgttttggtaatatttaagaatattgaaaaatataagtaaatcaaagagttttaaaaatacttctataaaactatctagttatatataatctgaataattcagattattgtttaaaatcatctttaatccatttctaagtttggcaacttttaatttttaaggatgttaagaagaaaacttctattgtcctattatcactgtagtttgtttttattattatttatttatttattttacttttttgagacagggtctcactcagttgcccaggctagagtgcagtggtgcagtcacgggtcaatgcagccttgacctcccaggctcaagtgattcacctcacaagtagctggtattacaggtgtgcaccacaacgactggctaattttttatagagacgaggttttgccatgttgcccacactagtcttgaactcctaagctcaagcaattcgcctgcttcagcctcccagagtgctgggattacatgtgtgagccactgcacccagcctaatttttttttttttttaaagtaagggacattttaatattctccctcgcactgccaaaacagaaagacaaaaatcttggaatgaaggagttattacgaggaaatcttatccccaaacagttttgtttccgttaatgtagtgttttttttcctatgattctatattatatcagcctttctactcgcattttcccgccagctgatgtttggtaactgccatgttagataagaccaccttaagagtgtgaaaggatttaagaatcttctggctgaactacttaatgcagtttagttcttttctataaccactaacattcagcctctacttttaagatttttaaattacaattagcacaggtatttgacactcatcctttacagaatgagtgtcaaatttgtatcccagtgcctggtacaaagtaagaacttagtaaatcctaacagttattatttattagaggaaaaggttaattattattattttttgagacggagtttcactcttgttgcccaggctggagtgcaatggcgcgatctcggctcaccacaacctccgcctcccaggttcaagtgattctccttcctcagcctcccaagtagccgggattacaggcatgcgccaccatgcccggctaattttttgtatttttagtagagacagggtttgtccatattggtcaggctggtctcgaactcctgacctcaggtgattcttccgcctcgccttggcctcccaaagtgttgggattacaggcgtgagccactgtgccccaccaggaaaaggttaattttttttttttttagacggagtcactctgtcacccaggctggaagtgcagtggtgcaatcttggctcactgcaagctctccctcccaggttcacgccattctcctgcctcagcttcccaaatagctgggactacaggcactgccaccaagactggctaattttttttgtatttttagtagagatggggtttcaccgtgttagccaggatggtctccatctcctgaccttgtgattcgcccaccttgacctcccaaagtgctgggattacaggcgtgagccaccgcatccagctgaaaaaggttaattattaagaaattcttgaacttagtaaatcctaacagttattatttattataggaaagggctaattattaggaaactattatggttagctgtaatctgcctctccataattttagttcatgtttctaggtctcttaaagcaacacaagtgaatattaatattccatttttatataactgtgtttgagatgtttacaaagatccaccctttaatcctcttcttctgtattaaatattaccagctttttgtagctttcctaaaccagttactgcttgctgttgtttgcataggtcctgtaataccctacagtgcagattacagtagaattttctgtcttctttgctctggacatcataggtctgatcatgtaacctgagattatattaagattttggggattgtacattggctcagagagagcttttggcttgctctgttttatagataaccccttctacctcccactcacctatgaattgttccttaagcctgattctccccatcctgttcttgtacaagtgacattttgataatattcatgtaggtctttatatttattcctgtaaaatttaaatttactggttttagcctactctttttgcctatcaaattatttaaaactctggattttgtcagtaaagaaattaggcatcttttataattactcacccatcctgtgtctggttccccatcttaaacagtgtggaatttaacaggttagttttgaagtttatgtggaatcacttatgcattcattctttgaacaaccactatgtgtcaagtactagggataaagcacagtctgttgttgacaatatcagataagttttgtgtggttcccctcatctaacttataattccagtttgtgatgcagtatttcctgtttttcttaaataaaaacagagggataattaacagatcattgtgctcatgcaacatattaatcccaagggaatatattacagtcaaattagtaataaagataatattcttttacatatgccgtgttaatgtgtgaaatattagtgggggggccttgttctacagcctcgcccctagaaaaagcatggaaataattcacaaccactgttcaaggactccacctctgaaaccttgagcagaggtttgtaagtgaagtctggcctttttaaaagatagattctagggaatgaagtaagctttgttaaatctgctgctaaagtctgcccgtttttcaagtaagtgcatttttaaaagccccacatgggaatttctcatggacttacaggcttctttgtttttctgcatgtctccatctcatgtcatcttttaatctttcccttctaacatgctccatgtgaatgtttcttatagatagttgccacataattttcgtatatttcttatagatagttgccacataatttttcaattacaaatcagatgccacataaacagtttgccgtcagaaactttttttttttaacatttccttggaacgtatctgtggagtaaatcatggtgatctttttgaactcccagttaggtttttctgatactgaacatgaactcaacagattctttgtgtttctaaagactgtatttagattcacttagatgtttagttagcatttcctatgtgtcagccattgcattggtttctttcacattttatttcataattaaattattcttaataatgaaccagaagtgccatttcactttatgaaagtagaaaaatgaaattttagcccagatttcctctgtgactgctttgggtggggtgtgtcaaggacttgtgtgaggtatacccaaagatgaaatagatgacgtgaaaatgtaagattgagttaaaatataaagtttatcagataatcaacttttcttttaaaagaaaatgcactattaatgggggatgtattggctttaggaaaagagaagtaaaacttctgaccatatctaccatcttttattttgcattggcttagtgcttaattagtttgatgtactcatatagaaaatagcattttaaaatgacatttttggggggaacagtgaaacactaaaaatccagtttgtaaaatttgttgttttctcgtatcaaagaatgacttctttctgctatacccacaagttttccccagcctctatgttttttcctctgtggtagtggggagagggaatatttaactattaagtgaagtaagtggtattaagaaacttagaattctattttgcattcttctatactactaactctataatcttatacactttatttttctattaaagataagtacattattctcttgattcccttgcgttttgatgaagtttaattaaatgtttgtaaagcacattgagatctatggttaaacactgtatatgttctaagtgtgattaatcattactgagaacagaccatttttctcaatttcatagtaattagaaagtgaatactttaggtggaaaaaaaaagaatataatgatattaaatatagcctggaaagcctttgcattaagtagtttcctgaactatataatctccatttttttggagtgttgttactgataatttggaagtcattggatgttattgacagggtagaaagttcttacatggttctttttcttaacaagatctagttaatgctacttggtaatggttaaggaatggggtaaatataacccaaattagagtgaacttcaaggtaagtgtgattttttcttatttgtataaaatctataatatgggtttctcctaaatcctttgtttatatttctttagcagtgtttggcgtattataacctgccataattgtgtttcaacatacaagatagtgtggataacgaaatttctgtattacaattatgagttttaagatgtgtaggttgtaggcatggagccaggctgagagagagatcatgccaagtcttagcacagaaaagcatcagtgcctaaggatgtgtgattttacttcatctataaggtttcccggttaggttagtttccttcttgagataagtcacacattttccagagagaggcaagcaattggtaacctacatatataaagtcagataccatcagcatgggggtaatttgacttaaccttgagaggagtgttttggcacatggatatgtgttttgtgggacacgggctagatggaaggtgtagaacttgattgtttaatccctgagttgccatttactttttttaaattgtgataaaatataagtaacattaaaatttacaattttacacattattaagtgtaaaaggccagtgggattaaatacattcccattgtttttgcaaccattaccgccatccatctccagaacttttttgatcttcccaagttaaaactctgtgccatcaaacaataactccccaatccctccttcccccagcacctgtcaccctccattctactttgtgcctacgtgaatttgactatttgactactctggtatctagagtagagcattatatattatttgtccttttgtgactgtcttatttctagcttgatgttttcaagttttatccatggtgtagcatgtaatagaaattcattcctttttaaggctgaataatgcatataccacacttgtatgaatatcattcatacatttttatctgtcgatgaacacttgggttgcttctaccgtttggcaacagtttacttttaagtcgttagttatatctattacagaaaaatatttggacttttgacagaaactagtctagaggattaaatggggtctttctagtgccctttcccagtcagtggaaggttcactcactcaacaagaacgtgagtgcctacagtgcttggtgcggtgaacacaggagtacacacagacagatatggcaccagccatcatggaggtgagagtgtagtggaggaagcagacagtaactgcttaaatactcttgggactacatgcaaaattacaacggtagtaaatgagtgcttcagtgaagggataaacactaacatgagatttctgagggtatttcaccagtttgtttttgggagtggaggtggcatcagtcaggaaaggaaggaagaaggaaagtttcaggcagaggaaataacatgtgcaaaggcccttttgtctatgaaggaggcaagagcagcccctgcaacttgggagtgcagagagtgaccatgagcatggtgtaagtctggaaaatgtataaatcttgcagatcatgataagagttttggtctttatgccaggagcagtgggaagccatggaagtgttttgttttcatttgtaaaaggagcttagtggatgagggcaaaatgatcaggctttagtttttataagatatcaggaggtggtatggtaaataggttgggtggatggagttagaatccagacagttccttaaggagacttttgcagttctcaaggcaaaaaataatgattggagtgggatgataacagcaaagacaaagagaaatctaaatttgagaaaaattagagaatgtaataaacagatgttgtgatggattgatcatggacagagatgttaaggaaactcttagatgtagaaatggcataacaggatcactatggttcatcatgtaagtattccatgggatgaggaatggtgaaaaccaaaacagattgttgagagatttggttgggaagtggaggaagaggaaaatacctggtctggagaatgattctgtttttgttttgtttttgagataggagagacctgcacatttaaaagctggtggggaggactccggttgtggggcagaggttaagcatatgtggcaaaagaaggataatgggtaatgtaagaaaaggggttggggggatggggagaaggatccaaaagagtgatgtggtgggaatggttgcctttagatatgaggagaaagaaggaaagagaatagggtgggtacagtctttggcagtagtcaagaaacacaagtcagcaagcactgacagttccaaagtcaattattaaaaatgctacattttctgtgtctattttctattacatgtgccattgatagataaacctgattgtgaaaagctgacagtgtttcagaattaaaatgtccttattctttgtcaagtataatgcagtctttcaaatacctacatatgtacatgaaattaagagtttataatagaataatgtatccgcattttatttcaactctctacctctgaagtttggtttggtttttttaaaaaaaaacctgggtaggttaattttttatattatttgcaaggcaatatgtgcatctgtgtgtgtgtatgtgtgtgtatgggtgtttgtgaaaatcacatcatctaaatgtatacaaagcttgtcaagtatgcattttataaatttttgatagatacttgtttactatagcacagcaatatttgaggatgggatagaggtcacattgattcctttatcttcaccttggtgaaaaaaatcatattttagttcaaagctgttcaagtaagtccttgctccgttttcccaccctgtcttcagtgatattatttggagtcagcaatcaatggattccatccctctgagacttgcttaacctacagctgctgatagaatacaggcaagagcttgttactttatctgaattgtccattgctaccttaatgagtgaaatggttaagtagaggagggggcgagtcttaaggaatgtgtgtaccatttgagctgaatatttcagtgtgtatagggagagggagggtgagagagaaatccacttacatcactagaactgcattgagtgtgagccttgcaggttaagagacagactacagtgtcttgctttctgcaggaagcagcaatgccgtttgtttcctaagaggaattttttatttagaaaaggaagctttctatccaggaaatggctttccttgtgcgttgctatgccaactgcctgcagccatggtcctccaaagtaagcacaataatgtaattatattggtgtattgcattcagactcatgatttttgagattgtgtgtgtgcatgtgctgtgtttctgttagtggctctcttgctagcaggcatgcttgtgttgagtgtgagggacagacatcattaaattaaatgtccatcagtgtcatgctgccaagattaattgtgcaaacttggttagtggagtgggacagagatcactggtcaccactctgtcagcatcattagcagctagggaggagttcccgattcacacgctctgccctgatttttttctttctttcattttctttttttctcttggttggagggttctgtatgtgtgattgcagatgaaacaagggtattaacaatgcttggctgaatgctagagcctggttcttataccaccctgactaatataattctgtgttaagcctttttgaggggagtctgtgtgcagtcagccattttagcttttttcttttttttttttttttcctctccttttcttttgcctcttgttcttcaatctcagaaatgatcttgttctcttggaagactgagagctgtgtgaggttttctcagtcttgtcatagcctaggatggttagagtttcaatgttataaaaatggagacgaacactgttgttcggattccttttctggtctacaagtgtgaagggtttttaagcttaccagtagtgacactttaagctgcagcttggttttccctcctccctttttttttttcctttttcttttaatttaatgctgtagagggtgacttgccatcgtgagagattggtacatgatgtgtaaattcagttcagcatatgtttcttcattatgaaaccactagcaatcccagctaaccatggagttatgggccagcaggagaaacactcagtaagtatcgcaaatgctgcttgtgctttgatagcacgtcatagagaactgctttaaaatgggaattgttgctctttctcttcagggaaaacagtttttgtagaaggtatagtagtctgcttggagaggaggggagggtgcattaaagctggcttgttcttccaatgttgtaatttttaaaaatttgaagcaagaccagcaatttatttaaagcaaaatcactaatactgagaaatattgggcagctaatttttatatttagaaactaaagcttgacagttcagcttcgacttagtacttgaatagttttcaaaaaaatgtttttgtagttgaatttaatgagaaatcatcagaaaggttattgagaacgggaatctatagtgaggaattcgcatgtaggtttgagtgtaggagggagagctttggttattgatttggtaataaagcgatcagtgggactcatctgatttcttaacatgtattcatcacttatggaaacacagctttttttaatgccacaaaaaattattgcttctttataattgatcccatgagtcagctatgtgtttgtcatgctgaaatcccatgggcagctaccgagaaagacttttctatgcctaacaccaagtcagagcctcctgtttcaggaatgtgagttctcatggtgctacttttatatcaccatgttgggagttttctggcatcacacaaattcacatgattgatacatacataaatatattcaatagtgaaaatgcaaacgcataaatttagacagcctgtatagtagtctaagtatttttgaaatgcctacttctacatcctagcatctagcaggttattaaagtataggaattgtctttcatgtattctaaagaagataagatggtaaactttaaaagtggaaataagtcgctgaggctttgtaagtttatagatagaaggccatgaatgtagaatatttagatgctgaggttcatgagtacaatttggttttgttcattgttaggaacaaaattactaactaaatccaagagatgttcttagactaagtgattctttgcgcactgtctcacctcaggaatgagccatgcgagctgcgcttaaggcagcggctgtgttggaagcatgttatgacgctgcaccgagagcccagcccgttaccatgaggtcctcgtggtacttcactaattaactctctttggatcagatccagaaaaagaccagccctaaacttaatttcactagtaggaaaggttgttgtaaagaagttccattgtagtttgattttcttaacggggcctttgaaattaaactcttctgtagtcatgattttccaggtaaaagtaagagtgttagttcagctatgcttgaggaaccttagaaacaaaaattaaaccccaggctttttacttacctttttcatatgtcttttcttaaagtgtgtgtatgtttgtgtgtgggggtgtttaaatgaataataatataaatttaatgaacaaagaaaattgatggctgggtgtggtggctcacgcctataatccgagcactttgagaggcagaggtggaaggattgcttaaggccagaagtttgctactatgggcaacatagtgaaatccatctctatttaaaaaaagaaaagaaaattgttaaaaccgttcactgccaggaggaggaaaacacattactacatttatgtaaaggccagttgggacagatattacccaatagtgcctaaactagagtccctgatcttattctgtaagcctgtttgtttcctgacaagtgcctatattttgctacaatttagagtgatattagactaaagtaacactagtgataaaataactttggatcaagcaatttatagaaatctgtgagtggtattgcccatgacactttggttagaacttgaaatactagaatttgccatctcaagatgtcacatgcagcagagttggcagcttacaacatcaaggtctggctgtataattgttgactagtccctttggttctattgagtttgctgtgtaataatcagacctttaaaattttaattgtatgtgaggagttgaataagaaaatagttactcaggctctcaataagtgactcaatatagttgttgggtaaaaatgagtgagaaggcccctctttcatcctatgaggctttatagtgtcagagctaatttcaaatgaatagaatttattaaattcacaaatacttctgttttgcttattcaaaaagtttgtgggcttttaagtggctttgcttctttgactgcagcaggtagtgcagtactagaaaacaaaaaccattaaatttggggtgggggcattttttttagctatgattaggcacaaatagtaagctcagtttttctactttatcagaacctttcagatctcatgggctttattctttatttgttgtctgtctcattcagtgcatacctcagttgccggcacataatagacgtacgataaataccattgaatttctctttaaatttttggattaataaagtctcaacttttttaactagtaatttttacatattttattacacctccccctatttccattttatgtggttgattgataatactaagatgaatacccatgtgtcaccagaaatgcacccagcactgggctgtgtttttatagtcatgtggtgcttttcagttagtcttcggaggaatctcatggttttgtgaatataaaaatgtaaaaatcttgtgatttctttttaaaataagaggaggttgctaacatttcagaaatgtattatgagactgcatttttcaaaagactcctgtagaccattagttgaatagactgttaatagatggtagatgaaaaaagttttataggctcattaagttagggaaattgttagcattaaaagtctctttactcaatttaccaactgttgtgtttttttaaagtggagctcttctctccccatcttgcccagctcagatgcctttgaaaatttcccaatataggatggatttgaaactttgtaaattaaaaaaagttttaaaataaattgatttggtgctatcaaactgataacatggttttaaattttacatttttgtagaaattgatttatgtagtgtgctatacttaaatcacagcccaagtcatgattaaataataataaaaatggtagtacacataagaaagtgccctacttaaatatagggaataaattgcagtagctgtaacttattgagtaatgtattgcatagcagacactatattacatattatctcaattcttaagaaacagtattacctttttacatatgagaaaactgagattaaaaagaatttttttcagggacatattactagtaagtggtagagccatcattggtaccccagtttgtctgattttatagccattgccttaaccacagacttgtactacctacccctatgtgaccaaatttagtctacttcaggtgtgtagactgcataattatcagagttagtattaactagtggaatacacaacttgaaaaagtgcttttttcctgcagctatctttttcctggcatatgtgacattccaagcagcaagaatatcatgatcaaaatcattttataaaactttcattgcttggctgagtcaataatacatctatccattttgaaatcatgttgagacttgagttgagatggtcaggaatagttgccatttagcccatttcctttcttccttctgcttttctgtgtttggtcttaccatgtacatttcctttttgctgcttaactctttaaacatacgctccatgtctcaacttcctctgcctattccctttgtaacctctgagtgcctgaccgtggccatttgtgttctaccagaagtcctgaaccttgccattttgtctcgcctgtttctgccccagtgaaccctgcatatacagtgcagcctgacttcaatcatgatcacctcccttaagtccatacaggccacgattcatttgttagccataagtatcattttcatcatacataagccccttaaccaagaaggatataatgtaacttaaccatattttctaaattgctattggtcacttaaggccctctataatctacattctttcccttataaacatacaagattgtgctcttttattttaggacaagctggcttgattataaacacttcaggctcattttcttttctcatttctcagcttgctgtgttcttggcttgactttgacttggtccttatctcttcatatttatctctatcttaatgaatcaggatcacttaatatgcagtgcttaattttattaattcttctaattggtgcttataaatttgtttggtctttgcagttagatgacagattacatctggaatgaattccatgtgttcaaagggtatggttggaatttaaaactgtttatcagctgttaagagtacagtatagagaaggattttctaggctggaagaataacatgtgagggcccaaggcaggaaactatagaagaatatgagggtttgaggaaaaacaatgaaatcatcactgttagagtagactgtgttagagagaagtaggtcagtacaggtgatggagtggaggatgttagaataccagataaattaatgactattttgaagatgcagcaaaggagtgtaacctctttcttcacctctccttcctatctttcaactggaacagatttaagaaaactcaattaacaaaaaatgtgttatattaccatgacagtttgaccttgtctgtaaacattgggtagagtgtctctttagtatattttgattgatggattttccttagcaatgtagaaaaaaagcaccaggactaattgtagaggctaggttatgcctcttttgggtaagactccacctcttcattatctgatctttattttgtctgttataacagatatatttcctgagatgaaataaacttatctcttggcatgattttccactgtgcttgctagcagaggggactgagaggaagcatatcctgttgttttattcaaggacaaggtcatcttgccttggatttgggccaagaaaccctggcaacaaataatagatctttttacccccattagaagtgaagaaatgtatttagaaacttgccaagacattgcatactctgcttatatgtgctttttgtgtcacaggacatagtaaagtaagatctttgcttttagtcaaaataagtatacctcatatctttgcctttaaatatttttagtaatgatccattaaaaaatctgttggaaaataaaatcaatttagattactgaaaaaaagaatgattaacttaagaaaaagcaaatgctcaaaatgtgtcattaggaattcagttattctcctttaaccatttagccctagtaagatcagtaatcagtttctttctttctttctttctttctttctttctttctttctttctttctttctttctttctttctttctttctcaatttaaatattatataaaatgcatcaaagtaaatgctctgtaagtttggtctcataggtataagtattccttaaacataacctgacatttctttctctttttttcgagatggagtctcgctctgtcgcctgggctggagtgcagtggcgcagtcttggctcactgctacctccatctcccgggttcaagcagtcttccccctcagtctcccaagtagctgggattacaggtgcgtgccaccacgcccagctaatttttgtatttttagtacaggtggggtttcgccatgttggcctggccggtcttgagctcctgacctcaggtgacctgcctgccttggcctcccgaagtgctaggattacaggctgagccaccacgcccggccctaacatttctttaatctgcctccagaggtttgaccaaactcttaatttattcaggtaatctattaagaattcctccagagtaatgcttaagttttcttcattttcttttgtttaacaataaaggtaaaatcctttcacagttactttaaatccttaatgaagtactttttaatgcttactttatatccctgatttttaaaaaagtaacattactgtcatgtctgtagtgatctttataaacttttgaaagccttttcaatttagatcaaataactttaatcattatatattttatttgaatatggtttgcttataagcttttttgaaaaatattttaaaaataaaacgaatgtctaaatatatctacatagagatataaccatgtgagcatgtataaaaatatatacgtgtgcgtgtataagtgtgtttgtaatttaaatgaaagtttgtaaatgtgtccttaaggtctctatttaaatttccttgttctgagatctttgttctctctgacctactttttcttcatccttaaggagtggtctttatctttatagacatgacacatgcttgtgatatttccatatagtattaagatgccagtgctattagtattgtcttaggtattacacagaatgggctaaatggaacagtgtctgatttttggaacataaattaagaaactaatagaaaaaatatattagggaatgtagatataaatttgctactttaaagctactttaaagacatgatataacagagcacactttaaaaatgcaacaaattgcatcatacaagaagttcccttaagctcaccaatggtccctgccactcactgtctttcctattggtgcagaaacacccatgtcataaagaattaatcacttgtcactctctgccatttcttcttcttaactgaacccctaacataggccttatatgtagttatgtttttctctgtctctcgtgtgtgtgtgtgtgtgtgtgtgtgtgtgtgtgtgtgtgtatgatatatgagaatcttataattgcacagtctgtgatacatcatatctttataacttatcaatcatccactgtctatatttcttttgtactctgaagtcactatataaatatgccccatatgcttcagatctcttcattctacatcaatagaccaaattctcttttacaacttacactggatattcatcataaaggctgttttcagagacatcttaggcatgagttagccttagatttattaacaaagtgacagcctgaaaaatttctttacaattatcaaagttacattcttctttaatgaactctagagaaatacattattggtttgtaatattgacttggtttgattattaaatgaaacataccctcctttcccctttattgatacatctgtatacatgtacttatttcatatgtatgtgtatgtgtaaatataattaatccatactttaatttttaattttagtatgtagaaaaaaactagaattaagatttgcttactttattagtaaaaattgagttttgagaatatacgctctatctcttgtcatagatgttttattttcttactcttctataatagagttgaaaatacagattacaatggagtcatcttattatagggtattttcagtgggcaaaaatttactaaaagtggcagaaaagaacatcacacttttcatgataaaggaagacaataaaacatgaatgtgaaaaagctgaagagttgtaattttttcattccctctcttttcttagggaaaaaaaaacgggtaacccagacacttttactctgtgaagtatttttattaagtggaagcactcttgtttatttttctcagtaattaagaaatatttggagttaaatgggagtattctgccatataatttttatgggtactatggaactgagaaggactaataaaggtactatagtaattttaatacttaaaccttaggtacttagtatcccagtatctttaattgtagtgaaaaaggagattgccttgagttccttgtcagtaaagatttagaatgattctatagtcactgggcctatagtggctgggttggtggggtttgggggaagttcagcaaaattgagcaatgagtaaatttatgccccaggtttccagtgattgagaatgtgaaggatgaaattagctttttctttatgactaattgattttacacttacttgttttcttaaaagtatacttttgttcattttaaatggcaacttaaagatatggatgcataggacttcctatttcctgttgaaattaatatcatttgttgaaatagtcaaatgtcaaaatcatagtattttagggataacatttacctaaatataaaaataacttaaaacaattttatatagaagagggtacactttgaatagctaaactaattttcactgctttgtttttgttacggttatttgagcagcaggttggtctgtgtcttatttgttataacaaataaaatttgaaatagcttagctaaagaaaatataaacacaggtgacaacatttcttctccctttgcactgtatatagtgaaccttttatcactaaaatcttttaatgtgttcattttagttgggcatattcccagatttctttaccgttcattgtccttatttcccctctgaaaaaaatgagcaacctgatgtaaatgagaattaaagcatgtctgttgaacatcctcacaaaagttcattagtagtgatattaagaagttttttcaaaaaaaaaaaggaaatatggataactttaaaatgtcttctagctgtttctcagagcaagactagttagggactatctttttttaattattattatactttaagttgtagtgtacatgtgcacaacgtgcaggtttgttacatatgtatacatgtgtcatattggtgtgctgcacccattaactcatcatttacattaggtatatctcctaatgctatccctcccccctccccctaccccactacaggcccggttgtgtgatgttccctatcctgtgtccaagtgttctcattgttcaattcccacctatgagtgagaacatgcagtgtttggttttctgtccttgtgatagtttgctgagaatgatggtttccagcttcatccatgtccctacaaaggacatgaactcatcattttttatggctacatagtattccatggtgtatatgtgccacattttcttaatccagtctatcattgatggacatttgggttggttccaagtctttgctattgtgaatagtgccacaattaacatacgtgtgcatgtgtctttatagcagcatatgatttataatcctttgggtatatacccagtaatgggattgctggctcaaatggtatttctagttctagatccctgaggaatcgccacactgacttccacaatggttgaactagtttacagtcccaccaacagtgtaaaagtgttcctgtttctccacatcctctccagcacctgttgtttcctgactttttaatgattgccattctaactggcgtaagatggtatctcattgtggttttgatttgtgtttctctgatggccagtgatggtgagcattttttcacatatctgttggctgcataaatgtcttcttttgtgaagtgtctgttcatatcctttgcccgcttttttatggggttgtttgattttttcttgtaaatttgtttagttctttgtagattctggatattagccctttgtcagatggatagattgcaaaaattttctcccgttctgtaggttgcctgttcactctgatggtagtttcttttgctgtgcagaagctcgttagtttaattagatcccatttgtttaattagatcccatttgtcaatttttgcttttgttgccattgcttttggtgttttagtcatgaagtccttgccgatgcctatgtcctgaatggtattgcctaggttttcttctagggtttttatagttttaggtctaacatttaagtctttaatccatctccaattaatttttgtataaggtgtaaggaagggatccagtttcagttttctacatatggttagccagttttcccagtaccatctgttaaatagggaattctttctccatttcttgtttttgtcaggtttgtcaaagattagatggttgtagatgtgtggtattatttctgagggcacatcagagtcatctggaagtcctagaacacagggtttgaagaaacccaggatagaatggggttgaagatgacctgctcccacattggtttaaatactctactcttataatttatatgattttatcattcctacccctaagggaacctgagtactgaaatatattgaaataactactcagggttccacaggagctctcgaaatttagcagtgggtggaaggcgggaatctgacttagaagtgaaactgctgctagtaacccatctataaaaataacccaagttaggaaatagttagtacatgtgattatgaaaactataatctggccagttgtgacctttgtgaagaaagttacgtaaagagaagggattagtaagagctgtagcattgtggtcagaaaactccagaaccagtaacttggatttacaatctggcttcatcactcattcgctgtgtgaccctggctgtgtggtcttttaacatggaatcttcatttgtaaaatggaggtaatacggttgtgtgaagattaaatgaggtaaaacctataaagtacttagaataatacacaacccataaatacaattcttatatttttgtaggaagtttttatccacactatccaggaggtaaggaaaattaaacctgttacacacgtgaggcagagacagtacacttgagtacacttgatgtttccctttcctttaggtgactgtccttaagttggtttgccttttccatcccctacggttccatactcagcagcaaccttctttttactagttcattattagagtgaaaaaacaacagtaatgatatcattagttaaaatggaaggctccctttgttccaggcagtgttcgaaactcttcatttatgatctcattgaatcctcacaataatgtaagagtgctgcctccacatactaaagaaatcaggacatagagaggtaaagtaactttctcacagtcacaagctaacgcctggtggagccattggcaggtttttcttgtacgtgcagatgcatgcgcacgcacaggtctatttggggaagctgcatgaaacaccttcctttgtacataggttaaaggatggacaattccttttgttttcagtgtgtcctgtggattataattctaatcagaaagtcctcgaacagtttattcctccctcaacatttagaagtgattttctttcaagtaagtttcaaagggctttcataagtgccatgtcgtaactgctaccatccctgacataaaatgtagagtaactttaccttgatctcaatggaaataaaagcagtatattttattgttcctcagtcttagccagaattgcaagaatacaattttgttttgaagaactactctttaactctttatatccacatccacattttcttttctttttccttttttttttgagacagggtcttactctcacccaggctggagtgcagtggtgtgatctcagctcactgcaacctccacctcctgggttcctgtgattcttccacctcagcctcccgagtagctgggactacaggtgcgtatcaccacacccagctaatttttgtggattttttttggtagagatggggtttcaccatgttggccaggctgctctcttaactcctgagctcaagtaatctgcccgcctcggcctcccaaagtgctgggattacaggtgtgagccactgtgcccggcctatatgcacattttctcttgttaatttaaccttttaggagcaggtcaccatgcttatctgaaatttcccatccatatggttcgccagaggtctttcatgttatcctttttttagacttggatttagaaaataatcctgctttgacttactatttgggtgatatgattgctctcttaatttgtttctagttagataagtaatttatagggagctaattttagtatatagccggatgaaggagttttctcagccagactgacttagcaacattgtcttagccatttaaaatacatataaataaataataattaggtttgtctttattacggttttgactgtgaaataataattagaccttttagaaagctgtattaagatatattttaacctagccacaacggagcaccctgaaatccactgatgatggattcttctttcttggcactgctagtggcactatattcggtctctactctctgaaaagagtgtatgtctgatcatgatggctgtggtgttagagtaggtaggacaagagcacttccctgaaggagttcgtgtcaagtgctggctttattagtcacaggtatatacattactcctttctctgtattgttccctcctttaagtgtcatccaaagctgctatggaaaaagatattgtcgtcaagtttgtttataataaagttaatgagtgactttgaattgtgaaccctgagcctgagaacaaactggatctatattgaagtgtcatacatagtgtagcaaaacttattaacaatactcattgtatattatcttcaagcattttaataagcatatttaaaacaaaatcttgatttttttcaactgtggacctctacacagcaataggaaagaactattccaactaggttttttgtgtagtaaaacaataaagtactttatttaccaaggaccttgatttgagttcttgttctgatgttagctagctgtacaatgcgtagacaagtaatttaactacttcttctttttnnnnnnnnnnnnnnnnnnnnnnnnnnnnnnnnnnnnnnnnnnnnnnnnnnnnnnnnnnnnnnnnnnnnnnnnnnnnnnnnnnnnnnnnnnnnnnnnnnnnnnnnnnnnnnnnnnnnnnnnnnnnnnnnnnnnnnnnnnnnnnnnnnnnnnnnnnnnnnnnnnnnnnnnnnnnnnnnnnnnnnnnnnnnnnnnnnnnnnnnnnnnnnnnnnnnnnnnnnnnnnnnnnnnnnnnnnnnnnnnnnnnnnnnnnnnnnnnnnnnnnnnnnnnnnnnnnnnnnnnnnnnnnnnnnnnnnnnnnnnnnnnnnnnnnnnnnnnnnnnnnnnnnnnnnnnnnnnnnnnnnnnnnnnnnnnnnnnnnnnnnnnnnnnnnnnnnnnnnnnnnnnnnnnnnnnnnnnnnnctactcgggaggattaggcaggagaatcgcttgaacccaggaggcggaggttgcaatgagctgagatcatgccattgcactctagcctgggcaacaagagtgcaacttgatttcaaaaaaaaaaaaaaaaaagaaaaggaaaaggaaaattgttaatagttacagtaataattaaaattattttattaagtgctctgtgtgtgtttgtgtgtgtgattttctttagtcatcttacaatattaggagcaaaatggggttctgctcctcattctatagatgaaaacttgaggtttaaatgagaaaactggagttcatgtcatcagaatctttttgcaaactgtaaagcttatgtgaatgccagttattgttgttagattgtaatgctcgagtcattcctatgtgggttggaacccaactcttctctgtagctgtgtgacagtaggcagattgcttcaatgttcagaaccatttttcctgatctgtcaaatactgttaatgatgcatacttcataggtttttgcaggaattacatatctggcacatggcctgacacacggtggcatccatgaatttgactcctgctttttcagctaggatattttcattttcttgatttttaaatagaatgttgatggtgattcagagatttatttttctttatttgattttaacttcatagaacatgattttctgttggacatcttagcttaattacgatttaagatcctttattaactactctttacacattgatgctggtttgcaaaatagctcataaaagatcataattgatatgaaaaatttctattattttttccctaagtacttcaattttttcccacttattaagtgattttgtgcaagtcgagctgcttagtaagacctgtctttgtagtcatttcgtgtgtgtgtgtttgcaaggaggtatttttagatagtttagctgaacagcaatctgacgtctttagaggagacatcagttcattatgtggatacaaattctatgctttcggcttttatacaccaagtcttaatttaaatctgtttttcttgccttttctaacgaaagagactacatcatggtatgtattctatttcttcctaaggcttgcctttctggttaacctttgcttaagaaatgatcaaggtagaaatgtctttatttgctcacaacttaatatagattatagaagcatgggatttggggctgtatttaaatatgccattatacattatgctatacagtgtttttctattgcaatgtgattcaaggatttaaaatagttattatggggctcataaatgctgcgttcttttaagaagaagaatgtaaaggccaggatgtgggagttctatacttcctataactgcacatactgctgtatctgttaaaaaaaatgcctttttctttgtgaaagataatttaatgttgagtatgtaagaggagcatggttatttgctttcttactgctctaaatacagtgtttataggaagttataatatcttcttttatctggttctcctcacccttttcaaaatactgggaaaacaagctcttaatgcttgagcaaattcatgttagttgtttgtgaccctgatctcaaaagagataatacctttggttaatgatatacatagtacctttggttaatgataaacgtcgaatttttttttctaattttactacagctaatgttgagaaactattcatatagaactttaaaagatttttaaaaaataattttccaatgtgttctttatttcttttccaaaatttaagttatatctactacatgtcgaaatgtcaaagcttgagtgaaaacttttgttattggttcagatgtgttatctgcatggtgtgaagcatccaggatttaaagcatggtttttagttttcagtttagttatttgataatgtgtgaattcactagaattttagagatattttaattattacaatggaatttctcatattttatcttatatcataaacatgaatcattatcagagagaaatgaattatctaatgccaaagaaagatgcatcttagagtgtcaggttaataatgggcatctgtatgaagatgtggagatcttttattcttcaagaagaaagcaaataagttttttaatatattgaaggatcaaacaagatatttttatagtatgaaaaacagaaagaggaaatcctaaagccaggacatttttttaaaaaaaccctttcttgttcttaaaaattagtggtgttatgtaaccatttaagtatttagctgaagcctgatattaagtgactcagattcctagcttcttaatgatgcgtctttacagtgaaattcaagcagttgccagattcttaagccatgagttcattctccacccccctccccaaatttgcatgcagtaaaaactgagaatctgtgccaaaagaggtgttagcactgaaattcttacatgctaaatgtaacatttgattttaggctgtttcacagtgaaattgtattttaatttaagaaaaatgaccaatgtcaggctgaagtttctttattgaaaagtaacataaaagctctgaaatctgtcttcattggctccttttaacttcccaatacaccgcaccagaataacagttgtttttttagagttttccccaatcagtggagaaaagcacctaccttcgcctaacgtagtaacacagtaatgtactaactctatcaactctactctcgtgtaagccaagtattttcttgcctcagccttgatttggagggagaagcttatgtaagccttttcttgtacacataactccaaggaatccttcaggaattgtgaaattgagcaccttaagaatttttcctaagggatcatggagaagtcaggttggaaatattaagaatatagttaatgcctacctcccaccgccatggagacacacacacacacacacacacacacacacacacacgaattgtaaatgaaacagtgccctggtgggggatacgcagtgcctgactcctctggatttcattccaatagacactttatcccttttttcctgaattaaggtgataaatcttcatttttggttcagttcacttcaaaatatctcatagatttgaaccatcattaactggaatatatgaaatatataaaattcttgaaaattgtttaaagacatctttccttaacttactcttctacctgggtgcggtggcttcacgcctgtaatcccaaccctttgggaggccaaggcgggagatcacttgagcccaagagttggagaccagcctgggcaacatagggagactttgtctctacaaaaaaactgaaaaattagcggggcgtggtggagcatgcctgtggttccagctacttgagagactgaagtaggaggatcacttgagcccaggaggttgagactgcaatgagccatgttccattctgggtgacagagggagaccctgtctcaaaaaaagaaaagaaaagaaacatactcttcttgtgttgactggagattttttccacctctattactttttttatgttccagttttccatagttggtagaatacattagaataagccctatttagtcatatatgaaggtatgtatatatctagtttacatgaagctatctagtttataagcaccagagaatcacagatatcagatgttggccttcaagtgaagaggacacataacaaatatcaaagtttatgtctgatttatttggtgtgttttgttattgatgttttggttactattttcttttattgattttaatctgaattctatgaattacagtctaaagggaggattccatctcaggaggtttgctaatcctgttgataaaattgaaagcattaaagaacagaatttatttacaaagctacattaattcaaatgacaaatatctatccaagttcatatttcacttgaacttttattaggtttctatgtttggaggaagcactaggtgtttctcaagttccttaagagatttataagcaaaagtgtagacgtttaagcaaacttaactttaaaatataaatgaattcctattttacattcctgtggggctacatgtatgtaactattttaagtaaggcttagctcaaaaggaagagaaatcttgagaccttttatctacttaccccatgtgtttattgatttcaagaatcactgtctcatcacagtacggatcagaatattccctccctcatcatcattgtcatnnnnnnnnnnnnnnnnnnnntgttgtacttgtatgtgttaacttgtaagcactcaatgagcaggtgaaaagttttgcaaagttttgcccacaaaatgagtacatcaattggttgattataattttaaaaattaagactctatatttaattgcccactgggatattttgatgtggatgttgtcacagatttgacatggctaaaatacaactcttaacacttaactgttccccccaaccaccaccaccaccaccaccaccaccaccaccaccaccaccaccaccaccaccaaatactaacccaaaccaaccaaccaaccatgcagtcaacaaactattagagtccctagttttcctcatctcaaatcactggggttgccatctatgcacatattgaaaccccaaacctatggattatctttggttcctcaggttgctcaaacctctgtatccttcagcaagtcttatttcttctacctgcctcaccatgaattgatgttcttctctccatctccattattaccaccctggtccaagctaccatcgtctcacttgtaccattcctaatgttgtactgttccaaatacctaatagtacttgtactattcctagagttccccttatttctcatctgcccttcttctgcatgctattcttcacatttataaaatataaatcagacttataaaatgtagatcaaactgttatttctgtgattttaaaactcctcagtagctctctattgcacttggactagaatgaatctccactccctggagaactatgcatgaactagccccacttgttcttcttacctctcattggacttttctccatcttacccactctgcttccattgctttgatcctccctttgtacatttaacagaccaagccatggagccttttccgtagttgtttcttttgctcagaattttatctgtgatgcttacctggctggcttcatgactctcagatctcagctataggaggttttcctcgggcatttctgttacaccatattattctaattctctgccaaacattgattattatattttgggtttttgtttgttgttgttcatgttattactgcttgattattatgtctttccccactggaatgcaagcttcgtgagagtatgtacctcatctattcagttcatcactctgtctgtaatgtctaggatgtgtttaatataaaaaagccatttgataagtaattatggaatgtgtaagaggaaaattaataagaagtacaaaaatgcaggtataggcaacatgtcagtaagcttagaattagtagataattgtttcatcttgagaggattttttttttctcttttgactagattaaacttagataaaatcaaatttgggtataaagactggaggcaataagtagccagtaaacatcaatcactgaatatccacattagcaatcttaatgataagttaagattaacactgttaactattgctattgttatgtcatgtgattctttaatatttaacattttaataaaatatggaaataaatattgtttacctaagcagcaaaaaaattttgatataagcttcttaggaattttagatgatacggaattttagaaatacagacattctatttaggaagaatattaatatggattattttgaagatcaaactgtctttgaaggccttcagtataattcagtgccaaaaatcacgtaaagctacttggatgtctccttgagtgataggacttgactataaagcattatgaaagttatatgcttctctaagagcaattatatttaatgtatgtatatcatggaattgaagtaaaaatatgttaatttttgtttacatgcataataaattgttaataaagaattccaagttacttttccttcttaggatttatgggggtttgtggaatacttgtctttaaaattaataatagtttacattgtagaaaatttggaaactactcaaattaatatttttctgtgatataaaagcaaaatctaaattctactttaagcagtggcatagctaattcacctctcttgatatcggttcctacagctgtgaaatgtgaagattatactaaatgaatcctcaagctcttccaggtctatgattgtgctttatacaaaaacttgtatttgcataatgctttatattaccagaattctttcacatctgttttccatttgttctcacaactgtcttgttaggtaggcagtacagaccttgttatgtctgttccacacttgtgagtaaactgaactactaagaatttaaaattattttcttgagttaaacagccatcttggaactagccatgtattctctctataatttcatatcataatctttgacctcctgatgctaattcctggtgatgttaagtacttagtcaaagtaagtatccatatttcataagttaccactgcagtaacttgagaattttaaaaatctgaccttggaaatttggttatccactcacataatctgtaggaagccagtactaaagtattgtagcgatttgtgatatatacctaatcacctttatggtgcttccagcatatcaaatttttacttttttaaaaagttgaatagctgaatacagaggcttctctaaagtaccttcaggttaggttttgaaaggcgatttttaagtttgttgtccagatggcatacctcactccattctaacttgtcttcctacttccattctaaccccttacaagccattttccccaccccctgccagaatgatcttataaaacaaaactgggtcttgttaacttcctgtttaaaaaacccagtgacttctcattgcacttacagagcctactttttggtaggcttaatccctactgcctgaccccatttgtaccactcagcctttctcacgccttaccttccagtgcatgaactcctcagaaccgtcagattctgagtgcatgttttctccctcaacattctcactctttaccttccagtcaccttgaaattgtttctcgaccattcctaggtttatcccacctgaaggtctttactctggatattccttctgtctgtaaagctttccttccacatctttggctggatcctttgtatttattcacctctcacttcagatgtaattttctcagagcagccttctcagatcacccagtcttaaatagtatcctctccattcccagccatcaccatctattacatgctcttcttgtggtattgtctctacagtacttactgatagctgaaatctttttttaaaattttttattgttacatattcctcctttccccttctcccctcaagcccctcctctctttaagggtgtaagtttcagggagcagggattttgctaatcctagtcattgccatatcactagttcctataacagtgaccggcttgttacaggatgtcagtaaatacttgttggataattaagtagatgaatgaatcttatggttctgagtaactttatatatcttcatctgacaggcttcttgttgagatctatgataggaagttaaaaatatgttgagttcagaagttttgtcattaatttttttgatgctggcttccaggaaggctaaactaaatttattgcataactacagttgctgttcattgtgttttagttttattctggtgatcttacctataattgctgatggaagggggtgactatagagctggtaaggaaaagaacattgggatcaaacagtccctgttcaatttctctcagcctcaatatcttctactttaaactaggtagggttaccagttcaatgatctgctcattaaatacttactataccttaggtactatatgagaagctaggaaaagagtgatgaaaaagacacacctagagagggcattggattattaaatcagcagctactgtaaaggtgtttaagttctgtgacaggcagcattctgggtatcacaggaacatcttacaagaatttctaacttcaggaggagggttcagagaattagccaggccaggggtgagagtgttcttcccggaagagggaacaatgaagacccaggaggagatacagagtatctcgctgtatttaaaataaccagaaatagatttatatatttagtacagaggctgaggggaagagaagtgagtgtgagaagatcaaaaggagaagacagtggggtgcagtggttaggaatataactttttccaaagggaaagagaagccactaaaacattttaggcaggggagtgacaggatcaggtgtgtattttcctatcgtgttttaaaagtttacttctggctgcgacatgaagaagagggtgttacaagaagcaagataggacagtggtagtacagtggcaccacagtgaagtgggttcatatttgtaaatcccctctcagagtgctgtcacacatagtgggagcttggtcaattttgtaagttctgggttttcctaaggtgaattgaggctgtgtaacttcaaggttatggaagttaaactttttgtatctaaaggcattttcaaagtattcctgcttttgtgtatgtgcatgcatgtgcactgacaccacagattttatttaaccagtcatcaggttctctgaatggattttaatgaaagctactctgtttccctgatttcaacctaggatgatacatcagtatgcatacacatacacacttaacagaaacatttagagaaagtagctgaagttgaggaaggtaaaccacagcttaatacagcaatagaatattaaaagtttgtattaatttgggaagaatgtactttctaagagagttactcaactggtgatgtaaatcaatcatggcaggtgactgagaaagtcatgaaaagtgctggagcattggcagaagtgagggggtctcttttaggtaatgtgtgcttgacgatgtcatagtcattcagactattcatttaatggcatgtgtctaaggtttacaaaaaaaaaaaagatgaaggaaaagagaaaaatctattagacttcttgcagtttatgagtatatattcctgctggccctagacagtgagtaatgcaccacaaatgttcagtcagttcttgtatagtgccctcccgacagccaaagcaatgagattacctggcatgccagggttgacacatgaagcctttgaaaataaatgtgaaattaaattcttatcattgaaatccttagaaataaatcctaacatggatatctttgtcacagaagtaaaaggaaaaattgatagacacataacatgaatacccagtgtttttgttagcaacttaagaagggtaacataattattttttgtcttaaagattattgtctagctcagttgtaatacccgtcactagaaaaggagtacctgtggtggtggttgttgcataaaatctagaagcaaatttttagaggtaggatctgagatgtcatttaaaatcaaggtagtttcctgtgtatgtgtgaatatatacatctgtgtgtgtgaggattgggtggagattagtaattatttttatcattttttgagacaaggtttcactctgccatccaggctggagtgcagtggcgcaatcacagttcacttgacttcctaggctcaagcaatcctcccacctcagcctccttagtagctgggactacagacgtgtgtcatcacacccggctaatttttgtatttcttgtagagacagggttttgccatgttgcccaggctggtcccaaacccctggactcaagctatcctcccacctcaaccttccaaagtgctgggattacaggcatgagccaccatgcctgaccagacaatttgcttattaaatacttactgtaccttaggcagtatttgagaagccacacagtacataaagtttctcagttgataaagttatataaccagtgtatccacaaatgataacttagaatagatggagtttcacagttttgagtcactatccattgtatatatatcaagacaagctttagtgctgttgtttttttttttatgtcctcttgatgtaagttgtaatgaatatctttttctgttaaagttatgtggaattactgttaatgttttatttttcttatctcaaaagtaattcatatttatatttaaaattttagaaaatgtagataagcagaaacaaattttaattgtccataatcctaccatgtaattatagctattgttaacattttctttatacccttccatagtctttattttgtatatgtgtgtagaattggttcacgttaaaatgaggaaaatcttttgtgcaacattaccaccgttgctgatatttaaaatgtgttgaattattgactcgtacattttgagctcccaaaacccttcagtggcttcccatctcattcagggtaaaatccaaactctttaccatagctccccacgtgatttcacccctgaatatctctctgccccaatccctctccttgtcagagcttgtactgacctagctattcctaaaacatgcgaacgccaccctaccttgggcttttgctcttagtgtgtttgttgctgaaatgcctgctactcccatgtgcttctgcaggggtcaggccttcattccattcatatcttgtactcagatgttacctaagcagggaaacctttcacaccctatatcctggatacttaattaatttttaaattaccactatgtgatgttcttatttttttgatgggcttcccccaacttcctacccactccccaacacagacacacaaatactaggatataaagtctatggagtcagagttttgagtacatccacccttcttcctaatgaaataagtttacttctatttttttaaaagactatagcataaatttcaagagaagtatttattctcaagtggtcagcctattcaataaattttatgagtcatcaaaatcaaacaatcaagtaggtggcttctagacctaatttttcatgtaacctatgaagcagcacttttaaaaacaagtaattttccggaaaccttatagtttcatcatagaatatttgtgtcttgatatttgagtagatattagtgctctccaaattagagggcactgaacaactccataaatttcattactgtctttggttcataagataatctaatactttgttgattttgttctcaagttacatacacagcacaataatttttcataatatatttaatgattatattcctttggcctagtgatatgctagatttatctcaactttacacaaagacaaatatgaagtatacttagcaatgtattatatattaatatatgaaaatgttatatacaaaatttgtgtgcttatatattttgtatacatgtctatatatgtattttatgaagatgatataattaaaattattcctttgggaaataagtgagagcataaaaaaatgaaaacaattttctcgtcttaatatcacatcttaggtcatccctttctgtctagtcactgtttatcacatcggtttcttttcatctttgctggatgcagtacttatcacaacttgacagtttcttgtttattatttaattatttgtccccacccactagttgtaagatgcatgacagcatgggctttattttactcattgctgtatttagcaaactcagaatagtgtctggcctactggttttcaataaatgtcgtttgactagttaattgaagagtaaatgaactgtcgtgtttattttatccaaactgcacacagtcccatgaaataggatgttatcagtgtcctgcctacttcttcataaggaatttagaatttcactgtggaagaattttcagttataggtcgtaaaaatgatcctagtatttgtttaggataatgctagctattgtaccaaacaaaacaaaatataatggttcaaacacagtagactttcttttaagtctccttttcataaatctgatggtgttcttgatcaatggacaaattccttctagatagtggttcagggttgcagcccctctccattttttggctcagttgtgtttaaccttcaatgcaaagcttgcgttttcttccaacagagactctctttaatggaaagggaaagatcatggagggtctcatgtgtaaggttgttatgagtaagatatagaagtggcgtactcacttctaactgttcatactccagtggtttgaactcaattggcacttacgtaaccggaagggacgttgggaaatgtaatctagcgatgcacccagcaagagagcactggtgaatagctagccagtctcagccacgctactgtatgtagatctaagttcatttgcatttaggtgtaagatagctttataacttttaaagagttaaaaattaattatgggttaatgtttttaattctgtgtaaggcctccttcccaaacccaaccttttttgttcacaaagaaggcagcttagaatcctccatggatcccataggaatcttttttctttgactttaaacactcatttcccgagctccatactccattgagcatttcttcagttgggataactaagtgcagtccctttggagctcatcaaagttgttgtctaattggttatagaagccatcttctgatcgtaccagcagctgcctccctctccagggattgccgcttccatagcatcagtcccactaggttctggaaaacaagaggctgagaactcaagttttagtaattgtagaatattaccagtatttctatattaattagtattacagtctaaatggtatgattgcatgatttgcttatagttcataaacatagattttggagcctgttactgagggttttggacaagccacttgagctctttgagcttccatttcttccttccttccttccttccttccttccttccttccttccttccttccttccttctttccgtccgtctgtccgtccttccatcctttcctctcactctgtcacccaggctggagtgcattggcatggtcttggcccagtgcaaactctgcctcccaggtgcaagctattctcgtgcctcagcctcccaagtagctgggaggtgcatgccaccacgcctggctaatttttatatttttagtagagacagggtttcaccgtgttcgtcaggctggtctcaaacgcctaacctcaggtgatctacctgcctcggcctcccaaagtgctgggattactggcgtgagccatcgcacctggcccgagctttcatttcttcagcaatgaagtgcaacatctgggctcttcatagatattagaacaaagagacaaagtatgaaacgttcagcgtattgcccgttatacaatacaggccccctcgccccaaagctatcgcagtaattattattaacattaagagaaaatatacagaggagtttggaatttaaaatagatgaaatactacccagagcatgacttttaaatcacccaactcagtaccaacagttggtgtgtttttcattgaaagttcttggactgaatgacctagagaattttttggaatctcccaaagggatttatgcatttcaaatgagtggttgttgatggttgaaaatgaattgaaaaggaaaaggaattatatgcagagtgcatgcctgtgtgtatgcatttgtgtgtgtgtgtgtatgtatgtgtatttgaaatgagaatggtctggctgtcacttgaaatccatcataaaactgtttattaacaggcaacaggacatttcatttggccatatatacattaatcaactacctccgtgtttctatggaaacttgtataaacagttcgattgtaccatttgaggtctcagataaacattttcaatgacactttcaatggttctaataataattctactattgttcttgatgccagatatctcagatatctttcttaaagtgatagaattagttgactagcataagagagagagagtgtgtgagtgtgtgtgtgtgtgtgtgtgtgtgcgcgcgcgcgcgcgcgcatgcacataatgttttttctgaccttcagatgttggggaaattatataaaagacaaggttttgtttccaccaaaatcaactatcagaaaataagccaccttaatcttttatataatgaagttctctctcaatttagtttattgtttttaaagaaggatgtatttttccataaggaaaattaatcagaaatgaccccaagcgatcttagcttggaatgtttataattcacatgatggaattggtataagggagttaaagaagttttacatagatttaataacgaggcctgaatatgtgatctcagaattgcaattactggatattaccataaaccttgtaaagattaatttataaagcaaaaagtaaatgatggttgttgtaaagaacttgcaagaaaaatgaaaaatcagcttcctgaatgttatacagcactgtgtcatttatagacacatcactaccttaaacaaattagaaggaatgtaaactcaattggatgactcaaaaagtgagtcagctttgcaaatgtcaaagtcattgatgttggagatgcagattaaagtttcatgagtgagaaattatttacaattaatatttttcatgtgnnnnnnnnnnnnnnnnnnnntcactagtaatttgatctaaatagccatttgattgttccatcaatatccatgagaatttcaggtcaattagtaaataataaatatatttaagtttaatgcttaagtgtgtgctccctaaccgttcatctggggctggaatctgtttccatcaccttttcgctgtgtgatcttgatgcaaatcacttttctgcatctgaggtttcctcctacataaaatagtcctactaatacctattttttaagagtgttgtaaaaattaagtaagctaatgtatgcaagtacttagagtagggcctgtcacatagtaactggtgtacaggtgatctaattttgttatctttggaaaaatggggcaaagcctcacattttgaaatacatggtacttagatcatgcagtttctcatcacattgaagtattcctctcttccattttcaagtgaagttcatgtaggtttcctttctactcaatgctttctttgaacattcaatggaaaaaccctcctaaaagtatttgctttgaaacattagtcaccttgtgacagacagccagttttcaaccagttcactaatattgattatttattttcctcatcggggtcccaagtgtatttaaattgtccccatttcatacacgcaagaattaattcctttctgccttgggagagggctagggtaccatatttcagtagctaattccaccacataaagatatatatttggacagcaagccatgtgaaatactcattatataagccacatcttatcaagccctctctgttacaactctaaaacattatcataatataggaaagtagcaaggaacgtttgaaatgcatcccttcccccaacccccaaaaaaacacacaacacagtggtgtttctgttcagactgtcctctgagaggcagtgtgctccgtatggcaggagcaaagctttgtggttttaccatacttagtttgtagcatatgtctgtgccaaatgcatattattttcgaggcttttgcagtcaaatataataaggcaatacacataaatgcacaaaactacgcaagttgttatcactttgagagaattctaaactacagaaatttgaatattttattataaaagagagtaattgaactataagcatatcatgaaaatgaagttatttagtttgcaaaatgtattatggtattctaagcagtgagttcctctccatataaatacatgatttatttaaaaggtaatatgtagacttttggggaaatatatagtaagtgaactaccataatggtagttttaggtatgacagtgtcaaaacaagttgtttctttggttggcttcttcgtttccaccgaatttgaaaaatatctggcctaaggtggtggaggatgttgtctggaaaaatgacagaagaaatgagaaggaatagagaggcatatgtaaggtagattatttggaccacagtgattatttcatttgatcactctattatgttatagccatttcatagaagaaactgaggtacacagaagttaactaacttgcccaggttcacttgacttaggaggtagttgaacagaagattaatccgtatatggctaacatgaggcttctgtcttctgagcctggtaagaagctggaagaatgttaagtaattacaaattgttaattttggcagttttctccagtagataaaagcaaataaatttttgcagacctattcttataaagcatagttacatcaacaccttaaaaagtctacctgtagtttaatcagaaaaacattaggccttatcttatcagtttattaagttattaactcatgacacatttagaaaacttttgtttcctgacattatatatatttattagcaaaataaattttatattttacaaaaatctttctctttgctttgtggaatactgatctgatatatgaagacttcaaggatgggtgttgtatctagggtatatataaaggggttatgaaaggagccaaaattactgtggtgaataatatttaaaagtccaaatgtttactttttcttgtgttcttacagagataggatttaaagaaataaaagatgatcagattataaactggtctttaaaatgagctactaaaaaatttcctgcctcatcaagctgcatgtagaaacaagtcagagtgtcagaactagtagtacctgaaatgattaatagcagaaaggaaagaaaaaggaagacagtgtgggtgtgtatgtatgtgcatgcctagagaaagagaaacaatatgaatggcttttaaaataacttgagttccagagggagtgaaagatcgtgtctatagctgggtgagtttggccacgaaagccctttctgggaatagctcaataatccattggcatctaggcttagattccagctacaggaatcatgaagctggaagggacctgcgccttgcagagtctggtccgtgatgatctgtacttaacactttagtcatttctgtgtgccaggcacttctctaagtccttcacacccatttatttattcagtcctcacaacacaggctttcaataaatgatggatgaatgctgaatgaaaatatagtatcctttattttttacaaatacctcagagaaaaatagaaaatatgtctaggaatatacttactccaccttgtagagattaaaaacgtgaacataaagactcaaaaccctgacaatgatatggggaaagcagtgttcatttgggtaaattctgagtgatgcatcttaatatgaagttagttttagtcactaagtgtgatatttattttactttaagtagatttattcaaggtaagatgcctgggaaaattgactagattccagtgatcatcaccccaaaccttgtgcattctgttataactgttacttaaagtggttccaagattagtttgggaaattatcagttaaatacatttcagtcaatagacagtatttttttgtttttaactattggatttctcagcagtcctaagatgatgatgatatgtatcttggaccatgaaactctcttttacattaaaaaaaaaaaaaagacagagagaataagcctctgttgataataaaattccacaaaactcatccctaaaacttggggatctggtaccacagatgctgcgctatatcaataattagtaattcaggacggaaaggaagaagaagggcagccacccttgtttgtactgcactgtcaccaattttaggtattttaccaatttaactttttttttaacttattattacttatttacttatgagtatttacttattggtatcagagacttcaaggcatccatactcatctttatgttcaagatcgagttcatttattagctagtaattttataaatgccaaccattagattaatcagtgattatcaaattcctatttatatattatagagacttaaataatgtgtagaatttacttttacaaagctaattatggtagcatctgtttgtcctacataataaaaaaaaaagctattatacaaatgataccaaggttttatgaaactacaattagttttaggtttatgcttatataaagtattacttcctgtgtgccaggcacttctctaagtccttcacacccatttatttattcagtccacacaacacaggctttcaataaatgatggatgaatgctgaatgaaaatatagtatcctttattaatattataaagtattaaaagtgtaaagtaatacttataaagtattactttatatactttaatactaatatactttatgtaagtattactttatatatgcataaacctaaaattaatataatctgatttaaactatataattaatataatctgatttaagtctgatttaagaatctgatttaaatattacccttgtttcttatatatttagcagtgtttgtggttaaactatgattcaaccatttgcctaagagtagtttattaaaattgtcattcacaggtggtgttttttaggactataggttgcttgctccaggaacaaaaaattgagcagtaatatatttatataatcgaatattaaaataaatatttaagtgataaaaatgaaaaatataggtgaaaagattccttggaattgtgttcttaatgaattgttgggaaatacattggtattaaaaatacataaaatgtgttactttttcatttaattaacttaattattgattttattcaggtaattactgtatatttctagctttataaattttattttttgaacagaatttctgttataaatggtggctacagtcgcaagataattcacaacctcaatttaatctgtaatttaattaaatagcgtactatacatagtaatttaaattgggactgggtcaagcttagaaaaaagtttagagtaagggatgcttgctgtcacgttgtgccttgtatatatttctcagatctgtgtttccctgatggccttgggtttaaatgtgggcatctgcccctgtgtctgcctcctgactctcaacccctacatggtttgtttgcctcctagaaactccatttttcctaggcatgggctcaggcctctatttcattagagtgtcatggcagagtcaaatcaatgcatttcagtttctttccttatgggaacaccttttataacatctcccattccataacttgactgatgtgtattgtcaataaaatttaataataatgccagatgtggtggctcatgcctgtaatcccagcactttaggaggccaaggcgggtggatcacttgaggccagcagtttgagaccagcttggccaacatggtgaaagcctgtatctgcttaaaaaagaaaaattagccggggtcgtgggcgcctgtaatcccagctctttgggaggctgaggcaggagaatcgcttaaatccggaagggtggaagttgcagtgagctgagattgtgccacccacaccccacccggggcgaggtgacagagcaagattctgtctccaaaaagaaaaaattaataatagtattgttatcctaattggtgggaaaagattttaaggtttttttgaacatggcatctattcttacatatctcatattaaaaggcatttaatcaatgctaatttatatatgcatttactttaatatatcattatttcatgccattctgcaaagaacacagatagtgcggagaaagggataaaaacagtgtttgcagtggctcacacttgtaatcccagcactctgaggagggaggattacttaaggccagaagtttgagaccaacctgggcaacatagagagacccttttattatnnnnnnnnnnnnnnnnnnnncttttattatctacaaaaaattttaaaattagctagacatggtggcatgtgcctgtggttccaactactcaggaggctgaggtggaaggatcacttcagcccaggagtttaaggctacagtgagctatgattgtgtctctacactctagcctgggcagttaaggaagaccctgtctttaaaataaaaaataaaaaaaaatcttgtattttctattgtttgtaacacctatcacagtgaatttggaggtagtagaggtttggagttaggaatgtcttacttatcttgatactctctgccactagcagagtgtatgacatggcagatactcaataagtatttattaaatataattgaatttttaaaagcaacgatatttctttctcttttgacagtctttatggttctgagcctaacatttccatgtaattctgatatttggctgtaagtaggcacagatgaatagattgtggtatctaaaagctggatgaatgtctcttatgttaggcttggagctcttacaactcctagtgctctccatacagtgaattcttagtcagggaagatgatggattctgaagagaagagagttctgtgagacctgaataaataaaatataaaaattcattagatagttttatcttcatttgacacgttaattttttttaaaaaatcacactatgttgcatgtcaacctgagtcatgtctgtaaaagataatcaatagaaatcagtttattgttctctaattacatgtattgattgatgccttttaacatctctaagccatagagtaatgtttccccagttgccttctgcagtgacttaattaaatggaagtgtagctaagacgatgaagggtatctatcctgcctattatttattttcatatctgatcaccatttagctatgtgtaaaattatagtcattaatacatatctgcaaacttctatctttgaattgttcctgaagaagtcctgcaaatatttcactattctacattatgaatgaaacataaattctgaatttagaggtatttgcctatcccttacagataagttgttattctcctaaatattacatatttttttattttttttactttttattttttattttttttattattatactgtaagttttagggtacatgtgcacattatgcaggttagttacgtatgtattttacaacatcttcaattaccagtttctttaaaaacactgttggtaagataggtttgcgattatttcacttctccaagctccctcaacaaatgaatttttctccatttatttggcatctaattatatgcccctattaagtttatgtttaaatctcccctttgtatgccttgtatccaataaagttattatttctaaacagattgtatgtaaatattgttaaatataattcacttaaggtagagaggggtgtaatctattcagacagtaggtctgaattattaagggatataaatacattttgcctacttggagctccgaagtatcaaaatccattgatcattgtcgtaaatccaaactgtctcccttgtgaggcttactctaaactatgcagtaacattttggagggggagggaatgagcctcaaaaggtggacgggaatactactaaggttaacgtttatttaagttttaacaattagtccttatatttataactatttgccagctaaataggatcaatatgcaggaaaaagggagtgttatcagtatttcatgatgctagttaacatgtattttgaaatgctgtttcattattagctcaatagtataatgtgtgatattatagataaatataatgtctttttttattcaaaagaattggtaataactgataagagtctaagattcttaagaaccttacatctgttttcttagattctcacttgacgagggcataataagagaaaaggggctcggtaaatatttgtcaaataagcggtttttttttttctaatgcattttctctggtatataaggggtggcagaacacgtaagggatacttagtgaatgtgtttattttaatagagactatttttatttaaacatgaacatgtagaaagttgatatttatgtatatgaggataggtaagtgttgtccataactttctcaattctaagatctttgatggcattcttttctctttctttgtagagcctagtacagttgcttatatggcaatatacttcatcaattctaagatgctctcttttttaacctttaaacattatttgggtataaacgtagcttaaatgtgttttcttgtttaaactgctttttgccacaaagttacatttgtgatggctaataaatagtactgtagcctaatttgctcattgacgtgtgattggaaaattttagcttactaaattaaatacccaagtttatcttaataaccaaacccacctatttaagacattgaatttagtgttatttaaggctcatgtgtgctcatacactttaaaaattattatatgtgatttttggtaaataagacaatatttagtaatttgtgaatgtggaaaatgaataccatttttagttcaatggtatagaataaaatatgatattttaattttaaaatgtcttcttggagttcttgattcagattgtaatcctagtttttcctgctccttccatagcttcctgcagatttcacaaaactgcatcttactgacagtctccacccacaggtgacccacgtttcttctagccattcaggatgtagtatcactagtgattctgggagcagcagtctttctgatatctaccaggtaagaggatgttttccttgtcatttgcttcattttcatttattccaagaaattttaaggttctcagctgatagaatctataaaataaatatatgtgtatattacatgtgcatgtaagtacataaaatattaatgtttatttcgtatatgttatttttagggtgtagaactgctgtctgattatactgcctctgctatgacgagttatcaaagtgttcctttttttatttgtataaatttgtggggtaaaagtgtaattttgttgcatggatagattgcatagtggtgaagtcagggctttcaggttatacatcaccccaataacctacatggtgcccgttaagtaatttctcattatgcaccccctactcccgcatgtgctgagtctccactgcttatcattccacactctgcatccatgtgtaaacattatttagctcccacttgtgactgaaaacgtggtatttgtctgtctgtgtctgaattatttcaatcaagatagtggcctccacttccatccatattgctgcaaaagacatgatttcattttttatggctgaatagtatttcattgcatatatgtactgtactttattctgtcatccattgatgaacactttggttgattctatatctttgctattgtgaatagtgctgcaataaacatacaggtgcaggtatctttttgatacaatgatttattttcctttgggtagatactcagtcatgagattggtagattgaatcgtagttctatttttagttcttggagaaatctccatactgtttttcatcaagagattgtactagtttacattcccaccagctgcatataagtgttctcttatctccacatcctcaccatctgttactatttttgtctttttcatgacagccattctgactggtgaaagatagtatctcattgtggttttaattggcgtttctctgatgattagtgatattaagcattttttcatatgtctgttggctatttgtatgttttcttttgaaaatgtctattcatgtcctttccccactttttaatgggattaatttttttgctgttgttgttattcagttgtttgagcttctggatatgagtccccagtaggatgcatagttagcaaatatttctcccattataccgattatgtgttcactctgttgattatttcttctactgtgcagaaggtttttagttttattaagtcccatttgtctgtttttgttgcctgtgcttttgaggtcttactcctgaattatttgcctagaccagtgtccaaaagaattttccctagattgtcttctaatatttttatagctttgggtcttaagtcttcaatctgttttgagtcgatttttatttatgctgaaagataggggtccagtttcattatatggtaatccaattttcccagcaccatttatcgaaaagggtggcttttccccagtatatgttcttcttggctttgtcaaagatcggttggctgtaaatacgtgactttatttctgggttctttattttgttccattgatctatgtacctattttaataccagtatcatgctgttttagttattataaccttgtagtataatttgttctttctgctcaagattgctttcactattcaggctcttttgtgattacgtatgaactttaggattttttttttctaattctgtgaaaaatgatgctgggattttgataggaattacattcaatctgtatattgctttaggcagtatggtcattttaatgatattaattctttcaatccatgagcatgggatgttttctcattgtttgtgtcatctacaatttctttcatcagtgtttattatagttttccttgtaaagctctttcacctccttggtcgaatatattctaggtattttgttttttctgtagctattgcaaatgagattgctttcttgattttgttctcagctagattgttattgttgtatagaaatgctactgatttgtgcatattgattttgcattctgaaacttccctgaattcttttatcaaatctaacaattttttgatggagtctttaggggtttctatatataatgagatcattccatcagtgaacagggataatttcacttccacttttccagtttgggtgccttttatttcattctcttgcctaattgctctggctaggacttagaatactattttgaataggagtgggaaagtgggcatccttgttacagttcttatggggaatgctttcaacttttccctgttcagtaagctgtaggtttgtcttatattacaagtttttcttattaaagtccatactgagtgtgacaaaaggaagggcctaataagactggatcattgaattagcttccttgtgtttttaaaaaattattagatttagtatctgcttaaaataaatttttatgatactgaaggatagaaaataagccagagctatgggattccaaaactgtttttaaaataaaataattctaattgttaagaaacattttattagctttgaatgtgcaaatttaggaaaagagactgaaatatacacaaatatccttatttggccttcaaatacattatgttactattggattgtatatggtttcaagcaaaataacattattcttactttacaaagaataactcttggcttattaggaactgtggcatgaaataaccgtaaaaataactttctttagagacaatatagttatgaaggatcattgttgtatttagtcagtgctgtttttatttttttaattattgaaagttagtgaacaattaagaataccatcaatacaagacatattcatttaggtcctaaatttagtagatcttgaaaaataattttcttttaaagagatagtatactagttatatacttttctcagtttacctcctcatcacatacacacaaacacaccatttattctgaaagttgatttttctaaacatttatcgaagagttcccttgtgtaaaacaatgaacagtatacataaaagttgtattttagtttatattaattgaaatattatggcagagccttcatcctctaaactttgagattattattatacatcttgaaaatctatagtgagaatacagcttgaggttacaattatcactgttctcatcaaataaatacaaacttggatgaaactcctaaaaggtaaatctattaagataatgaagtaacttgtttgaccaggtgcagtggctcatgcctgtaatcccagcattttggggggccaaggcaggcagatcacttgaggccaggaatctaagaccagcctggccaacatggtgaaaccccatctctactaaaatacaaaaattagccaggtgtagtggtgcatgcctatagtcccagctactcgggaggctgaggcacgagaatctcttgagccccagaagttgtcagagcagtgatccaagatctccccactgcactccagcctatggggcagagcaagactccgtctcaaaaaacaaaaaagtaacttgtttgtataatcgattgaggcatattctgaggggaattctagtcatatgtgcttttaccttgaataggctagataagtacatgaggaaatgcagatggtacttctgcccctggttatcatctgattgtctgtgaaaccagagtgtggatgagagttcctaattgctctaacatagttggagcttacagcctgctatctggctttatctttgggtgtagatgaagaagaggatccctgtgcatcatttcagttgcttaagtgtcaaagctatttgtttcaaatttgatgacaggcagatagcctgtaagtatatatccatcataaggaaaaatccatagatgtatctaaggatctagttattggctgtgcaaaacttaacatttagtagagattttcagtagaccacttctgttgtctttgaatctgaacttaaaatgagaagtctgacatgcatctggttcaacttccaaatttgcatttgaatcctctgcttctctcctgtgaatcaagcatccagtttattcttgaacaattccaagggtgagcaactttctcccctagaagcctatttgatcttcatacagttctgatttcagaggtctcctgtcacattgaagtgagaataaatgctcacaagatggacacagagagattgaatttagatgctgtacaccagggagatatggatagaataatgttgctgagatggtgggaagagaggaattcatgagtgaattcttagtcattcttaattactaaccttaagagaagaaacattcttctgttttaacaggaacacatcctggggagtttgggagttgtgggagttcctgtcttagacttctgttttctctcggaagagttgagttcatttgttgagagtgagagggttggcaggtagagagttttaaggagagagaagttttgaaataatagttgcagagagtaggagaacaaattgaccagagaaatggagattcaattgagttagtgccctcaaatataaagtgatttccctctgctctgttaagtagctttctccacagtaagcacaaagaaagcaaggatttgacttcacccaggactgaagtttgttaagtgagtgtaatacaaagacaggtcgagcaacaaggcaagcgttttctaactgcagatcatagcttttgtatgccttctgcctggaatgttttctcctagcttgatccttttcagcctttgttttcaagtgtcatctcctcagagttgttcctttataatcctctgtaaaggaagtcctccattttgattcctttcctgcctaatctttttatttccttcctagacgccaattgaaccaattattaatttttatgttatctctctgcctagaagaatgacaccttcaagaaggcagggaacttgtctctcttgtctctattttttcccctagagcctagcacagtgccaggaaattttaggcattcagtaaagatgtgttgaatgaatgtaattgaaataatagactagggaatataagctggatatgaaaggaagacaggtgtgaacactagacacagaaggtagtagagtcttgagtgaagatccttcttaagttgaaaaagggttaccttagaagcagatgggggcaggttgaaagaatagaaggttgttggtgattgaaagctttaatgcctaagttagtaatacgagacaatgccatttccagccatgataaggtcctggttaaatggtatggccatcaggatcagagcgagtggcttaggcaaaccggaaatagttgtacaaaatagatagatcaatagaacagagagttcaagcaaaattgaactcatgtgtaaggatgtaatatgtaatagaggaaacttcacaaatcaataaagaaagtgatggatcattcaataaatggtctttggggttggggaatcattttgtattcttattttgtatcataattaaaataaattcctgataaactaaagagttagcaaacaatgttttaataaaggatcaaaacattttgtaattagaacatcaattgataagaagatttaaagtcagaatataactgatttacacaaataagaaaaatactcagctcacaatgttaaaatgttcaaaggacagtagttggtaacttacagaaacgaaaatgcaaatgtctacaccttaagtatttgaaacataatagtaattgagcatataaggacttaaatatgaaattattctgcctatcaaattagcacagattttcttacttaaaataagcatttatagacatttttatatactcctcgtaggattgtaattttggggaagcaacctaacgatttacattaagagctttaaaaaattgttcttctcttttaggcatatatatgcttttaataagcaaaacttttttggcaagtgattttaaagtgcttactgataaaacatgcagtatttgatttttattttagttaaattaatacttcagtagagctttatggcataaaaatttttttgtttgtgaattttcttgattttttttaaaaaatgtaaaataaattggttttaagaactgtgttcacaatagcagaatgtatttagtcccttttgatttaaatagtggagctttcagcattgatctgagaatattgtttttaaaagaatatcactatttaaatattaatggacaacaaaatctatgttagtcagtacctgtataagataaattaatttaagacaggagttatttggctaacataactatgtaaacctttctccttgttcctgaaacaaatatatccagataagcttttaaatataaagcgtctgttttagtgtctttatttagaaaaaaagggtttaaagacatgcgtgagtcttagtagtgttgttatttggaggaagctagaaaacaataagtgttatgttcataggcaaatatgtatttaaactttttatcttttatgacttagcaaagtggaaaacattttattactgtattatatttcaatttttttttataagactattgagaatgtcgagcaaagtgcagagtacttagtatttcttggttggtcacacctgattttgagtcctagcacagttactgtgttttgttttgcttacattgaacaacttatttaatgtccttgacattttctcctctgtaaactagggttagtaatactaacttgctgaattgatatgaagattattatgttttaaaacatcaactttagtgctagacacatatgatagtcattcaatataggttcactatttttataattggtgtatgaaccagttgaccagaatgtatttgtgcagttagtctaagatactattttacaaatatataaggagagtgtggtgtttaacagaattttgtggggttttttggtcaaattccacaaatataaattgcgtgcagcgttcattgctgctatggggagaggtagaaggtgtacaagttctaagatgaagaaagtatccccttgaggaagggacttttgatctagcttgagactggcttgctttctcccttatttgatccaaaagcagtcctatgaatagtaagaagttgtatctacagtttacatcgatgataagatgggcttgtggaggttaagtgactttgctaaaatcacatcatgaatagtagaggtgagatttggagccacaaaactgagtttgttcacacagtaaatactacattctaggtactcttcttaagtttagtactcctcctggagaccagtttgtgttccttaaacttttaactccacttagtctctaaacatcttgtccacaaggcagtggtattatgaaattagtaggtccctgaaaagttgtttatcacgttcttttaaagagtatgatttagagaatctgtagtattttaaggtaaaatggttatttattctaaataataatctctaaatttttggtttagtaaatgttattttatgaatagtttgtttcttaaagcatggaatgcacatagagatagcaagcaactgtgatcttttaaataaagtggaaggttcagtttgggagagataaatccagttgacagttgaaagtctttatgttctgcttaagacttaaatataaataatttaaacgataattatttctttgggatggtataaaatatattccatctttttgcatacattagatgttttaaaattaaagaaaaaccattagctatataaattattgaaaatatttttaaaatttctgtctttggtagtgtcctttcttcactctatgctaatattaaagaatgtttatatagagaactgataatatttttgaaaatataaggtgatgagtaataaatagtcttcaatgtgaagatgaaactgaggtaaaaatgtgatcatagcaagcattagcaaattgtatttctagacttcagggtcaggtgctgataacaatgttgacctattttctctaaccacaaccttggcatactatatcacatcaagttctacttcagtttccttcttaaatctagcaatgattcagttaattttgagtttaaattatgagatgtgtttctgagtgtgtcacagttctgtctgtatgggctgcagtggcttattactctcctgcctgcagtatctctgcttataatgaccaggccattgaactttcataaacattaggttttctgtcttcaatgattttccccttaagtttcttttttaaataatatatgcattttagttcaggaaattgtacctaaagagcagaaaatgtgataaaactcattgttaacacatgcttgtattatttcaaaatgtaggattaaatcttatgttctgtgatatgaaccgggactttacaaagctgaaactttgtttataagaaaatagcacaggctgggcgtggtggctcatgcctgtaatcacagcactttggtaggctgaggtgggcagatcacttgaggccaggagttcaagactggccaagccaacatgatgaaatcccgtctctactaagagtacaaaaattagctgggtgtggtggtgcacacctgtagtcccagctactcgggaggctgaggcatgagaatcgcatgaacctgggaggcagaggttgcagtgagccgagatcgtgccattgcactccagcctgggcaacagagcaagactctgtctcaaaaaaaacaaaaagaaagaaagaaaaagaaaatagcacaatttattctgtaaatattaaattataggaaaaggatagatccttatataagccacattcatattcagtgaatgtttaaaaagagacagattagattgcgattaagactctgaagccagaattcctgggttgtagtcttgattccacagtttatcagcagcatgaccttggaaaaattatttctcttcacctaagtgttaagagaataataaaagttaataatggcttttactttatagggttgttttaaggattagatgagttaataaatacatagcaattagagcagtacctgacacattgtaagtatttagtgttaccttattattattatcaaagtcagtattttatatttttatctttcttttaaaaaatatttttttcttaaaaaaggtatttattatctttgagaatcgtatgggctatgatttgaagttgaactttgtaatatacgttttctacaaaattaataattgtataagatgttttcaagattttaatatttcatttggaaaaacacttctgttcaagattgatgtagttaatatttaattgaattcatttttactatgcttaagtgataattgaagtctaggtatataatgtcaaataagatctgtatgatatatacatacatattgctgagatgatagtcacaaaaggctacatggtgacctagaaaggataactgttctaggattgagctagttcaacaaaagaggccatcttgaaatgtgtgactccagtgacttagaaaatttgcaggtatcttgataacttgaagtttagtgatgtgattacctgtgttgatgaatgggaagaaagagtatgttgcctttacgcgtatggtctcctatagtgtttctcgatttatagtttaacagtggtcattgggataatccaactaattgttaatgtttcgtttgcatatttatcaagttacctttgatttgtggctcatttttccataaggactgtctaattggggtaaaatggtccaggcttcttggcattaataaattcacacctattctgcaaaaggaattgctcagaattgtcacccttaagctgttagcctaagccattctctttgaagaatggagtgaaaacaaatactttttcttctttattctactatgtttcaaatgccatatgacagctaggataagaaatcaaaattactgagataaagtcgttattcctgaccaaaaatttaataggaggtggaatcactcatattttgttaaagtaattgttacatgtagtttctggtgcatacatagttgttggatggaaaaataaatataacaagcattattttgaatgaggcttgctcttgtttctttgggccccaaagatttatttacttaaaatagtttttaatttttgtgtgtgtgtcttaaggccacagaaagcgaggctggtgatatggacctgagtgggttgccagaaacagcagtggattccgaagacgacgacgatgaagaagacattgagagagcatcagatcctctgatgagcagggacattgtgagagactgcctagagaaggacccaattgaccggacagatgatgacattggtaagcttgaacaggaaaatgaatctacgagcaattaaaaagatttagtggcaaaattgtctgatgaaatagagcccaagactagtaggctttaaaaactcattaatttattaatttcctttgtataaacagtagtatttgttggacaaaaattggaaaaaatcaggtttactcagtcttaccttcaggagtctacaaataataatgtgaatgaaacttcttagtaaaccctttccacataaaccctttcttaagcttagtttatgacaaaaaaaaaaaaagttaaaatgagcctttcaagcagtattacttctattaattttctcgtgagcactgtttttattaagctcatgttttctgtatgtaaacataaaggcagttggtaaaattgtcacagtgatttgcttctactctggttttgtgtgaagacgcaagtgggtggaaggagacagcaaaatgtcaggttagtggcatataggctgtgtgatggttgagactttttttctgtctttcttttgctgtttttgtccttttttttttttaatttttattttatgttcaggagtacaagtgcaggtctgttacataggaaaacctgtgtcatgggggtttgttgtatagattatttcatcacccaggttttaagcctagtaccctgtagggaccagccccacagggtcggtgggtctctccccatgtgcagagacgagagagtgtagaaataaagacacaagacaaagagataaaagaaaaggcatttaggcccggggaccactaccaccaagttgcggaaaccggtagtggccccgaatgccaggctgcactggtatttattggatacaaaacaaaggggcaggataaggagtgtgagtcatctccaatgataggtaaggccacttgggtcacgtgtccactggacagggggcccttccctgcctagcagccgaggcagagagagagaggagacaaagagaaagacagctaatgccattatttctgcatatcagagacttttagtactttcactaatttactgctgcgatctagaaggcagagccaggtgtacaggatggaacatgaagacggactaggagcgtgaccactgaagcacaggatcacagggagatggttaggcctccggataactgcgggcgagcctgactaatgtcaggccctccacaagaggtggaggagcagagtcttctctaaactccccctggggaagggagactccctttcccggtctgctaagtagccggtgtttttccatgacactgaggctaccgctagaccatggtccgcctggcaacgggcatcttcccagatgctgacgttactgctagaccaaggagccctctggtggccctgtctgggcgtaacagaaggctcgcactcttgtcttctggtcactcctcactatgtcccctcagctcctatctctgtatggcctggtttttcctaggttatgattatagaacgaggattattataatattggaataaagagtaagtactactaactaatgattaatgattttatatataatcatgtctataacctagatctagtataactattcttgttttatattttattatactggaacagctcatgtcctcggtctcttgcctcggcacctgggtggcttgctgcccacagtacccattggtaatttttcctgaacttccacctcctcccaccctctaaccttccgaaaggccccagtgtgtgttgttcccctctgtgtgttcatgtgttctcatcatttagctcccacttacaggtaaaaacatgtagtatttggttttctgttcctctgttagtttgctaaggataatggcctccaactccatccatgtccctgcaaaggacatgatcttgttctttttatggctgtattgtattccatggtgtatatttaccacattttctttatccattctatcattgatgggaatttaggttgattccatgtctttgctattatgaattgtgctgcaatgactttaagtgtacccagaggttaaaaatttaagtagctttatatccacctttccatcatagcaagagttggttgtgtagtaattgttttggatttgagtatgcctcccagactctgccttgtttcttcgaacactggaaatgagagcaacttccgttgagagtcatccttccacgagatttccagggtccatagccacccttgcctgagccttgcttgtctgttgtaccactcccccaactcttgggccaatacatatttgaagggcaattaaatgaactgaatctgttggaattgataaaggatggtgtggagtggcttgttacatgagtttgagtgacacaaacatgtatgaggaaaaactttcaccatttcagctatatacatattctaggaaattaaaggcaaaaaaaaaccaaaaccttagattagacattcaacatttaattgaagtaatttatgggaattgctaactctttatagatgaatattgtatggtaattattatttattcattcagctaatgtgggtgagcaccttctatgtaccaagcagttttctaagtcctggcaactcactcagtgctgaacaagggcaaaagtccttgttctgttgcagtctattaggggagacgcgtgatcagcaagtgaacaaataaacctattgcaggcagtgagtgcagtgaagaagagtaaagtagaggctgggctgatggaagcaggggagtggcctgagtggaatggttctgtttcaccccctgaagacttaggtttgtacttttcctgtttctgatatcgcgtgttgatctgatttacaatttctaaaaacgggtttcactctccaattccctgttcactttcttgggtccaataccacatgttcagctgatttccagtgtccaaaattgcatttcacgttctcattctttgcccttgccaatttctttctttttaatcccctgtagttttaaagaagtaaattggaagtgtgttcagtttaccatttcaattcagaatctttactcataggtgctttaaaaaaaaaaattggtgaaacgttgcctatgaatagattgatttggaagttaccattttgtaatctaatatatcttttttgaatctgttcattttaaaatagttgtgaagaaaatgctgattattaaaatacatgtctgtcattcttggaaatttaagactttcagttgatagctgagaaaccctctttcccagaatctctagaaagcagcagccataatgattcctacaaataaataaaaagccatctttaaaaaaaaaaaagtgcttgtcaatataattgctacagggagtagcatttatttgaataccagtttacttgcaagcaatgacaattatcatgtttgcagctatcaaagatacatttatttaaagcaataaatcactaacattaaacaagtcctaaagggtgttgtttgttctatgtaagaccttgaaagattttgtattctatttccctgaaaataaaatatgtgtgagaactgtttagctcttgttaaatgcaactcatcctccaggatttagttaaaatagacaacctttatataaaatacaaacatctgtatgattgatgttttctctagatgcctcttttcctacccaacgtcctcttcccctgcaaaaaagggacagattatgtccacgtgcatgcatgtgagtgtgtgcatgagtgtttaaggtgaatcaaatgaaattgctaatatttgaacatatttttgcgagctgcaggaagaaaaaaattccctttgggttctgatagatttcttgggtatagttttgtttcagtactttgaaggaagggactttatcatattaatttttaccctggaactcataactttgtaggtactccattattgaatagttttaaaaaattttttttgttttgagagtttgacacagtaaagtagaagactactttgatctcttttaacaagccccgggtttttaaaaaaaattaataaaacatttcttatataaaattgtatcaagcaaaccaggataagctaattttctgaattggcttcggcttctggtatctataagttaattatttgggtttttttataatggtacattgtaaataaaatgtttttaaagcttaatatttttccataaacgttagataggtcataatagtgtatcattctaataggtaagtgtataattctatagattgttctaagaaatacaaaagaaaattgtcctgtttctcccatccgtggcttcttttcctttgtcctgaggattttcctagtatccatcccaggctctgaattcttggctatcctaagcccttttaagtctgtatgatacctatggcattgtcagagttttgagccccctgtagcaggagtctccacccctgggccacagactggtactggtccctgacctgttaggaactaggccgcacagcaggaggcgagtgaaaggtgagggagcattaccacctgagctccacctcctgtcaaatcagtggcagcattagtttcataagagtgcaaaccctactgtgaactgcatatgcaagggttctaagttgtgcactccctatgagactgtaatgcttgatgatctgaggcagaacagtttcatcccaaaactatccccccgcacccaccaagagtggaaaaattgtctttcacgaaacctgcccctggtgccaaaaaggttggagactgctgccatatatatatatgattggttataaaatagttctttatttttaaaaattgctccaatcatctagtataatatagcatagaaattatctaaaaaccagtgataccattattgaatccttgaaatcttaaaatgaaatcttagatgccatctggtttagcatttatgtatttctggtttttcagctgagcctggataattatgtacatctactatttgatctttctgtctcctttattcttacaatatatgatatgcaggtatcttctatcctgtggttttttttttaatgctagccgctacttatatatcacaaattaaactcatgacccactaatagattaagagtctgccaaaaagcacgcaatatgtctacacgaagcactttaaaattattacaacaaatacttgtgaaggtactttgtattttcttcccactttttattctctgatcatgtatgtggtaattatttgacttctattattgtctaaacagatactaaattcaaaacatttctgacaatttctggcccacatttttcttaaacccatgaatctttgcttgtccaaagaaatttagcaactacaaggggtggaaaaaagtaaaatgcatggtctataggtaatagtatcatagtttatggtgaggcgtgagggatgatggctaaagaaaacagaggctggaagctgcagaattaactgggatgtgcttcagaggaccatgacttgttcatttgcctttataatgcaaatcaaaaggtcaatgcattggtaaaacaatgattcctgcctcccatatatgatagatatgggtcatctcttgcaatggtgttcagaattgctttactgcttctccaggaataaatacattttatggtacagcacagacactcctactcattccagaaataaaagtttcatgaaacagaacgtattctttctataactgatgtgctttgatagtttaacttattttttaaaaaatactggtagcaaaagtaaagtgatttcctgacacataaatctgagtcagtttgtgcaacactgtcctattggacagaatctttgggtacacctatcattatcattttccttattgccagagcccccctgtgtaatgaaaagtcttatataggagggatgacatagagtccaatcagaacatgccattgcccaactgggccagagaaaaccactccgtctgtccttccagaaatgttgtatctgggaaaatatattcacagaatatatttttctgttgtgctttgttttagcagttaataaactatatccaagaacataaaatttgtcactaaatcttaacagataaaaggaatgtatatagggaatgtttgattatgtacaagaaacatctagtatgatttttatttagccaaaagtttgaatgatgtcatgactattataataatgacaataatagcagttctcatttattgagtatttactctgtgccacggacttttatcatctttattgcattttattctcacagctatccagtaaagcagatattgtatttttctttttaagtgagaaaactatgacttagggaagttaatcaccttgcccaaagtaatacagctagtaagcatttaaacatctgatgtacatacaccctgtgctctttaccactccctttaaagtccagcatgatctttggaagcagatggtcttgaatcatgtcactgccactttttttttttttttttaagagacagagtctcactctttcacccattatggagtacattgtcacaatcacagttcattataacctcaaactcttgggctcaagcaatcctcccacctcagcctcctgagtagctaggactataggtacgcaccaccacagatggctaatttttaaaatattttgtagagatagggtcttgccacattgctcaggctgatcttaaactcctggcctcaagcaatcctcctgcctcagccttccaaaatgttaggattacaggcacgagccactgcgcctggtcttgccatctcttaattatatgatgctgatgctgagccttggtttcctccctatgaaatgaaaaagaaaacgcacttcacagagccatggtgaggagtaaggaaagaacttagtgtgtaattagtaaagctactgaatgataagaaaacacaggacttttaaaaatagaaaacccagtacttgaagagactgtgacatcaacagctagaaccctaccaaagtgtaagctgtttctccaaagcattcccataggaaagaagagtgaacaaacttccttttttgccaacttgtgggctaaaaaatggtgttatcagttttcattttcatttatcatatcatgtcgttaattttttaattgatcttttttatggatttgatacatggaaaatattccttagaatgtttgaattaaatatagttatttctgctgactattttaggcattcacctgcccaaaaggcacaggaatgaaccaactgacttgttggagaattctcagagctacctttcatttccactctcataataataagccttatatctcatttacaatagaaatttcccatttgaagtttagtaatgtctttagtggtattagaactggagttacaataaaaactgttgcctctaattcaacaagtaagagtcatcatttccacagtgacagaattctttgtgtacctgcaagaaattcagctggtgctaaagatacttgatatgtatttttcaataagcaaaattgtagggcatttaaaaagaaaggaccctaaaacattctttttgaatacttgtttttaataaaagtagtagtttttacaaagtatgtcttttgcttttcagaacaactcttggaatttatgcaccagttgcctgcttttgccaatatgacaatgtcagtgaggcgagaactctgtgctgtgatggtgttcgcagtggtggaaagagcagggaccatagtgttaaatgatggtgaagaggtgagtaactattcctaccacttaaaaagtttcttcttaaagatatctcaatacagcaattgaacaaaaccccaattcttactttttcctttttaatacccaacaacagtaagtttgaataattcaagaattatggtacacctgttatgtcactgtattagtccattttcacactgctgataaagaaatacctgagactgggaagaaaaagaggtttaattggacttacagttccacgtggctggggaggcctcagaatcatggcaggcggtgaaaggcacttcttacatggcagtggcaagaggaaaaatgaggaagatacaaaagcagagacccctgataaaaccatcagatcttgtgagacttattcactaccaagagaacagtataggggaaaccaccctcatgattcaaattatctgccaccagatccttcccacaacacatgggaattatgggagtataactcgagatttgggtggggacacagagccacaccatatgagtcactatattccaaatccattatatttcccattatttacagaatttcatatgaaaatagaaagtttttgatatattaacttttcagtttttgcatcttaaatattcataaatttaatgcattttgtcagacaaaatgatattctcgttgaggcaatgatgatcattttgtctacatgagctttggggggacagagaaatttttttccttgtgtcattttagagaagaatatccaaagtcaaattaaaagggcattatgatatacattctgtgctaggcatatggaaatatgtagatatgtggctgtgttttattccttattctgtgaacttgttaaacagtaaacttgagttacttgttttatctccaaaatggaagatctgctaattcatttttagggaccatactggcacttacagctgtatgatcatgatgttactttctgctttgtctttatttttttggattagctggactcctggtcagtgattctcaatggatctgtggaagtgacttatccagatggaaaagcagaaatactgtgcatgggaaatagttttggtgtctctcctaccatggacaaagaatacatgaaaggagtgatgagaacaaaggtggatgactgccaggtataaaatatatcattaaaaatatatattttattcttaataaagaacacttatatgccattgtgatgagatttttctccctatataaatatcttacaaataatttttttttttttttttgagacagagtattgttctgtcagccaggctggagtgcagcggcacaagctcggctcactgcaacatctgcctcctgagttctagtgattcccctgcctcagcctcccaagtagctgggattacaggcaatcgccaccacacccacctaatttttgggttttttggagggcttttttttttttgagacagagtctctgtctcccaggctggagtgcagtggcgcgatctcagctaactgcaacctccacctcctgggttcaagcgattctcctgcctcagcctcccgagcagctgggactacaggcgtgcaccaccatgcccacctaatttttgtatttgtagtagagatggggtttcaccatattggccatgctggtctcaaactcctgacctcgtgatccacctgcctcagcctcccaaagtgctgggattacaggtgtgagccactgcgcctggcctttttgtatttttagtagagacggggtcttgccgtgttggccaggctggtctcaaactcctgacctcaagtgatccccccacctcagcctcccaaagtgctgggattacaggcgtgagccaccatgcctggcaccaataggattttaatgtggaactattacttttagtcttataacaccccagaaaagtaaaaattaatttccattttacttgaactgcacgtaactatgtgttcgactaaaaaaaagtgttatgtaaggatggtatttttaaattgccaacagtaattaataatctcatcaaaatatggaagtaaaatgcacattatgaagtaaatacattaataaaagtgatatgaaatagttatgcagtgtttttatttaaatacatataagaaattgattttagaagagtcatggaaattaatcatagtgtgaatcagtagaatgacttgctagttaaataatagctaataaaaagaaaatacttgatatcaaaagagaaatagtatcagtattgatattttattgatattcatatttaaaagcatctaataattgactagagaaaatactaaggccaaatgtgaaactagattgatttaactggcaaccactatattacagagaaatacatttaagatacttttggtattattaggtgtttataatttatgacgtcttctaaaagaatttgtctctgaaacaaaattaaatgtaaacaaccaaatgatgtgacttaaactgtcagttgtatttattagtctgcagtttgaaaaacatctgaatatagtttattttaaagtaacataattgaatttttacagtgtccggtcaatgtaaaatggtatcactcatttaaatattcattttaagcattttacttactaaaaagaaaaatgaccatggctatacataaaattatcttatctatagaatctaaataattccaccagctaattccgtccatgagcaccatagaggaaaaaaaaaataaggctatgacttcagtgttttaaatatgtaatgccagaaacgcattctaaatatatttacttcccaattattttgtataatagaggaaaacaaaatggtataagagaggaaaacaaaatggttaattctcagttatgtggtataatagaggaaaacaaatggtaaatattgaagtctttatttagcgggaatgggcatttaaagggaattatatatgctgtttcagctctgtaattgtactcttaaaaaaaaactaatctaaactgagtcaaaacaagctagcaaattgttaaagccttttcctgtctcctattttctcagttcttccctgaacccttctacatagtggaattacaatagtgtttgagttagagtgtgtgtccttgacgagcaagtaaaagtttgtttgtttttttttgagaattcagccattgcattaataccccttaattagccagacccttttgttagaaattttgtaagtatgagactgaaatgatatgcggcatagaattgtttcaggataattgattgaaatattatatgactgaatattacagagtgcttaagtcatgtcaaatgcaccaggtaacattatttatctgggagttctggaaaaggaagaggaagtaggggttatgttagggaagagaatctaatttatttacaaagtgagggattagtaggaaacccagatagtcaacagggaagagtccaattcaaaagaaaactctgattaagatatatagactcctatatagctcctagtgtgaagttaattatgaagagggtcaagggtgaggtacctgctaaagaaagtccctatcttcctttctgctacactccacaccactgtaaaaggaatatgttaaatcagggatttcgttcttgtacttccattgactcatctgcttaggcctagcattttatccctaaggaattccttaaacagggatggagaatgaattttggcattttaatgtaagtacttgcttgggataccattttaaggtatttctgttaaaatgtcatataactgtcagaaaatacaaatgttagctcatctccttgttgggagaagtaaaagaaacagtgagaaccatatttttattcatgcataaaatagcctccatgagtttctatcattttactgaccatattttagggaagcaagttattgagtgaaatgaacaaaaatgatgctatctttaccaagaaaaaacaactttgcataggctttgccatcattatcttatatttcagggagttccaaaatgaatattggtttctgtagtaagatggttgagctcatgttaagcctaagaacacaatgatgaatggattaaatttaagatttatttgtttggatcccatgatatggtcaagctcttgttttgctctgggtcccttccttatattctcttccagttctcccacttcagtgtctattcttactccctgtctggtgtgaaaggacaaagttcagagcttgatatacacaccctatgataccaggcaattggtaatggttttccattacccacatgtacctctttcttttctttttcccttctcctgttgccctttctttatttcctcttttaccctcttactccctttattcttttcccttgttttcttctccactgcctgtgtcttaggcctgccagtgacacccaggcattgcttagccctgccctccacccttcaagtggggaatgaacacttggatacccatgtgcacaattaggtatgaatttccctcacagactgcaaagtgccagtttaaatagatctcacctgttaaagcaaatctatgttagactcacctcttcctggaatcataggctctaatagcacttagaatgtaagaaacagttttggatgagaatacagtttgctgtggataaattgaaaattgattacactatatgtggtttgaagtttaattttatttcattcatcatctgtaatgttttacttaaatacaaattataatgtcatgcccaaaggaaaataatcctatgatataaactgtcattgacttttataagtgaattcttacttgaatttttattttatactagggtactgagatcatatagtactttcatgggcttacagcaatttgaaacccatgagatttacagaaacttaaaacctcagtaaagcaattcagagattttctgaacaggtacggtggctcatgcctgtaatcccagcacttgggaggccgaggcaggcggatcatgaggtcaggagttcgagaccagcctggtgaaatcccgtctgtactaaaaatacaaaaaaattacctgggcatggtggtgcgcacctgtacaatcccagctactcgggaggctgaagcaggagaatcatttgaacccaggagccagaggttgcagtgagccaagatcacgccactgccctccagcctgggcgatagagtgagattctctcaaaaaaaaaaaaaactcaaagattttcaactgacttcatcatattagttaaaattaaatgttacctgtggatttcatattagatctataaatttgttatagcaaaaataagttgcttatttaaaaaagataaatattttcaagtaaaatgtatttcttttaaggtaccagttctatatgaccatattagaaattcagtttgggatttttttttttttcctttttggatggtgttccagcttgctatagaataaatgccaaaatgtctgtctagacactaagaatttcaaatcaaatgtattctaatttaaaaaagtctgtagtcaagattaattttagtacatttctcttcataaagcatttttcccttatatctacttattcagttgaattcagggatgtatttcttttttagaagataaatgagaaaatgagtatttaattatgttctctaaaactgagcacaagaaagaacacctagaattatttggaaataaaaccattctaaatctcttatatgtatttgggaataattttgctgctgtgtacaaagaaataaaatattttttagataagaaactaaggatcatgtattttgaaacattacacacctgtggtcagtgttaaggaaattgctcagaaataatgttaacagtttatttataaaattaatgtgatactataagcaatatttttaaaaatgtaatatcagagctctaaaggtatttttaatataattaaagtatgcataattactagtacaaaaaaagcctatatcttttgatttttaactttttgcttcaaaatgctgaatagaaaaactagtgagattagccaactctgggagaaatatgatactgcaatatgctgttcctcttatgaactgctgcttctacttaaaatctattgattatgcagaaagcatgaaaaatatagaaagatactaaaatgaaagtcgctcataatttgcattgctcagaaataatattaacagtttatttccctccaagattttgatgtgcatgtataatttattttaaaatggccagcatgtagttatgagacatcaggctgtttactcatctgtacagtggggataatagcaccttcctcatggtttgattaggaggatgaattgaaaaagttccataaggctgccacagtgtgatggtgatggtggtgatgatgatgttgtcattatgattatcgtaatatttagtatagtatcttttttaaaaaattaatatgagcaatataaaaagaataatgtattatcagagctctaaatgccctatgaaatcatgatttcaggtggttgcatcatattttatcttatttacaatataatttaaccacctcctttttcatcttcttcacattaaaggaggaaaagaaataccatgcttctttccatttccgaatgatctcttgtctcctcactgacctctagttaatttctataataagtgatttctatcattcattcttaactttctttaaaacttctaagaaatgtaatttcttaagtggtttgccctaagctctgaaattttttatatttggggtcagggagagtaatgacttcatatgcagatttttagctttttctttaagagcaaggattacccttaataccagttataaggataatgttttgagctataacacatatgtggtttgtgttttgaccttctttgaacaagctttctaaaatggtgtttcatcaatataattagcaaattaatatatctactccataggtatctttgagtgtctgtatctttcattaaaatcattctcattcaaaaattgttgcttcttcaaattcttttaattcactagatgataattaagtttttacatctattctcctacaattccactccccccactgcagtgttttttaattgtgaaagaagcatgaaaaagctatcttctaattatgtcttttgatttttaaaattattaggattttgaatgtaaaatacatataagtattctaaaaatgaaacttttcttgaccaaggaagaaatacattaaaagtagagaagtctgattaaggttcattacagcattaatttagaaagtatgggaaagacagggaaaaatgtcagttttaaataattaaaacactgaattattagtactgctaggtcttttgcaagcactttatcattaacatgtgacttatgttttattccagtttgtctgcatagcccagcaagattactgccgtattctcaatcaagtagaaaagaacatgcaaaaagttgaagaggaaggagagattgttatggtgaaagaacaccgagaacttgatcgaactggaacaagaaagggacacattgtcatcaaggtaggacacaggaccactccttcccaaggaaaggaattttttttggtagtattggttgtggcagtttaggattttttttcatttttaggcctatctcttaaaggttatcagttgtgaaaaatctttatgtatgatctcctagtgaatagcagtttcattaattgttaactgtgttactatccaattcattttatgttgaatgtttgaaatcccagtaccatataaatgtcatatatgtgtgtgtgtatatgtatatgtgtgtgtgtgtgtgtgtgtgtgtgtgtgtgtgtgtgtgtgtgtgtgtgtatatatgtagtaattaaaccttttctttgttacagggtacctcagaaaggttaacaatgcatttggtggaagagcattcagtagtagatccaacattcatagaagactttctgttgacctataggacttttctttctagcccaatggaagtgggcaaaaagttattggagtggtttaatgacccgagcctcagggataaggttggaaatatattctattttgtctcttaaatatgaaatgtaaacctaaagatactttaatgtgtatatttgtcacagcaattatgtccagattaatgtaatgaaataggagaatgtaattctgaagcaaaaaaaaacaaaaaaacaaaaaaaaaggtgatacaaaatattagttcagccttagaaatatgaacaaaatattagttcagccttctttaaacacaaaggccaataaattggccaccaaatgtttaaacatttttttaagttctgttgggagtgtgttaaaacataaacatctggattccataggaatctacattttctagtttggtagtaagtgtacaccagataaaagttacagtttttaaattggcaccagagcagcatttcatgacagtcatcactctctgtaggccccaggattataattctaaggagaccatctagagctcttgagagctctaaggccagattggatgacaaactacattgtcttatctccttccttttatattctgcacccttacagagctttctaggcttaatagcattgattctctttgtccagtctgttcttctaccttgactttctagtttctgtcttttgtattagctgatttttgttttattacacctttgcttttattttgatctgtttcaaatgcattttgaaagttagacaagttttaagttaaataccttcacagactcagaacctttcctggcaaagcaacatgaagtctatattcaaagtaaaaatactcattttcagaaggtcatcctcatttaagattttattattgttaatttattttcctgtttattattattaggtaaattatttgaaagttggatatcttttctggaatgattttaatcacatttttggcactaaaaaggaaacttattgaaaataattgacttttcaggttacacgggtagtattattgtgggtaaataatcacttcaatgactttgaaggagatcctgcaatgactcgatttttagaagaatttgaaaacaatctggaaagagaggtaatatttgtggttttttttaagatcagcttaaagttcattttattcagcctgttcttgagttgacactactgtttctgaactcttaaagaaaatgggtggacacctaaggctgttgaatatcgcgtgtgctgctaaagcaaaaagaagattgatgacgttaacaaaaccatcccgagaagctcctttgccttttatcttacttggaggctctgagaagggatttggaatctttgttgacagtgtagattcaggtagcaaagcaactgaagcaggcttgaaacggggggatcaggtatgccatttctaaactcatttaagggtgaattttggtgtctggttttttttttcagtcaattttgatacattttataatttcatttttagatattagaagtaaatggccaaaactttgaaaacattcagctgtcaaaagctatggaaattcttagaaataacacacatttatctatcactgtgaaaaccaatttatttggtaagtattttgcatacttttcatttttctccttttggccttgttttttagtatttcaaacatcataagaaagcatatatggtaaaagcatagattagatctaaataaaaactactgacttgaccataaaaaatatttttaatctgtctttattgataactgaaatcttttattgataaatactaaaataaccgtaaagagtatactactctttttaaacttattttgatagagcaacataccaagcagatttggcgtgattcgtttactgtgtgatactgtttttctgcaggtttgcagttttgataactgaagtctgtacttctcatatatttccaagttccacaattgccttagaattgttcagatatcttataattgccattacgtggtgtttctgttttcatttattttagtatttaaagaacttctaacaagattgtcagaagagaaaagaaatggtgccccccaccttcctaaaattggtgacattaaaaaggccagtcgctactccattccagatcttgctgtagatgtagaacaggtgataggacttgaaaaagtgaacaaaaaaagtaaagccaacactgtgggaggaaggaacaagctgaaaaagatactcgacaagactcggatcagtatcttgccacagaaaccatacaagtaagcatctgcatatgtcttctgtgcattattttattttgttaaaatgatatgcaaagatagtgatgtaattaatgtttgcatgagtctgaaaactgttctaggtttttatgactgagctattttggaagcagtattaaacaatcaaatttgttttaatctcgtttttgccacttatttggctactcccaatcttctttaaagatagtttagcatttcctcatttgaactattttttgggggtttggactttttagtttattttttaatttttatttatttatttatttatttattttgagaaagagtctcactcttattgcccaggctggagtgcagtggcgcgatctcggctcactgcaacctgtgccgcccaggttcaagtgattctcctgcttcagtctcccgagtagctgggattacagatgcctgccactgcacccggctaatttttgtatttttagtagagacggggtttcaccatcttggccaggctggtcttgaactcctgacctcgtgatccacccgcctcggcctcccaaagtgctgggattgcaggtgtgagccactgcacccagccgcaggtttggactttttaaaagcgtgtgtttgcctcctgtctcctccatcatgatttagagttgctttttctactgtattttgtttctgggtatcttctttaccaacagcatgtgctctttaccagtcaaatcattgctttatccagttgccattattcatccctatcattctctgttttcccctctctcttctattttcagttatttaattactgtcaaggcatcaacagccaagcacagaactcctttcatttttcccagtcaacttagtagtcagaatgtcaggtgtattcttgaatttcttcttggttatttatttatgccaggagctcagccaggctagacaaaattgcaggtatttctgatgctttttaagcttgcttctttgcttgcttgcttcttcattttagttccttcttgagtctaggaatgttttataaaacttgattactgtcagccatttctcactgtgccacatttagttatatagtccccaaactacaatgttagataataactttaaaacatataatttcgtgctttgataatttaatgggtctaaagacatgcagtagatatgcaggactatatcaaacacttctttttcttttttaaaaaaattccgtttcagatcttttttaagaaaactccatttcagataaaattttcatccacagattagagaaatgtgatttaaaatatactattgattggttgagttgtcccaattaaactatagagtaatgattggtggttttgtatcagcagtcttctatagcagagtcctaaggataagcagtgagtagtatttataggctcaagaggatatattgagtaagtttctaagagacaatggattagggcacctggcatttacagaaaatacgaatcaatttttaaaataaccttcgttgatgaaaaccttatttttaaatggatgaaaaaataaattacctaaatgcagattttttaaattaatttatttttttgagacagaggctcgctctgtcagccaggctggagtgcaattgctgtgatctgctcactgcaaccttcacctcctgagctcaagcaattctcattccttagcctcctgagtagctgggattacaggtgtgcaccaccatgctcggctaattttttttatttttagtagagacaagattttgctgtttggccaggctggtctcgatctcctgtcctcaaatgatccacccacctgggcttctcaaagtgctgggattacaggcatgagccaccacacccagtcctaaatgcagaattattaacagcacaataacaaaaaaagatcttagagtcatatttgaccatgagttaaataagaacctttaaaaaaaagttcatatgaccctggcaagtataaatagaaatgtgacatgtaagaactgggagataatccatcagcaatactggatgttggaaaggaacacaatatgagaataccatgtctaattttgttctatgtgtatttagaaatactcaaaagctagacaagggaaaagaaaaagaatgattagatgtgttgattttaaaacactgaggaaacatcttaaataatttgtatttaggaaaatatatggctcatttaaagatttatcatgaaaattatttgaaatcatatgtgtaatgcaattgaaaagaaaaaataattaaaggaagtttcacaaagctgtaggatctatcatattggtaacagacttgatttatactatactagctattaaatttttctataaattatcatttgtgtatgaagattttttttttgacaaagctactaaactagcaattagagaagtctagatagagtatactgttgagttttttcctcaaactttatcagccttagagaagctaagatgctagataatggtaaattggcaaggtaggcacaatcgggtgatgtgcatagagaggaaggagaagatggggcatgagctcccagaattcagatttggttgccaagtaagtagaaaaagactaatgaacccagagacaagaaggagtaagtcagcacactataaaaccagtgcagatcgaaagacaatttcagtaacaaggaaagtgttggagaggtagaatcctaagaggatgtgcccagaaagggacatttctgaattaggtcttggatataaaatagtttcaatccaagagtggccgcatgtctggatgacagagatgtaggtgagtaatgaggaaactgagagtagaaaggcagttcatcatgtaaggtgttaaagtgttgcggagaaacggttcttaaaggttgagtgcgcggtggctcacgcttgtaatcccagcactttgggaggccgaggcggtcggatcacgaggtcaggagatcgagaccacggtgaaaccccgtctctactaaaaatacaaaacattagccgggcatggtggcggacgtctgtagtcccagctactcggagaggctgaggcaggagaatggcgtgaacccgggaggcggagcttgcagtgagccgagattgtgccactgcattacagcctgggtgacagagggagactccgtctcaaaaaaaaaaaaaaaaaaaaaaaaggttgagtgtgcctgcaagatgctaatatttgtagccttttgtgccggagtggccaagccagctatgctttgtcctgagcccatagtaatgatctcgtgtcatgtattacatagcaggtttttggcagagactgctttatatggttgaaaaataaaattccactaacgtaaaagttttcatcttttacagaatattaacacttttagtctttatgccggttatatgattaaatagaaatttaattttgtcccggactgacctatgaatttgaaataattcacactgaaattgtctttatttttttttttaatttttatttcagtagcttttggggtacacgtggttttttgttacatgggtgaattatatagtggtggtgaattctgggattttagtgcacccatcacccaagtagtatacattgtacctaatgtgtaactttgtttaatccctggccctaacctcacccttccccttctgagtctccaaagtccattgtatcactcagtatgcctttgcctactcatagcttagctcccacttataagtgagaacatagggattttggttttccaccattatatcacttagaataatgaccaacagctccatccaagttgctgcaaaagacattattttgttcctttttatggctgagtaatattctgtggtgtagctataaacacattttctttatccactcattagtcgatgtgcacttaggttgcttccatgtttttgcagttgtgaattgtgctgctctaaacaaaacgtgtgcaagtgtctttttcgtataatgtgaaattgtctctagttttaatttttgtctttaaaaaatgtttttgcccttatttacctttataatttccattttcaaaaaaaaaagtaaagggaagaaatgttgctattttttagcatagtcattaaaaatagtagttattatgatcaagccccaatgtgtgaaaagactaataaatgctaaatttcttcattttatttatgacaccttagtttatattccaactttaatataattttcctcttatttcaaggtgtgtatagaaactagtctgagctataaccattttcttgcgaccccagttatttctgtgtgtgtttgcttattgctttatttgagtttttgttttggaaacagttgacccttcaaatctagaaatagtttttacatattattaaatcatgtttcaagagttcacagtaacaggctttttataaatggaaatgagtttgtcactgtcgataataaccagtatttctctggatacttaaatgtgtagctagaaattttgatcagagaattaaaagtgagtcattggatttctgttggcttttctttgatgctaggaaatgtcaccatgcaccactgtttttttatgctctgtataatcaagaaataatgtctgtgtcagtctccttacatttgactccatagtgatctcattttttctctaaaacatcgagaataaaattaggacactttggatttttttcctcctgttttcattttacccaatttcttcaactattgaaggtcagattataaaataatttatcattctgatgcagaactatcagttgagtgagttaaatgtattctttttaatgtgctttttttaaaatccatttccatcagaaactagagcttatttttttttaaatatatttctgtgctgagaaactactaatattttttatggcttatctacttagaaaaaccataggtttggccgggcgtggtggctcacgcctgtaatcctagcactttgggaggccaagacaggcggatcacaaggtcaggagatcgagaccatcctggctaacatggtgaaaccccatctctactcaaaatacaaaaaaattagccgggcatggtggcggacgcctgtagtcccagctactcgggaggctgaggcaggagaatggcatgaacctgggagatggagcttgcagtgagccgagatcacaccactgcactccagcctgggtgacagagtgagactccatctcaaaaaaaaaaaaaaaaaaaaaaaaaaaaaaaaaaagaaagaaaaaccataggttttagagaaacatactatacacttaagaaacagcaaaatgaggctgggtgctgtgactcatgcctgtaatcctagcactttgggaggccacagcaggaggatcacttgaggccaagagtttcaagcccagcttgagcaacaaagcaagatgctatatctaaaaacaaacaaacaaaaacaaaaaacaaaaacaggaaaatgagttggatacacttaagcagtagttgcttttgcagttttcaaccaaatttattaatggtgtttttacatgagctgcaaaaaaaaaatggaatatggtttttggtctgtgtttattatatagtgatgatgtacaactttttaacttgttgataattttctaattttcctctttgttcagtgatattgggattggtcagtctcaagatgacagcatagtaggattaaggcagacaaagcacatcccaactgcattgcctgtcagtggaaccttatcatccagtaatcctgatttattgcagtcacatcatcgcattttagacttcagtgctactcctggtgagtatcaccaacacttcttttgttttcttatagttatctttttatttctaacataatggtcatattatatgtatctctcttcatttggcatggattatatcagatgctgagtaaggatgaaacttaaactttaagatttttgaaatcaggtgttggaaccagttctctttacattcagcagagtatttttatatggccataggcaaattatctgtctgaacttgtttcttctttcataaaatgaagataacacatcccatgccatgattactaaatcatatcaaatagatagagtaagaggcatattttaggtctaattaatggacttttcaatacagtaaagattaactctggatttaaattttatttctttgatgccagcatgacagtcttgagtgctactgttgtgtactgatgtgcttgcagctgtctgtagttcaatctgttatcttttagggaaaggtatgttcttgcagcaaaacagcatgtagattgattctttgaggaagacctagagtaagggagaggtaaaagttcagcattgctttttcttaaggagcttttttctgattactttgcttaattgcattgccatatattaaaattctttctacttatgtgtgtgatttttctttcccccagacttgccagatcaagtgctaagggtttttaaggctgatcagcaaagccgctacatcatgatcagtaaggacactacagcaaaggaagtggtcattcaggctatcagggagtttgctgttactgccaccccggatcaatattcactatgtgaggtctctgtcacacctgagggagtaatcaaacaaagaagacttccagatcagctttccaaacttgcagacagaatacaactgagtggaaggtatatattatctaccttactggatttctttgtcccctcttcgaacccacatcaaagtctaagagatgagcaattttcaaagtgttttttaaatgagtaagtgtccctgcgattaaaaagtattgttgttgttgtttttttcctttcaccaagaattactgtatgaaagcaaatgcacacagtcgactactgaccctaacaaggatctcttaggaacttgttcaaggccactgtgacctgaaggttgttactgacttccaaaatgcgtgctgtaacttctcatgcttgccttggggtcctggtttggaagggtagagtatgcttgatgtaaagtcacggggttaaaccctggtgctgtcttccctttgtatatgtacgttcacaaacacattttctaatcatattctagtgtcatttgctcctgcatacccaacttttctaggagcttccttagtttaggcagagacatctgtgacaatgtggttggccacttctgcctgttattgtacattatgctatgaaatacacttcttaacgctgaaaccaaactttacttgctacagagcttagtcctttgctgcagaagtgcttatatcacacgttacttgcaagaaaatgttgtgtctgattttatcattctcttcaatgatattttcactgttaggtatatgtaactttatcttcaagtcacaataagtaagtgcaagttgaaaaagaaaatagttgctttggttctcatagtggctggttgctacactcaaaattaagtagttccataaatcatattttttctatttttaacttacggagtgtttcactgtatttgactttttcatgttatagatttaaaccaggatataattcattgaaacctttgattttcttgccatcaactataactttcttattcctcttcacttttgttttcaaacactagcaaatagttttgttttagtagctctgttttttccacttatcatttcaatgcacattgatatatctggaaccacgatagagttttacagagctccactgagctatagattcatgattcacattcattattgaagaaaattatagatgggtatgtcatgggcttcatgagtaatcaaaatggagaatgttaaatctgtgaaagtcaagggcgcaaagtatatattttctgttatatgtgtttgccttggtgaaatacacaaaaaaaattttagtagggcccctactatgctcattctgttttgtcatttatggaattttcacagagaaagcatgtgtctaaaaaacaaaaacaaaacaaaaaataccaccaccatcaccacacacacacacacacacacacacacacacacacacacatttatggaattttcacagagaaagcatgtgtctaaaaaacaaaaacaaaacaaaaaataccaccaccatcaccacacacacacacacacacacacacacacacacacgtgtgcgtgcaacaaacatcttaatgctattttcaacaaattgcctaaaaggaaaaggggctccagccctgtgttcccattttggcaccggcattaactagtcaacctttaggagcctgtttcctattctgacaaataagtataatacctactatccacttacctgtagagtttttatgaaaatccagattttttaaagttaacctgttggaggattgttctattcataggatcaaatagagggaagtagcttagggtttcttaggtatttgaataaataagtcaacctggattgttacaatttgggcccatcaataatcacagattattgataagaaaataagaaaataaggaaaataagagtgatgacgtacttgggtctaatctttcctgcttcctgccttagggcctagtccctttttaaactaaaaatgtggatattttctgttatttttaacaaaaagggtaaaatacttcagaaatcaggaaaagaaaggatagaaagtgcaactagtgcgagtgaaattccatgtgatttgtttgtttctaccacctacttctggatagacagttctatgaccaggtaactgagatagcagctgtgctgtctgtcttggttaaaaagaaatcttccataattcaaatcagtgctctctcaaactttccataaaaagtagcattattctttcaaggaatatcatgagattgctgcttaggctttgactctgatatgtttctgtttttcataggtattatctgaaaaacaacatggaaacagaaactctttgttcagatgaagatgctcaggagttgttgagagagagtcaaatttccctccttcagctcagcactgtggaagttgcaacacagctctctatgcgaaattttgaactctttcgcaacattgaacctactgaatatatagatgatttatttaaactcagatcaaaaaccagctgtgccaacctgaagagatttgaagaagtcattaaccaggaaacattttgggtagcatctgaaattctcagagaaacaaaccagctgaagaggatgaagatcattaagcatttcatcaagatagcactgcactgtagggaatgcaagaattttaactcaatgtttgcaatcatcaggtaagagagcacattttttcttaagattcagttcagttcacagatttaaaatatgtatcagtccaggaacatcatataattagtataaatgctataggttttaattgactcataagagacaattctttttctctgaatcctaaccttaatccttaatttaaaatctctcgtatcaaaaaaacagctgtgccaacctgaagagatttgaagaagccattaagcaggaaacattttggtagcatctgaagttctgatttggagctcagaaaatctatatcccccactttttttttaagtttgtttcaacttttctcaatatcagtttatttttctgtggaaataacaataccgcaaagagttatcaacaagattaatgatgtaatgtgtgtggagttccatcaaatagcacaaagcagatggccgggaaatgttaattttcttccctttttttaagagcttagattgaggttagaagaaaaaaaaatggcaacaattagttatattgatgttgagggtgattattaaattagtcattttctctgtctgggagtttagtcatactctcattactatcatagcttttattttattttattttattttattttatattattttattttattttattttattttattttattttattttattttattttattttattttattttattttattactagaggatatttgctcagtcggttttatcaaatggccgctatgggctaagcactgctatgtgtacatactgctgtgtatggaaacaaagcatcaatacttacattcaggtggttttactgatagtaaacagatgaggtaggtctatacggaagagaagagtaaaacgccttggcttgaccctgaccctacttccctgtgccatctcattccccagaattatcatgaacagtttcttatgcagccttctgtaaattgttatgcatataaagcataaacatagagatgttatatgtcaataaataatctgtacactattttactttagttgttataccatgtttctttttctcctctcagtggcctaaacctggcaccagtggcaagactgcgaacgacctgggagaaacttcccaataaatacgaaaaactatttcaagatctccaagacctgtttgatccttccagaaacatggcaaaatatcgtaatgttctcaatagtcaaaatctacaacctcccataatccctctattcccagttatcaaaaaggatctcaccttccttcacgaaggtaaacataaggcagagggtttccatctttgcttgaagaagcacagaataaatgccatgtgatttccttttcctcctctgtcaatttcaggaaatgactcaaaagtagacgggctggtcaattttgagaagctaaggatgattgcaaaagaaattcgtcacgttggccgaatggcttcagtgaacatggaccctgccctcatgttcaggactcggtgagtatgtcatcttcagtggcacgtgtgagagtagagaaggttaaatttagagcttcccaataaatgatttttttaaagtttgagtatttatatttgtagtacggcagaaattatagtaggatgtgctgagaatcacctgtgagctctaatttggaataaatgtcttattctgtataaagtgttctttcggctgtcagtaaaaacagtttgtctttcagacattttcaatgtaatagacacaattatgtgtttcttatttctcagaacactgacttgtagagctaaaactcatagctagtagtatgcactaaaatatgtaaataccccaaatagtcttgtctcaatatccacacaacaaatttagctagcagtgtagtaaaaagtgattaattcagtgaaagagagaaaagtcagtcttaattctagaacaaaaaatttaaatgtatgtgtcttttaagccagaaaaatatttctagtaaagttgcgtgtgtgaggtgattatgcagtttaatgtttgtgggcttctagaactgcttatccagaagtctagtcctttctttctgagcttgtgatctttctgtctctctttctacacccatgcttcaatctccatggctctcacttacaggaagaagaaatggcggagtttggggtaagtggtggagaccttgcatacccacacacagttcttattctgctcattgcattgttttcttacctgctgtattttctgatgctttgcatttttgcatttttttccttaaccctcgtgctgtagcagaatttcagatggcaaattgacttcaagtttaatctgttggggcttttgcttttgaagtcatgatccatgagagctgtgaaatgattgatgattgttctggggaactacaggccagtttttctgagctcttagaaaaattttattttcatataattggtgtgtctcgaaatgcagaaagctcaaagtagggggaggggaggaaggatattagaagggaaaagttgtgcaattaaaatatttcacagatatgtgagaaataaatatatttaatataaaataggtgcccccaggtgttaaacccaaattttttacagctcaactaactactattttcattctgtataaaccaatcctttttaaaaataattcttaacaattcatgtgctcaatggtttccatacatatatgtttacatttgcatgattgttttattaacagattgaccgtattactttaaaaactcaccacattcaactcaaggcataagaagacaattttgaacattgtagctaattttatttaaatttatgtataatatcctctttaggagaagtaattttaatgttgcaaatcttaatgattatagctgtgtattcttgcatgagcttttacatgtaattattgttttctggcacctgtgagagaactgccttaaatgctctatagagtgaaaagtagaatttcctagttggaactgaacaggtgccaaacataaatttttatatgtatattatgtgtaattttctttaaatttttaaaatctgtattattctatattcctgtgtaacagtttactcactggaatgaggcatgtgaccttttgaacatagactattaatatcagtcttggcacattttaaatagataaagtactcccatgctagagtgagctgcatatgtaccttttcatcttccaggtctctcagccagggtagtacaaatgcaacagtgctagatgttgctcagacaggtggtcataaaaagcgggtacgtcgtagttcctttctcaatgccaaaaagctttatgaagatgcccaaatggctcgaaaagtgaagcagtacctttccaatttggagctagaaatggacgaggagagtcttcagacattatctctgcagtgtgagccagcaaccaacacatgtgagtttttccttaaagtggctgcagactttggctaggatgcagatttgtttcctgtgcagtggtatgggcagtgacaaaataaggcttagtgcagagggggagctagcaatcctgagatatactagtcttttccttgaatgctaatatttaatactgggtagcactgtgcacggccaggccgtcatgtcaactgggttagtatgtggaagatgacactgtccacatctaaggcaacccattactttagtttcacctggacacaaccagtacacatgcaacagacgcatatatagatatggctcccatttacatgtcttacgttctcacaaagctacccccaaagtatgggcaacctgaggggagtcagggcataaaattgggtgtgctggctgccttttaaccactagcccagacaacaccgaacaacaaattcagctaccagttagttagagcaatgattctgctccacagtgaaccacaatagcctttaaaaatctggttaatctataaatggggcagtttttttttttttctaaatctgcatcttgacttaaaagacaaaggcattttccattcagtacacacctgtgtcttttatgggcaggtttgaagatgtcttctgtaggatttaatttagataggtgatttgagaagatttggattattagatttacccaggatgctgtagaagcactgtgtcatggtgaagagcttgtcctctggagtcagagtggtctgagttcaaatcctgtttgtctcctcttactagctgcagccttaggcaacttacttgacctccctaatccttagtttccaggcgtgtaaaagggaggaagcatacatatgtcattgagtttttaatattaaaatgctacatatacaacattttattgtcctaaattgctttgccatttatctaccacaaaatatatactcagtatgatactgaagcattattggctactgtttgcttgcatagataattctacctcctaggaatatggtagtaaatagattgcagttgacagcatttattaaataaaaacttagcacatacatgtcaaacaatttgggacaccgttttagaaaaatagtgcctgatgacttttctgttgtagcttttatcacgtatttgtttctttcatatacatggatataacatattgaactacccacatttttctatatttttaatggggtgtttaatagtacaatcatcttttgagattgctgacttcataaagtagatacctttgtcctgccacatatctaatattttctgtaactagggtcccccatccattttctgtgcttcataaaggcaacaggaagaaaggtgtgcattaatttagtattctaactgcagaaaatgctcacacagttctagaattatcttctacatacctactagcatctaaaattctttgttctattttcaaacccaaacaattatcagtgcctaagaatcctggtgacaaaaagcctgtcaaatccgagacctctccagtagctccaagggcagggtcacaacagaaagctcagtccctgccacagccccagcagcagccaccaccagcacataaaatcaaccagggactacaggttcccgccgtgtccctttatccttcacggaagaaagtgcccgtaaaggatctcccaccttttggtaagtgattacattcatttctttttttggtgccattcactgtcatggtttgcaaattaggaaaaaaatatttgtcttggataactttgtctaatatatttgagtttctctgtaattattagctcctaataaaacatgaacactcagcaagttaaacctgactttgccaatggaaggggttgtttttataagtaatatctcgtttagtcatgctaatttgctacgacagggtgttaatagagaagttatgtgtctattaatttaatttttgctaagcgcagaagatgctttgttcatttacattatttaaactggttttgctttacaaccaacaaactgctgggatttaagcagaatatttttaagttaaatgaattgtctgaaggtaaattcttatttgttgactcactgattctataacttagagggaaaaataaaacaactaactcctgaatatgaaggagctaaattacacttcgtctttcctactaaaagaaaaacatcagccaggcacggtggctcacgcctgtaatcccagcactttgggaggctgaggcgggcagatcacgaggtcaggagatccagaccatcctggctaacacggtgaaaccctgtctctactaaaaatagaaaaaattagccgggcgtggtggcgggcgcctgtagtcccagctactcgggaggccgaggcaggagaatggcgtgaacccgggagggggagcttgcagtgagcctagatcgcaccgctgcactcctccagcctgggcgaaagagcgagactgtctcaaaaagaaaaagaagaacatctagtagtttagcccctttgtggaagtggtacaacacaataatttttcataaaatgtacaccttcttttttttctacgtatatgtgaatgaaacagttaataaaaaacaaattattaaaaataaagggatagtaggctgggtgcagtgtctcatgcctgtaatcccagcacttcaggaggctgagacgggtgaatcactcgaggccaggagttggagaccagcttgcccaacatggggaaaccccatctttacgaaaaatacaaaacttagcctggcgtgatggcgcatgcctgcagtcctagctacctgggaagctgaggcacaagaatcgcttcaacctggggggtggaaattgtaataagccgggattgcatcactgcactccagcctgggcgacagagcaagactctgtcgatagatagatagatagatagatagatggatggatggatggatggatggatggatagatagataaagatatagagagatagatagcaaagagtttacttagataaaattgggtgttgataactaagtccctgcacagttacagcccatctgtatggcttgggtgagagtcatttcgtagacccctcacgtactctgtatcctcacctcattccatctgatcagcaagtgtcctctttattgatatggggagagaataagaaaagaacacctttcctaggtacatttctcctttcaaatatttgtgttgatcctctcatcacaaacacattgaattatgtgtttctttatatattacgttttgaatatgcatgcattcctgaatcccctgcagtctgtatcgtctttatgcagaacttctcatatggaagattatcagtcttcactttagctaaaaatgcctattagccatatttaatataatgtagatgtctctgagtataaagctctatcccccatgtttctgaagccatagctctcaaaatgtctttagttccatttatgaactttagaaatgtggatgaaatattatatgttgtcttatatttatttagtttaacatacacatttaaagtcacagtatataaaatactaatttagagacactacaggtgttccccccactccagtccataaaatagttttgttctatatactttctacatctttaacattggtgtctttgtcatcactagcaccacttttgaagtatctcacacagctttctcaggcataatatcttcacatccatccaacatggtttgaaaggtagtactttttaaatctgtgtacgatgctggccttggaaattttttccagatcaaaactacccattcaattagctttatttcctgtgtatatgatttctacatgtaatcaaactattgctttaaaaggtttttttaaaaaagattgtattaaaacaatatcagactgcttacatgaagtgaaatgaaggattaaatctttgttaaattttactaacactaatttgaggtagtttcaggctgtagtgccttcccaaatatctctttgttgttcaaaataaaattgagagtgcctcataataatatgagaggctttgtaaaatatttcagtgtaacttcctcatttatgaaaaataattttgaggagggaaatcatcttacattgacatgtagaataatttttcctccactctcatcctgttggatcctgcacgtggtgctctcacttccttcttctgaaaccttcctccaaggttttgtgacacagcactttcatggtctcttccgcccttctctttcatctgtttacttgatcaagtattaactgcatggaattccttagagcgctttcattcactttcctagttagctcctcttagctcttgactctgtactcttctccctttattctcacttcccttgagctacccctttccaaggatacaaaacagtttccaactcaaatttggtttctaataataaacatgtctagctgtgccacttccatcctaaattcagtgtttccaaattgtccattttttcttcattgttgcctaacatattgttgaataaagatggtgactacttcaaagtttagaatctaacgtaaaatatcaaaagcaatatatttctggtactgtggcagatatcagtctgaaaccaaactacgggtatctcatgacttctgtaggcacttactgtgtggaccttgaagagtacaaagaacatttagattgtaaataggttgaacctcagtgtaatgatattaaatcttaacacaaaaaagttttttattcataaatggtgtttattttcagacttgaaaatacatatttaaggttttttttttccattataggcataaactctccacaagctttaaaaaaaattctttctttgtctgaagaaggaagtttggaacgtcacaagaaacaggctgaagatacaatatcaaatgcatcttcgcagctttcttctcctcctacttctccacagagttctccaaggaaaggtagaattaaattactttttgttttcttgtattgaaacctatacattttggctataataaattccagagtaatgtattacataattcctaacattatagtcatttaagatgagctcatttgcaatgcccaatggattttttttccctcagtttataaatttggaagaatggtggttttaaaaaatgttatacttacaataaatagtattaaatttataactataagaagccttttaaaaatacatttacttttaattcagataaatatacaaagaattttttatattacaatttgttctaactaaatttggttatatgacattagtacagagaagagggctttgaaaacatgaaaaactaatatcttcctgatttattttttcattgtattaacacaggtcttgattacctttttggttgctaccttgttttatttttagagactatattttaggtactcagtcgcctccttatgttgatacattctcatattaaaagagtaggtaattttctgctgcataactcttcaggctacttcctcctcctacccttttaactaaatgagtgtaagccaataataaatggctaggacgtagttttccctaaaggaaagccaaaagggcttaatacattgttaaatttcactgactcaacaggtattgctttacttggtagatatttcagacatctgtgcattttgtatgggtatcagtctctcctgtccttgttacatggatgcatctcaattcttttctcatcctgttgttaggtggcagtggcaatcagctgagatcttttggctccgggcagttggacttaaccagttcctcctcttctcttggaagtgagaacagtaacaagaataacaatgcaccacggacctatgggataggtggggtttatagaaccaaaaatggggtgggaaagagaggaatcatctcattagttaatgaaaatgggagaattcctccaaatgtcaagtgctccatctgagtgatttatttttctgaaacttttttttttttaagcagactgttcagggagggctttaaatcttatctgtcagaacttgcagtgtggttttataaaaagacattttataaatgaacacattaaatcttatcaagacctgtgcagcctttaaaaaataaatcaggaattaccaatatgctgaaagaacatacttaaactggcaacatttagatgctctagattttaatttttcttaggtaagtggcattgaagaaatttgcattgcatataagataaagtcaatatttaagtaacatgagatccctagtaatgtagacaagaaaaaatgaatattgagaaagaagatttggatttttttcattaaaaataccaagatagggccgggtgcagtggcttacgcctgtaatcccagcactttgggaggccaagacaggctgattacctgaggccaggagttcgagactagcttggccaacatggtgaaacccctgtctctagtaaaaatacaaaaaaaaaaaattagccagacatggtggcacatgcctgtaatcccagccactcgggaggctgaggcaggagaatcgcttgaagccaggaggtggagttttcagtgagccaagatcccgccactgcactccagcttgggtgacagagggagactccgtctcaaaaacaaaaaaatcaagataggcccctgccattgtgtctttcaaaattatttttagtagcaaaagagagttaagggtcctttcaggccaagaagtggacatctgtttagatattctatagtaatgatcttgtgaaaagtgccctttaactccttcaaaacgattggcttttatgtggttcaaccaatattaatattgaaaaaccaaatggcaaaaattcaaagacatcttcaggtcttatttcttattctttttgtttatatgtttacttaaaattgtaggtaggatacaggtatttccagttgaattagtctatgccatacaagttctaaaaattgaaaactgttgaaaacaagatcagtggctttgcattttgaaaaaaacatactttaaaatctgatccgttattcttcatggtttcttttctgtagactaatagtgtaattatataggtaagggagctaagaatagttgagtggtgccttttctgcatcttttcctagcttgtaggatactttcttttttcctctctaaacttcgattaaacaacttaagcttcattagaataaaacatttgtctcttagtcatgtggtctctacaagtgaaatggggtttttctccccacttaagagatatctatgcctgcattttatttttgcttctatttggtagacttccctttgatgttataaacctagagagtctaattaatacggttgtatttctcatgcaggctatactttggctcccagtggtactgtggataatttttcagattctggtcacagtgaaatttcttcacgatccagtattgttagcaattcgtcttttgactcagtgccagtctcactgcacgatgagaggcgccagaggcattctgtcagcatcgtggaaacaaacctagggatgggcaggatggagaggcggaccatgattgaacctgatcagtatagcttggggtaggtggctctttttaatattcttctgaatttatccttccatctctgttttaataatgagtcttttcttccagtgtttgtttttatttattttacataatgcctaagaatttttctgccatcccagttctgattttcacaatttctacactaagtatcatgttatttttgttaagcagactgcttttttagttaagtttattcttcattggaacacagttgttctgtgctgaaggcagagggtgactgtaggatccatcccagttgtttcgtatgagctgccttcctgaaataatcaaattatattgagccacccttaatgttgtcggggaattttttttttttttaatggcacgttgcgttcttttcccgcatgcctgttttatagtaatgataaagtcagaaggctagacatggcagaactggccaatataaggcaattcagtgctacttttatcctgtttctgggatgaaagcaagctacctttctaggaaaaagggtattttggttttatcataggtgaattagttatcaatcttgttttttttttcttttccatttcttttaaccacttaggtcctatgcaccaatgtccgagggccgaggcttatatgctacagctacagtaatttcttctccaagcacagaggaactttcccaggatcagggggatcgcgcgtcacttgatgctgctgacagtggccgtgggagctggacgtcatgctcaagtggctcccatgataatatacagacgatccagcaccagagaagctgggagactcttccattcgggcatactcactttgattattcaggggatcctgcaggtttatgggcatcaagcagccatatggaccaaattatgttttctgatcatagcacaaagtataacaggcaaaatcaaagtagagagagccttgaacaagcccagtcccgagcaagctgggcgtcttccacaggttactggggagaagactcagaaggtgacacaggcacaataaagcggaggggtggaaaggatgtttccattgaagccgaaagcagtagcctaacgtctgtgactacggaagaaaccaagcctgtccccatgcctgcccacatagctgtggcatcaagtactacaaaggggctcattggtaagttttaaaattgggggactttgtcatgtctggatcatgtctttaatgtaacttattacaatagtaaaattatgtgtttgttggttcttttcctcattttctccattgctatgtaggacttccaaattagtggtgtgttaaggtctttgaaatcaatagtggttaagagcccaggttttgtggtcaggtacctacagatctgttcctatataacaaaacattcaataaatcttagctatcaggatgagtagattgtcattgtgaatattatctagtctaatttttttctcttaacctgaaaatcaggatggattcctattattcatagaggagaaatttttctttaattgaaactcttttatatctttgattcttctattttgttctcttgattgtatttagaactatacgctttgtatacttaaaagtctcccattgatttttattctgcacgcacattgttgataagcaattctttgtgcacgctgtagaaggagggagaggtgctaatagtgtaatgactaagagcacgggtttaggagtcaggcggactggggattgaatccctgttttgccactttattagttttgtgacattgggtaaaatacaaaacagtgcctgtttcctcatctgtaaaatgagcttcataatttctacttaatggagttagtgtgaggattcaaggaaatttatgcaaagtatttagaacagtgcccagatagtagattcactaagtacatgaaagctattgctgctgctgttcctgttagaagaggctctcatgcgccctcagtcctgttgagatgtgttttctatggcacaattaacatctatatagacgaagtgtaggaacagatgataggttgtagagtgagaaattctggagtataatcattacggacattacttttattagtaggaaaattgtagttatttagccatgtaaatagtcatgggtagatttcaagtttaatatccttttacaatgaataaggagaaaacagttaataaatattcttaggttggactttttcaagtgcttacaactaatactcagaatttttattgcaaaggaaggaagaatgatttttagttcctaacaattgagttttaaaagttcaggaaaatgaaactttagttttactggcctatacaggtttcatattctaggtcatgagcatcaataaagggattttaagaaaaatagacaccttatagtaatagttttagaatttttaaattggtatcctttgtgcgacttttccaaatttattttaattcactgtttctgtaagtgaagtcttgagacccgagagtgatgtagaattgcttctctgcctggtaaagataaatgcccagaaagagggcagatccggcaggcagagaggaaaaagggaacttgtaccaagcacaaacaggttctaggcatagtgctgtgtacttaggttcttcctgtgcttcagtctttccaataaatccaggggttaggttttaatcttactattttatagttacagaccattttaaatggacaagcagcccatttaaagataaaagtacttagatggactagcagcttctctcaccaattatttcaccacacaaagataacatcattgtgaaatttggtttagttaacatgcattccctggcctgcctcacaccgcacctctaaccgataccatgcaaatgcacatctgctgctacactgtggatgctgttttagtaattatttttatatttttaataaacttttgtggcatgaactagtttttaatgctggtgcattgtttctactctagcacgaaaggagggcaggtatcgagagcccccgcccacccctcccggctacattggaattcccattactgactttccagaagggcactcccatccagccaggaaaccgccggactacaacgtggcccttcagagatcgcggatggtcgcacgatcctccgacacagctgggccttcatccgtacagcagccacatgggcatcccaccagcagcaggcctgtgaacaaacctcagtggcataaaccgaacgagtctgacccgcgcctcgccccttatcagtcccaagggttttccaccgaggaggatggtatatgcacataaatattcctaaaacctccaagttagatgtgttcacttgtgctgcttcccaaggcatttctgttctcttaacactgcagtcagctatgtctaaccatatactacacaaagtacactacattcagagttccaaatttagggttacagctgttgactgctttcttttgtgtgtgtgtgtgtgtttccttaaatggctttaaaaatgccaaagattatggagggagtcacttaaaatacagtgtgtatataactggttttcttctccaattctcactaaaatttgattgctttctgtgtgtctgtgtatgtgtgtttccctaaatggcttaaaaaatgccaaagattatggagggagtcacttaaaatacagtgtttatatgacttgatttcttttctaattctcgttaaaattgaagtacttctgtgaccctattttaagaaaaagaataggccaggtgcgatggcttacacctgtaatcccagcactttgggaggctgaggagggcagattacttgagctcaggagtttgagaccagcctggccaaagtagtgaaaccctgtctctactaaaaatacaaaaattagccgggtatggtggcaggcacctgtaatcccagctgctcgggaggctgaggcaggagaaccacttgagcccggaaggcagaggttgcagtgagccaacaacatgtcactgcactccagcctgggtgacagagtgagactctgtctcaaaaaaaggaaaagaaaatgaaaatctcacaagtttgtgctgttgtcaagaattttagaagcatgtaggattctcaaaggtggatggttaaagttttctgtggaaacattatatttgcgcttttaatgaattgggactcatttggaaatgaaagtctgataaagaaagatacattatcagccagcctgatggctcatgcctgtaatcccagcactttgggaggctgaggtgggaggattgcttgaggccaggagttcgagacaagcctgggcaacatagtgagacctgtctccataaaaatatttttcaaatgacccaggcgtggtggcgtgtgccaatagtcctagctactatggaggctgaagtggaaggatcacttgagcccaggagttcagggctgtggtgacccatgattgtgccactgcaccgtagcctaggtagcagagcaagacccggtctctaaaagaaagagagagagaaggggagggagaaagggaaggaaggaaggaacccacattctttataactctttgtgcgttctttctacaaatctatctgaccatgctgaattgagaatgaggaaggagaacatggcctcccatcttctttaaagttttcagtttaacatgtttgattacacaatcatagaaaaaagcaacacgtgactgggagattgggaggccgaggcaggagaatcgcttgagcccgggaggcggaggttgcagtgagccgagaacactgcactgtggatggcaaacccacaccctgtctcaaaaaagttaaattaaattaaataaatagaaaaacattacaaatgaaaattacttaaaatcctgtcacttgcagatagccactattaaaatgttgttatatattctagactttttatgtgtatctgatcgtatattttttttaaatggcacatgctattttacaactttttaaaatgaatttaacaactttctgaacaaaaatatataatgcatatctttttaatattgtgtgtatatatgtaaagatatgtattgcatacattttaacctttttgttgttcgtcattgtttaggaaaaaaagacaaggattctaagtgagctatactaaaaagaataactatgatagttttatttagcacatcagtgaatatattctctatagcacaagaaattacttgcttgctcattgatttctttttcttccctgctgtatttgcagaagatgaacaagtttctgctgtttgaggcacagacttttctggaagcagagcgagccacctgaaaggagagcacaagaagacgtcctgagcattggagccttggaactcacattctgaggacggtggaccagtttgcctccttccctgccttaaaagcagcatggggcttcttctccccttcttcctttcccctttgcatgtgaaatactgtgaagaaattgccctggcacttttcagactttgttgcttgaaatgcacagtgcagcaatcttcgagctcccactgttgctgcctgccacatcacacagtatcattccaaattccaagatcatcacaacaagatgattcactctggctgcacttctcaatgcctggaaggattttttttaatcttccttttagatttcaatccagtcctagcacttgatctcattgggataatgagaaaagctagccattgaactacttggggcctttaacccaccaaggaagacaaagaaaaacaatgaaatcctttgagtacagtgcttgtccacttgtttacaatgtcctccttttaaaaaaaaaaatgagtttaaagattttgttcagagagtaaatatatatccatttaatgattacagtattattttaaaccttaagtagggttgccagcctggtttctgaaaaaccaaatatgccggacagggtgtggccacaccaagaagacgggaagacctggcttgtgaccctggcttcccatgtccttctggtctcacccgcgaagtgccctatcctggaagtatgaaatgttagccaattaataccaagacacctcatctgctccttccccagtggatggggttcttctgtaaaactgtttgcacatggccaggggagggaactaggacccttgtgtcctgtctgagccttatggaggcaggacggtgtcattggcggatgtgtcctgctccattgagatggatggcaaaccccatttttaagttatatttctttgatttttgttaatttagaggtgtaggttttgttttttgttttttgtttttttttaagagaaacatttataactggatagcattgcagtgaaagcagcttgggatgttggagctaatgccagctgtttatactgctctttcaagacagcctccctttattgaattggcattagggaataaacaagcctttaaacgtgataaaagatcaaaaacctggttagacatgccagcctttgcaaggcaggttagtcaccaaagactaacctccaagtggctttatggacgctgcatatagagaaggcctaagtgtagcaaccatctgctcacagctgctattaaccctataatgactgaaatgacccctccactctatttttgtgttgttttgcacagactccggaaaagtgaaggctgccaatctgagtagtactcaaatgtgaggaactgctggtcttggattttttttccattaaattcagctgatcatattgatcagtagataaacgtaaatagcttcaaattttaaaagtggaattgcagtgttttttcactgtatcaaacaatgtcagtgctttatttaataattctcttctgtatcatggcatttgtctacttgcttattacattgtcaattatgcatttgtaattttacatgtaatatgcattatttgccagttttattatataggctatggacctcatgtgcatatagaaagacagaaatctagctctaccacaagttgcacaaatgttatctaagcattaagtaattgtagaacataggactgctaatctcagttcgctctgtgatgtcaagtgcagaatgtacaattaactggtgatttcctcatacttttgatactacttgtacctgtatgtcttttagaaagacattggtggagtctgtatcccttttgtatttttaatacaataattgtacatattggttatatttttgttgaagatggtagaaatgtactatgtttatgcttctacatccagtttgtacaagctggaaaataaataaatataacataaagccttgcctatattcttaatgaatcatgcatgctttttattattaaattggaatagaagcctttcgtctcctgcagaagcaagtccttcggctggagagatttagcctcatggttattggaaactgcccaatagcctatttattttaggcagatctctgttgatccaaagcaattaatatcattaacgttagcaccagccaaaccatgttcagaattcagtgtttcttgaaaatgaagatgctgtcacaatatatttgcataacatttgtctcttctcaaccgtttccaacaataatctttatggtacgtaatattttggttcccagtatacatactgagagacaggacctcagagaaactgacattcaaggtcatgattattaagtggagagtacaatttagctagtgattctggacttctaactagtacacaatatgagtgctgatgtgtggtaagtctgaataatactttagtctatcagaagggcacttaattttaaaaggtaaaaaccagtaagtagcagcctgcttacgcacatgtttaaatgagtgactcatttcttttcctcaagcaagcataactaaaagtattagccatcagccactgagaagtctcagaagtcagagtggaagcaactggaagcagaggcaccaaacactggaacatgtgagggagcctgaagaggagcgggaggaaggtccctccagaagctaacaggaaaatggccagggctaggcttcaagatctttccaaggtattcgtgccagctattttgctgagaaattttgaaaacctggacaccaaaatagtcgggaaaattatttatttatttatttatttattttttaaccattctagtagcttcaaccacaccttttaaaaaatgaagaacctgcgtgtttgtgtatgttgttacatgctcatctctgttgtcttttcactttaaaacccattcctcagggactttcctagactgtcactcagcttaattttctcaaactttttttgaaaaaatactaagaatctgatgttttggagaataacctctttatcattactgtgtgtgttctgctaaaaatatgagacagtgacaaatagggcatggttcgttttccttttaggttttattagacttttatgttttaggatacttcctccgtgtagcacaagactggtctccacttaagggtttccagaaataagtatttgccaagtgtaacagtttgcagggacagagtttatgttatgttaataatagaactttgccaagttttagggatattgtagaaggttttggtgaaggtctgatgctctccaccctaatcaaagaggccacacagaccggggtctgtgttttcatacatacaggttgaagtcctcagaatgtttttctcagcctcaatccatttctctgcttttgggaggtatagattttatgctcatctatgatttaatatgttttacctttagttcactgataatatcccaaaatgaataatgcaagcttctgaggatgcatgtatcaacacaccttttggtctctgcctctcaacgccagtgcactacattcatgccaaagaaaaataggaaactctcttgagcgctttatcccatgataccagcattctttaaaaaaaaaaaaaaaaaaaggcttacctagagaataaacgtaatgcagcaactgaggagtcaagttgttgattgcagaggtaaattattttgtgaagattcactaagggtataatatcagcagaggttgttgaaaggggcaataagacggaaatgtgtaaggcaaactgcagctgaggccaacatgacactttcaagaaagattttaaagtgagaatttacctatttgagagtgagacgaaaatactgactggaactgaaaaataatttatgaattgcctttttttttgagacagagtctcactctgttatccaggctggagtgcagtggcgcaatctcagctccacctcctgggttcaagcgattctcctgcctcagcctcctaagtagctgggactacagacgtgcaccaccacacccggctaatttttgtgtttttagtagagacggggtttcaccatgttggccaggctggtcttaaactcctgacctcaagtgatccacccgccttggcctcccaaagtgctgagattacaagcgtgagccactgtgcccggcctgagttgcattttttaaaagattcacattttagccaagtacaaggcaagctagttgttactatgccatagccatataccagaaaattttatagaggcaatcacgacattccatgcaaggttaagaaatgccagaaaagactttatttcatgggcaatcaagatggtaacaattcttatgggaaaaatgtctaagcctagaataaaatatctgaaataaattgagtcaaatgaccagctttataaagactgaaagtgaaatcaacttaattcagagtgttcaacacctcaaaaatagaagtaagtttaatacaatttaagaaacttttggccaggaacagtgggtcatacctgtaatctcagcattatgggaggctgaggcaagagggattgcttggtgccaggaattcaagaaccagcccaggcaacaaagcaagaccctatctctacaaaaaataaaaaatacagccagttgtaagggtgtgcacctgtagtcctagcttctcaggaggctaaagtaggaggatcacttaagcccaggagttcaaggctgcagtgatctatgatgatgccactgcactccagcctgggcaacaggacaagactctgtctcagaaaagaaacattttaataatattgtatgaccttgccaaatgcactgtggtcaaatggggaccaatgaagtaatagtatctcaacatacgtgaggttttctttaatttatatagattgaaacctttttccccaaataggactacaaaattggttttaggatcaggtgagtgtcacatttggtattaagatgaaaatatgtatatgtacaatgcttctagatacagtttagtgagctaatttactgtggtccaagcacttttctagatgctagatatttacagattttactaaagtgaaccgaggcaccttcgagttatactttcttactttagagaagtgtctcaggccctacatggaaaaacctacggagtgatcccaccatcttgatcacagctggattgaaggaggtgtctgatccaagagttgccaatgtgggctcaccagcagtctgtaagagggccctggaatgagtgccgtgaccagccagtaagaaggaaagcaacaactaacaactttagcacattctctttggggaatttctatgaaaaggcaaaaaaaaaggacgcaccaaagaagtgagtattcagaagccgtgactaacagaagcaatgaggatgcagaaatcatgagcaagaaggggcccatgaggtcaagaaagcaattcatcaaaggcaggaatcctgttaaaaacttaagacacttcttagggaacaataaaatgatctgtcatcatcacacctgaatacaatgtccagtcttagaacaactccctgaagcttggctctgaaatgttcttgttcttcatgagaccagcatggagagctgttttttgtgtatcctctctgaataaccattctgttctcagcatctagaaacagtgcctgggataatgccaaagtgtttaataaatgaatatcatatcaagcaacctaaaggacctcaattacacaggtaaattggagactcaaaaatcagacaaaatgcatgtgtgaaggggcatctataactgctcagactggtgaatattcagaagtgaaataaatgactcgtaacaaggctagcaagggtttcagattaatcaaaaggagcaaaggataaaagactgtttaaagagttcagttttgtgtgactacagaagttcagtggagtgaaaggtcaatgaagactgaagtgtccataagaagagacgagacttcagctatagcttcaagtatcatctgaagacaagaatgaaggcaagaggcagggctattggcatggctgtgggacacaggagtcatgcctcattagatgggacattatgaatagaagatgcagagaaattggttgggataagtagggagtgagatcaggacaaaaaatgtttagagattgttcattttaggggatcagtaaatgcttataaaaagaaacaaggaaggaaaggagaaagaattgacagaatcttttgatgagacaatggtaggaaaggatgacttgattagtcaggaccaggcaggatggagggtgaggcagggaaggtagctagctgggaaacctgctatcatccaggcctgagccagcaaagccctggaaagtatggtttcaaaggcaattcaaaggaaaaaaatcaatagaatttggtgtctaatagcatataagagacttacttaaaagttaagccaaaatttgtaaaatgttcaagattcttattctgaatgcttaagataaagagaataggctgggtacagtggctcatacctgtaatcccaacactgggaagccaaggtgggaggatcgcttgagcccaggaattcaagaccagcctgggcaacacagggagaccctgtcttaaaaaaaaaaaaattattcaagcttggtagcatgtgccaatatgtcccagcaacttgggaggctgaggtagtaggatcacctgagcccagcagttccaggctgcaagtgagctatgatcgtaccactgcactttagcctgggtaagagagtaagaactcatctcaggggaaaaaaaaaaaaaattaacattgacaaagataaggaagttgcagaaaatgttaatttttaaaactgagtcaaaaaaattcttgtccacgggattcaaagttccacactgtttccgttgtaccttctgttaatacatccataaggtaaggctctggatgtggttgaggaagggggcattctaccctcttcaggtacaattacagtactggtgagtccacacagtttattcactgcattttccaaaacatctgattttttttttttttttttgagaccgagtattgctctgtcgcccaggctggagtgtgatcttggctcactgcaacctctgcctcccgggttcaagtgattctcctgcctcagcctcctgagcagctgggactacaggcacgtgccaccacgcccagctaatttttgtatttttagtagagacgcggtttccccaggctgaccaagatggtctcgatctcttgacttcgtgatccgcccgcctcagccttccaaagtgctgggattacaggcgtgagccgccgcgcccggccatctgattcattcttttgtgtcattgtaaaggttgtgaatcattgagcgcaggcactacgtctaaccaagctatttctagcacccctgcaaaattaaaattatttgctcacatgcaaaactaggcccagagaaggacactgacaatgtggaatacataatttcaaaaattcacctcaaaaagctggaggaccagtagaatgaaaaccaccagcctactcatgggcgaactgtggtacttgtgtcctttcttccatttactttcctgaggagaggagagactgctcacctggtattccactgtgcccctccccggcaggcccctcactgacccgtgaggcactcactatagattattgctccatcataatataaccaaggaggctgggcacagtggttcatgcctctaatcccagcactttgggaggctgaggcaggaggatcacttgaggtcaggaattccagaccagcctggccaacctagtgaaaccccatctctactaaaaataacaaaaattagccatgcgtggtggcgtgcacctgtaatcccagctacttgggaggctgaggcacaagaatcatttaaacccgggaggtggaggttgtagtgagccaagatcgcaccactgcactccagcctgggcaacagagcaagactctgtctctaaataaataaataaataaataatgaaaaataaccaaatatagataggggaagaaacaggaaaataatagtggtaaaggaggtggaataatagcaaggaaaaggagggaagggaaaggatgagaagaaaacaattaaatggtgaaataaattaataagcaaatattcaaaagcaaaaaaaaagcaacacaatagttcatatctgtggtttggagcagacccctcctgaggcaggaaaactctcctctttgggaagtgaatttcccattaataatagttaatgtcactcataaattggaggcttctgataacagcaaaagattgtatcctttcattctcagattggggtaggtaccagatgctcttacttaattacttaaagatttaactacataatcttgcccgtgattgctgcactgagtttacctggtttgagctcagagtggtttacctcattgatttcaagcgtcctttaaggtcagtcatatacgattgcacctaagatatttaaatagctgtttctttttactctcatagagtgtgcgatcatcagacttcccccaaaccagagaatctctacttagcgagtgcaatggctgaacttgaacctatatttgaaatttcattttacccagtcaattcatgaggacgcaatttatctgtggatttatataaataccactattagagacaaactacttataaatgctttaaattcatttctccttctccagacccagaaaggaaacccaaatgtatccactttacgcattcaaagccttgactttctgagctaatctttcataaatggctcttaagggagggtctccttccttccttgggtctcacccagaggttgcccctttgcaatccacattgatgaaggacatcttccctgctggaggacacgttcctgcaggagattctttgaagagcaaacaccaccctccagccttgaaatgctggcgcggcttcactgtgtctctaaatcaagctttgtccacccagacaggaagactccaccctgttgtgacaggcacaatgtggaatttgtgcttcagtgagcttcagatgattttcaaccccacaccttggatgtgtttttgaaacaacgtgggatataaataaataaaacatattaaccattgtggtgctttattcgctcttcaatatttgtaagttgatttctaccataaaagagtttttttctctcctcccttccttctttccctgctctcccaccgccctcaccatcaccacccaccctgccctaaaaaaacagttccgtttttggtattcttctgtgacgttccacacttcatggaagggtggttctgctagttgaaattttaaaatgcatccattcccattctccggcttattcagaatcctctattgccaaatctttaggcttttttcaacccccatttacaacttatgacaagctcatgagtgtcttttcttgctcaagttctcatcctatcactctctgcacaaaagccttggagaatgttcatttccatcccaagaacaaaataagcttttgcccttccccgctttaaaacaattgctcaaggtaatggccaccaccatcttacaaaattaattgattaactttttaggtcagactggggtttgtctactgagaagttcttggcagtgcagaaagagcagtcagtctgtttgatgtgacacagaagtgtgaagaagacgatgtgcctgtttctgtcccaggcgaggaagtttgtatgtaaatatagtggggagagggtaagaagacaaagattcaaagcaaaaaagggaacagtaaatgcacacagtgagtgcagttttacaactaaaaaaaatatttaaacatttctgatgtcaagaaatcagaaggcatttggaaaatattctaacccttttaaagatattccaaaccattttccctggcttatttctacatagcaacaaacttttatctctgaaaataaactgtccatctcctgagaagagattatttctcttctgagaactctttcagatataagaatgtgaaggattccagttgtttggtcctgcttacctttcctgtgacatgtgtgtatatgaagctgtatgggaatccccatccagaagttctcaagagaggagatgggcttccatgcttttttaaaaaatgtgacagaaagtctgcatgagttttgaccttttttttttttttcctggtgaggataaagccagttttcaactgtgagaaaagtgctctgaggcaaactcgctttcaccacagcttagccctgtggcatctcctgctgtggccatgcacccaataaattcccctagatgagcaattcctgtagcctggtcctggtcaggctggcatgcaggagggcttccttctattactaaagtggagtctccaaatcacctctttggaatgtgtgaaccctagggcagggtccccaacccctgggccacagactggtacggggccacaggcaggggctgaagggtgggtaagcaagggaagctcatctgtatttacagctgatccccatcgctggcattaccgctcaagctccgtctcctgtcagaccagcagcggcattagattctcatagaagcacgaaccctattgtgaacggtgcatgggagggatctaggttgcgtgctcctcatgagaatctaatgcctgatgatcggtcactgcctccaatcacccccagatgggaccgtctagttgcaggaaaacagcctcagggctcccactgagtctacgttatggtgagttgtatgattatttcattatatattacaatgtaataacagaaataaagtgcacaataaatgtaatgttcttgaattattccagaatcatccccctgcctggtccatggaaaaattggcttccacgaaaccagtagctggtgccaaaaaggctgggaaccgctgccctagaggaagaatttcaatacaaatgtagcaaactccagttccttattttgttctgtaaaagcattattgattgtgacaacccaaagcatcatcaggaaaacagggaacacactgcatggccatctgccatgaggggggtgttagtggccattggctagagagatctgtgaaggagcagggagagagccaggagtccagtgggcacccccaggagacataaccgctgtgtactggtgtgcacgctggaccgctagtgacctggaggccggcagtgggaggggacaggcagtgttagggattagaaaacaaagactccgtgagtttattttggattgttctctttcttttatattccttgtattagtttgctagagtggccacagcttgggagcttgggtgttttaaacaatagaaatgttgttcccacggttctggaggcaggggtccaagacgaaggtgctggcatatttgttctttcctgaggtctccctcccagatttgttctccctgactcgctgatggcttcctgctcactgtgtcctcacagggtctttcctctgaatgtgcatccatggtgtcttccacttcttataaggacaccggttctgttggttgaagcctccgccctgtgacctcgcttaaccttagttacctctttgaaggccctgtctccaaatgcagtcacattgggagttaggacttcaacacatggattttgggagactacaattgagttcataacaggtcattaccgagccaccaggttgctaaaagcaaaacctcaggtttatgagtgcagccgtgcccagatgcagcgccaagggatacccatgaaaaactcttttttaatgtacttatcggaatggctaaaattaaaaatgccaaatgctggagagggtgtggggaaataggatcactcatattgctggtgggaatgtaaaatggtagagctgctttggaaagcagtttggcaaattcctataaaattcaacagtactataaagttataaatgtactgtactatatttatattaatataaactcaagtatcactataaaatt

SEQ ID NO: 675 - DNA, 6582 bp, Homo sapiens
cttgccatcgtgagagattggtacatgatgtgtaaattcagttcagcatatgtttcttcattatgaaaccactagcaatcccagctaaccatggagttatgggccagcaggagaaacactcacttcctgcagatttcacaaaactgcatcttactgacagtctccacccacaggtgacccacgtttcttctagccattcaggatgtagtatcactagtgattctgggagcagcagtctttctgatatctaccaggccacagaaagcgaggctggtgatatggacctgagtgggttgccagaaacagcagtggattccgaagacgacgacgatgaagaagacattgagagagcatcagatcctctgatgagcagggacattgtgagagactgcctagagaaggacccaattgaccggacagatgatgacattgaacaactcttggaatttatgcaccagttgcctgcttttgccaatatgacaatgtcagtgaggcgagaactctgtgctgtgatggtgttcgcagtggtggaaagagcagggaccatagtgttaaatgatggtgaagagctggactcctggtcagtgattctcaatggatctgtggaagtgacttatccagatggaaaagcagaaatactgtgcatgggaaatagttttggtgtctctcctaccatggacaaagaatacatgaaaggagtgatgagaacaaaggtggatgactgccagtttgtctgcatagcccagcaagattactgccgtattctcaatcaagtagaaaagaacatgcaaaaagttgaagaggaaggagagattgttatggtgaaagaacaccgagaacttgatcgaactggaacaagaaagggacacattgtcatcaagggtacctcagaaaggttaacaatgcatttggtggaagagcattcagtagtagatccaacattcatagaagactttctgttgacctataggacttttctttctagcccaatggaagtgggcaaaaagttattggagtggtttaatgacccgagcctcagggataaggttacacgggtagtattattgtgggtaaataatcacttcaatgactttgaaggagatcctgcaatgactcgatttttagaagaatttgaaaacaatctggaaagagagaaaatgggtggacacctaaggctgttgaatatcgcgtgtgctgctaaagcaaaaagaagattgatgacgttaacaaaaccatcccgagaagctcctttgccttttatcttacttggaggctctgagaagggatttggaatctttgttgacagtgtagattcaggtagcaaagcaactgaagcaggcttgaaacggggggatcagatattagaagtaaatggccaaaactttgaaaacattcagctgtcaaaagctatggaaattcttagaaataacacacatttatctatcactgtgaaaaccaatttatttgtatttaaagaacttctaacaagattgtcagaagagaaaagaaatggtgccccccaccttcctaaaattggtgacattaaaaaggccagtcgctactccattccagatcttgctgtagatgtagaacaggtgataggacttgaaaaagtgaacaaaaaaagtaaagccaacactgtgggaggaaggaacaagctgaaaaagatactcgacaagactcggatcagtatcttgccacagaaaccatacaatgatattgggattggtcagtctcaagatgacagcatagtaggattaaggcagacaaagcacatcccaactgcattgcctgtcagtggaaccttatcatccagtaatcctgatttattgcagtcacatcatcgcattttagacttcagtgctactcctgacttgccagatcaagtgctaagggtttttaaggctgatcagcaaagccgctacatcatgatcagtaaggacactacagcaaaggaagtggtcattcaggctatcagggagtttgctgttactgccaccccggatcaatattcactatgtgaggtctctgtcacacctgagggagtaatcaaacaaagaagacttccagatcagctttccaaacttgcagacagaatacaactgagtggaaggtattatctgaaaaacaacatggaaacagaaactctttgttcagatgaagatgctcaggagttgttgagagagagtcaaatttccctccttcagctcagcactgtggaagttgcaacacagctctctatgcgaaattttgaactctttcgcaacattgaacctactgaatatatagatgatttatttaaactcagatcaaaaaccagctgtgccaacctgaagagatttgaagaagtcattaaccaggaaacattttgggtagcatctgaaattctcagagaaacaaaccagctgaagaggatgaagatcattaagcatttcatcaagatagcactgcactgtagggaatgcaagaattttaactcaatgtttgcaatcatcagtggcctaaacctggcaccagtggcaagactgcgaacgacctgggagaaacttcccaataaatacgaaaaactatttcaagatctccaagacctgtttgatccttccagaaacatggcaaaatatcgtaatgttctcaatagtcaaaatctacaacctcccataatccctctattcccagttatcaaaaaggatctcaccttccttcacgaaggaaatgactcaaaagtagacgggctggtcaattttgagaagctaaggatgattgcaaaagaaattcgtcacgttggccgaatggcttcagtgaacatggaccctgccctcatgttcaggactcggaagaagaaatggcggagtttggggtctctcagccagggtagtacaaatgcaacagtgctagatgttgctcagacaggtggtcataaaaagcgggtacgtcgtagttcctttctcaatgccaaaaagctttatgaagatgcccaaatggctcgaaaagtgaagcagtacctttccaatttggagctagaaatggacgaggagagtcttcagacattatctctgcagtgtgagccagcaaccaacacattgcctaagaatcctggtgacaaaaagcctgtcaaatccgagacctctccagtagctccaagggcagggtcacaacagaaagctcagtccctgccacagccccagcagcagccaccaccagcacataaaatcaaccagggactacaggttcccgccgtgtccctttatccttcacggaagaaagtgcccgtaaaggatctcccaccttttggcataaactctccacaagctttaaaaaaaattctttctttgtctgaagaaggaagtttggaacgtcacaagaaacaggctgaagatacaatatcaaatgcatcttcgcagctttcttctcctcctacttctccacagagttctccaaggaaaggctatactttggctcccagtggtactgtggataatttttcagattctggtcacagtgaaatttcttcacgatccagtattgttagcaattcgtcttttgactcagtgccagtctcactgcacgatgagaggcgccagaggcattctgtcagcatcgtggaaacaaacctagggatgggcaggatggagaggcggaccatgattgaacctgatcagtatagcttggggtcctatgcaccaatgtccgagggccgaggcttatatgctacagctacagtaatttcttctccaagcacagaggaactttcccaggatcagggggatcgcgcgtcacttgatgctgctgacagtggccgtgggagctggacgtcatgctcaagtggctcccatgataatatacagacgatccagcaccagagaagctgggagactcttccattcgggcatactcactttgattattcaggggatcctgcaggtttatgggcatcaagcagccatatggaccaaattatgttttctgatcatagcacaaagtataacaggcaaaatcaaagtagagagagccttgaacaagcccagtcccgagcaagctgggcgtcttccacaggttactggggagaagactcagaaggtgacacaggcacaataaagcggaggggtggaaaggatgtttccattgaagccgaaagcagtagcctaacgtctgtgactacggaagaaaccaagcctgtccccatgcctgcccacatagctgtggcatcaagtactacaaaggggctcattgcacgaaaggagggcaggtatcgagagcccccgcccacccctcccggctacattggaattcccattactgactttccagaagggcactcccatccagccaggaaaccgccggactacaacgtggcccttcagagatcgcggatggtcgcacgatcctccgacacagctgggccttcatccgtacagcagccacatgggcatcccaccagcagcaggcctgtgaacaaacctcagtggcataaaccgaacgagtctgacccgcgcctcgccccttatcagtcccaagggttttccaccgaggaggatgaagatgaacaagtttctgctgtttgaggcacagacttttctggaagcagagcgagccacctgaaaggagagcacaagaagacgtcctgagcattggagccttggaactcacattctgaggacggtggaccagtttgcctccttccctgccttaaaagcagcatggggcttcttctccccttcttcctttcccctttgcatgtgaaatactgtgaagaaattgccctggcacttttcagactttgttgcttgaaatgcacagtgcagcaatcttcgagctcccactgttgctgcctgccacatcacacagtatcattccaaattccaagatcatcacaacaagatgattcactctggctgcacttctcaatgcctggaaggattttttttaatcttccttttagatttcaatccagtcctagcacttgatctcattgggataatgagaaaagctagccattgaactacttggggcctttaacccaccaaggaagacaaagaaaaacaatgaaatcctttgagtacagtgcttgtccacttgtttacaatgtcctccttttaaaaaaaaaaatgagtttaaagattttgttcagagagtaaatatatatccatttaatgattacagtattattttaaaccttaagtagggttgccagcctggtttctgaaaaaccaaatatgccggacagggtgtggccacaccaagaagacgggaagacctggcttgtgaccctggcttcccatgtccttctggtctcacccgcgaagtgccctatcctggaagtatgaaatgttagccaattaataccaagacacctcatctgctccttccccagtggatggggttcttctgtaaaactgtttgcacatggccaggggagggaactaggacccttgtgtcctgtctgagccttatggaggcaggacggtgtcattggcggatgtgtcctgctccattgagatggatggcaaaccccatttttaagttatatttctttgatttttgttaatttagaggtgtaggttttgttttttgttttttgtttttttttaagagaaacatttataactggatagcattgcagtgaaagcagcttgggatgttggagctaatgccagctgtttatactgctctttcaagacagcctccctttattgaattggcattagggaataaacaagcctttaaacgtgataaaagatcaaaaacctggttagacatgccagcctttgcaaggcaggttagtcaccaaagactaacctccaagtggctttatggacgctgcatatagagaaggcctaagtgtagcaaccatctgctcacagctgctattaaccctataatgactgaaatgacccctccactctatttttgtgttgttttgcacagactccggaaaagtgaaggctgccaatctgagtagtactcaaatgtgaggaactgctggtcttggattttttttccattaaattcagctgatcatattgatcagtagataaacgtaaatagcttcaaattttaaaagtggaattgcagtgttttttcactgtatcaaacaatgtcagtgctttatttaataattctcttctgtatcatggcatttgtctacttgcttattacattgtcaattatgcatttgtaattttacatgtaatatgcattatttgccagttttattatataggctatggacctcatgtgcatatagaaagacagaaatctagctctaccacaagttgcacaaatgttatctaagcattaagtaattgtagaacataggactgctaatctcagttcgctctgtgatgtcaagtgcagaatgtacaattaactggtgatttcctcatacttttgatactacttgtacctgtatgtcttttagaaagacattggtggagtctgtatcccttttgtatttttaatacaataattgtacatattggttatatttttgttgaagatggtagaaatgtactatgtttatgcttctacatccagtttgtacaagctggaaaataaataaatataacataaagccttgcctat

SEQ ID NO: 676 - protein, 1485 aa, Homo sapiens
MKPLAIPANHGVMGQQEKHSLPADFTKLHLTDSLHPQVTHVSSSHSGCSITSDSGSSSLSDIYQATESEAGDMDLSGLPETAVDSEDDDDEEDIERASDPLMSRDIVRDCLEKDPIDRTDDDIEQLLEFMHQLPAFANMTMSVRRELCAVMVFAVVERAGTIVLNDGEELDSWSVILNGSVEVTYPDGKAEILCMGNSFGVSPTMDKEYMKGVMRTKVDDCQFVCIAQQDYCRILNQVEKNMQKVEEEGEIVMVKEHRELDRTGTRKGHIVIKGTSLTMHLVEEHSVVDPTFIEDFLLYTFLSSPMEVGKKLLEWFNDPSLRDKVTRVVLLWVNNHFNDFEGDPAMTRFLEEFENNLEREKMGGHLRLLNIACAAKAKRRLMTLTKPSREAPLPFILLGGSEKGFGIFVDSVDSGSKATEAGLKRGDQIVNGQNFENIQLSKAMEILRNNTHLSITVKTNLFVFKELLTRLSEEKRNGAPHLPKIGDIKKASRYSIPDLAVDVEQVIGLEKVNKKSKANTVGGRNKLKKILDKTRISILPQKPYNDIGIGQSQDDSIVGLRQTKHIPTALPVSGTLSSSNPDLLQSHHRILDFSATPDLPDQVLRVFKADQQSRYIMISKDTTAKEVVIQAIREFAVTATPDQYSLCEVSVTPEGVIKQRRLPDQLSKLADRIQLSGRYYLKNNMETLCSDEDAQELLRESQISLLQLSTVEVATQLSMRNFELFRNIEPTEYIDDLFKLRSKTSCANLKRFEEVINQETFWVASEILRETNQLKRMKIIKHFIKIALHCRECKNFNSMFAIISQLAPVARLRTTWEKLPNKYEKLFQDLQDLFDPSRNMAKYRNVLNSQNLQPPIIPLFPVIKKDLTFLHEGNDSKVDGLVNFEKLRMIAKEIRHVGRMASVNMDPALMFRTRKKKWRSLGSLSQGSTNATVLDVAQTGGHKKRVRRSSFLNAKKLYEDAQMARKVKQYLSNLELEMDEESLQTLSLQCEPATNTLPKNPGDKKPVKSETSPVAPRAGSQQKAQSLPQPQQQPPPAHKINQGLQVPAVSLYPSRKKVPVKDLPPFGINSPQALKKILSLSEEGSLERHKKQAEDTISNASSQLSSPPTSPQSSPRKGYTLAPSGTVDNFSDSGHSEISSRSSIVSNSSFDSVPVSLHDERRQRHSVSIVETNLGMGRMERRTMIEPDQYSLGSYAPMSEGRGATATVISSPSTEELSQDQGDRASLDAADSGRGSWTSCSSGSHDNIQTIQHQRSWETLPFGHTHFDYSGDPAGLWASSSHMDQIMFSDHSTKYNRQNQSRESLEQAQSRASWASSTGYWGEDSEGDTGTIKRRGGKDVSIEAESSSLTSVTTEETKPVPMPAHIAVASSTTKGLIARKEGRYREPPPTPPGYIGIPITDFPEGHSHPARKPPDYNVQRSRMVARSSDTAGPSSVQQPHGHPTSSRPVNKPQWHKPNESDPRLAPYQSQGFSTEEDEDEQVSAV

SEQ ID NO: 677 - DNA, 1174 bp, Homo sapiens
cttgccatcgtgagagattggtacatgatgtgtaaattcagttcagcatatgtttcttcattatgaaaccactagcaatcccagctaaccatggagttatgggccagcaggagaaacactcacttcctgcagatttcacaaaactgcatcttactgacagtctccacccacaggtgacccacgtttcttctagccattcaggatgtagtatcactagtgattctgggagcagcagtctttctgatatctaccaggccacagaaagcgaggctggtgatatggacctgagtgggttgccagaaacagcagtggattccgaagacgacgacgatgaagaagacattgagagagcatcagatcctctgatgagcagggacattgtgagagactgcctagagaaggacccaattgaccggacagatgatgacattgaacaactcttggaatttatgcaccagttgcctgcttttgccaatatgacaatgtcagtgaggcgagaactctgtgctgtgatggtgttcgcagtggtggaaagagcagggaccatagtgttaaatgatggtgaagagctggactcctggtcagtgattctcaatggatctgtggaagtgacttatccagatggaaaagcagaaatactgtgcatgggaaatagttttggtgtctctcctaccatggacaaagaatacatgaaaggagtgatgagaacaaaggtggatgactgccagtttgtctgcatagcccagcaagattactgccgtattctcaatcaagtagaaaagaacatgcaaaaagttgaagaggaaggagagattgttatggtgaaagaacaccgagaacttgatcgaactggaacaagaaagggacacattgtcatcaagggtacctcagaaaggttaacaatgcatttggtggaagagcattcagtagtagatccaacattcatagaagactttctgttgacctataggacttttctttctagcccaatggaagtgggcaaaaagttattggagtggtttaatgacccgagcctcagggataaggttggaaatatattctattttgtctcttaaatatgaaatgtaaacctaaagatactttaatgtgtatatttgtcacagcaattatgtccagattaatgtaatgaaataggagaatgtaattctgaagc

SEQ ID NO: 678 - protein, 333 aa, Homo sapiens
MKPLAIPANHGVMGQQEKHSLPADFTKLHLTDSLHPQVTHVSSSHSGCSITSDSGSSSLSDIYQATESEAGDMDLSGLPETAVDSEDDDDEEDIERASDPLMSRDIVRDCLEKDPIDRTDDDIEQLLEFMHQLPAFANMTMSVRRELCAVMVFAVVERAGTIVLNDGEELDSWSVILNGSVEVTYPDGKAEILCMGNSFGVSPTMDKEYMKGVMRTKVDDCQFVCIAQQDYCRILNQVEKNMQKVEEEGEIVMVKEHRELDRTGTRKGHIVIKGTSLTMHLVEEHSVVDPTFIEDFLLYTFLSSPMEVGKKLLEWFNDPSLRDKVGNIFYFVS

SEQ ID NO: 679 - DNA, 5600 bp, Homo sapiens
cttgccatcgtgagagattggtacatgatgtgtaaattcagttcagcatatgtttcttcattatgaaaccactagcaatcccagctaaccatggagttatgggccagcaggagaaacactcacttcctgcagatttcacaaaactgcatcttactgacagtctccacccacaggtgacccacgtttcttctagccattcaggatgtagtatcactagtgattctgggagcagcagtctttctgatatctaccaggccacagaaagcgaggctggtgatatggacctgagtgggttgccagaaacagcagtggattccgaagacgacgacgatgaagaagacattgagagagcatcagatcctctgatgagcagggacattgtgagagactgcctagagaaggacccaattgaccggacagatgatgacattgaacaactcttggaatttatgcaccagttgcctgcttttgccaatatgacaatgtcagtgaggcgagaactctgtgctgtgatggtgttcgcagtggtggaaagagcagggaccatagtgttaaatgatggtgaagagctggactcctggtcagtgattctcaatggatctgtggaagtgacttatccagatggaaaagcagaaatactgtgcatgggaaatagttttggtgtctctcctaccatggacaaagaatacatgaaaggagtgatgagaacaaaggtggatgactgccagtttgtctgcatagcccagcaagattactgccgtattctcaatcaagtagaaaagaacatgcaaaaagttgaagaggaaggagagattgttatggtgaaagaacaccgagaacttgatcgaactggaacaagaaagggacacattgtcatcaagggtacctcagaaaggttaacaatgcatttggtggaagagcattcagtagtagatccaacattcatagaagactttctgttgacctataggacttttctttctagcccaatggaagtgggcaaaaagttattggagtggtttaatgacccgagcctcagggataaggttacacgggtagtattattgtgggtaaataatcacttcaatgactttgaaggagatcctgcaatgactcgatttttagaagaatttgaaaacaatctggaaagagagaaaatgggtggacacctaaggctgttgaatatcgcgtgtgctgctaaagcaaaaagaagattgatgacgttaacaaaaccatcccgagaagctcctttgccttttatcttacttggaggctctgagaagggatttggaatctttgttgacagtgtagattcaggtagcaaagcaactgaagcaggcttgaaacggggggatcagatattagaagtaaatggccaaaactttgaaaacattcagctgtcaaaagctatggaaattcttagaaataacacacatttatctatcactgtgaaaaccaatttatttgtatttaaagaacttctaacaagattgtcagaagagaaaagaaatggtgccccccaccttcctaaaattggtgacattaaaaaggccagtcgctactccattccagatcttgctgtagatgtagaacaggtgataggacttgaaaaagtgaacaaaaaaagtaaagccaacactgtgggaggaaggaacaagctgaaaaagatactcgacaagactcggatcagtatcttgccacagaaaccatacaatgatattgggattggtcagtctcaagatgacagcatagtaggattaaggcagacaaagcacatcccaactgcattgcctgtcagtggaaccttatcatccagtaatcctgatttattgcagtcacatcatcgcattttagacttcagtgctactcctgacttgccagatcaagtgctaagggtttttaaggctgatcagcaaagccgctacatcatgatcagtaaggacactacagcaaaggaagtggtcattcaggctatcagggagtttgctgttactgccaccccggatcaatattcactatgtgaggtctctgtcacacctgagggagtaatcaaacaaagaagacttccagatcagctttccaaacttgcagacagaatacaactgagtggaaggtattatctgaaaaacaacatggaaacagaaactctttgttcagatgaagatgctcaggagttgttgagagagagtcaaatttccctccttcagctcagcactgtggaagttgcaacacagctctctatgcgaaattttgaactctttcgcaacattgaacctactgaatatatagatgatttatttaaactcagatcaaaaaccagctgtgccaacctgaagagatttgaagaagtcattaaccaggaaacattttgggtagcatctgaaattctcagagaaacaaaccagctgaagaggatgaagatcattaagcatttcatcaagatagcactgcactgtagggaatgcaagaattttaactcaatgtttgcaatcatcagtggcctaaacctggcaccagtggcaagactgcgaacgacctgggagaaacttcccaataaatacgaaaaactatttcaagatctccaagacctgtttgatccttccagaaacatggcaaaatatcgtaatgttctcaatagtcaaaatctacaacctcccataatccctctattcccagttatcaaaaaggatctcaccttccttcacgaaggaaatgactcaaaagtagacgggctggtcaattttgagaagctaaggatgattgcaaaagaaattcgtcacgttggccgaatggcttcagtgaacatggaccctgccctcatgttcaggactcggaagaagaaatggcggagtttggggtctctcagccagggtagtacaaatgcaacagtgctagatgttgctcagacaggtggtcataaaaagcgggtacgtcgtagttcctttctcaatgccaaaaagctttatgaagatgcccaaatggctcgaaaagtgaagcagtacctttccaatttggagctagaaatggacgaggagagtcttcagacattatctctgcagtgtgagccagcaaccaacacattgcctaagaatcctggtgacaaaaagcctgtcaaatccgagacctctccagtagctccaagggcagggtcacaacagaaagctcagtccctgccacagccccagcagcagccaccaccagcacataaaatcaaccagggactacaggttcccgccgtgtccctttatccttcacggaagaaagtgcccgtaaaggatctcccaccttttggcataaactctccacaagctttaaaaaaaattctttctttgtctgaagaaggaagtttggaacgtcacaagaaacaggctgaagatacaatatcaaatgcatcttcgcagctttcttctcctcctacttctccacagagttctccaaggaaaggctatactttggctcccagtggtactgtggataatttttcagattctggtcacagtgaaatttcttcacgatccagtattgttagcaattcgtcttttgactcagtgccagtctcactgcacgatgagaggcgccagaggcattctgtcagcatcgtggaaacaaacctagggatgggcaggatggagaggcggaccatgattgaacctgatcagtatagcttggggtcctatgcaccaatgtccgagggccgaggcttatatgctacagctacagtaatttcttctccaagcacagaggaactttcccaggatcagggggatcgcgcgtcacttgatgctgctgacagtggccgtgggagctggacgtcatgctcaagtggctcccatgataatatacagacgatccagcaccagagaagctgggagactcttccattcgggcatactcactttgattattcaggggatcctgcaggtttatgggcatcaagcagccatatggaccaaattatgttttctgatcatagcacaaagtataacaggcaaaatcaaagtagagagagccttgaacaagcccagtcccgagcaagctgggcgtcttccacaggttactggggagaagactcagaaggtgacacaggcacaataaagcggaggggtggaaaggatgtttccattgaagccgaaagcagtagcctaacgtctgtgactacggaagaaaccaagcctgtccccatgcctgcccacatagctgtggcatcaagtactacaaaggggctcattgcacgaaaggagggcaggtatcgagagcccccgcccacccctcccggctacattggaattcccattactgactttccagaagggcactcccatccagccaggaaaccgccggactacaacgtggcccttcagagatcgcggatggtcgcacgatcctccgacacagctgggccttcatccgtacagcagccacatgggcatcccaccagcagcaggcctgtgaacaaacctcagtggcataaaccgaacgagtctgacccgcgcctcgccccttatcagtcccaagggttttccaccgaggaggatgaagatgaacaagtttctgctgtttgaggcacagacttttctggaagcagagcgagccacctgaaaggagagcacaagaagacgtcctgagcattggagccttggaactcacattctgaggacggtggaccagtttgcctccttccctgcgtgaaatactgtgaagaaattgccctggcacttttcagactttgttgcttgaaatgcacagtgcagcaatcttcgagctcccactgttgctgcctgccacatcacacagtatcattccaaattccaagatcatcacaacaagatgattcactctggctgcacttctcaatgcctggaaggattttttttaatcttccttttagatttcaatccagtcctagcacttgatctcattgggataatgagaaaagctagccattgaactacttggggcctttaacccaccaaggaagacaaagaaaaacaatgaaatcctttgagtacagtgcttgtccacttgtttacaatgtcctccttttaaaaaaaaaaatgagtttaaagattttgttcagagagtaaatatatatccatttaatgattacagtattattttaaaccttaagtagggttgccagcctggtttctgaaaaaccaaatatgccggacagggtgtggccacaccaagaagacgggaagacctggcttgtgaccctggcttcccatgtccttctggtctcacccgcgaagtgccctatcctggaagtatgaaatgttagccaattaataccaagacacctcatctgctccttccccagtggatggggttcttctgtaaaactgtttgcacatggccaggggagggaactaggacccttgtgtcctgtctgagccttatggaggcaggacggtgtcattggcggatgtgtcctgctccattgagatggatggcaaaccccatttttaagttatatttcttagcagcttgggatgttggagctaatgccagctgtttatactgctctttcaagacagcctccctttattgaattggcattagggaataaacaagcctttaaacgtgataaaagatcaaaa

SEQ ID NO: 680 - protein, 1485 aa, Homo sapiens; identical to SEQ ID NO: 676

SEQ ID NO: 681 - DNA, 60477 bp, Mus musculus
  misc_feature (1)...(60477): n = A,T,C or G
gactgttggctgtgagcaatctaatcactgagccacctggccctgattgcttggttctgaagtcaggtgggaggtgagtgacttcacatgctctcttcaggagctgctgttttggtttcagaaaatacaagtttcacagtgtgatgggtcagctttgcagtcccatcacctccagtcaagtgcgtatgtgtagctttgagcaagcaaccgaagctctggcatgctgacaaatccaggggtgaaagagagaggaaaatgtctggttgctggacacccccaagtggacttctctgtgggctctgggtgatatttaggaagtgggtatgttggggttatcaatgtcttatccccaaaacttgttacagaatgcctgattggtacatagcagatcgtaaaagctgtttcttttctttttcttttctttttttttttttttggtctttttgagacagggtttctctgtatagccctggatgtcctggaactcactttgtaaaccaggctggcctcaaactcagaaatctgcctgcctctgcctcccgagtgctggtattaaaggcatacgccaccacgcccggctaaaagctttttcaataaagacaaaggaaaaaatattttaggcttgtgagccatatggtctctgtcataacaatcaactctgctgacaatatgcaaatgagtgaacatgttaaaaaaaaccctatgagtattgaaatttgaattttatggacattatatatattacatataaatatatagatagagagaatgagagagagagagtcctgtatataccacattggtcacctatataattcagtgtagctgagaatgatcctaaacttttgttcgtgtgtgtgtgtgtgtgtgtgtgtacatatgtgctcctgtgtgtctgtctttatatgtgtgtatggaggtcagaggtcaacccaaatgctgttcctcaggctctgtgcactttttatttttattgcttgtttggtttttgtttttgtttttgttttgaggttttatttttattttgtgtgtatgagtgctttcctgcatatatgtcagtgtaccatgtacatgcctggtgcctgcagaggccaaaatatctcctggatattagagttacagacagttgtgaactaggaaccgaactaggtcctttgcaagaggagtgaattctcttagacactgagttagctctgcagcccctctgtctgtcttttggagacactcatcactgtgtagcccaggctgaccctgacagggagctagtgacaatcctctcttcttagcctgtcaagtgctggggttacaagcacacacctgcaggcccaacttcaatctctctcttttttttttaaagatttattttatgtatatgagttcactgtagctgtactgatggttgtgaaccatcgtgtggttactgggaatgaaggttgcttgctctggtctcggatctgctctctctggccctgcacgctccagtctaaagatttattattatatctaagtagactgtaggtgtcttcagacacaccagaggagggcatcagatcttcttacagatggttgtgagccaccatgtggttgctgggaattgaactcaggacctctggaagagcagtcagtgctcttaacaactgagccatctctccagcctcaatgacttctttttaattttttttccaaccatttaaaaaatacgaggtggggctgagggcagctgggcggtgtttcagtggctggaatatttgccgatggtgcagaggttcagattccaggtgctcacagggtagtttgcatctatctacaattctagttccctgggattcagtgctctcttctggcctccatactcactacacacacatatggcacattcacatatgcagaagaaacagtcatatgcataaaataaaaataaatatgcagggcttggtggcacacgcctttaatcccagcactggggaggcagaggcaggcagatctctgagttcgaggctagcctggtctacaaagtgagttccaggacagccagggctacacagagaaaccctgtctcaaagaaaaaagagagagagagagagggagagagagaagagcagtgaggtgccccggcaggtcttggtgccaagctacttgacctgagcgccctcccacatggtggcagagagaatcagttcccaaaaccatcctctgatctccacatgtgtgctgtgtcacacacccccttgcatggtctcttcctctctcatacgtacatagacacaaaataatcaaaatgcaatttaaaaataaagacagggccattgagttaacttaatagaagtggagacacttgctgcaaagccgacatctgggtttactccccacgaccctcaagacaggaggagaaatgactcctatgacctgtcctctgatctctatgtgtgcttcatggcacgtgtgtacacacacacacacacacacacacacacacacacaatgttaaaaataaagcaggccagcaagaggcacctgaggaacaagcctggagactgacacccggaccccacggggaggtgggagcgagaactagttcaacagtgtgctcttctgactccacacctccaacaacaacaacaacaacaacaacaataataataatagtgataataataatactgacaaatatagtagctcatagccattcattcattgggtccccaatggaggagttaaagaaaggacccaaggggctggcgagatggctcagcggttaagagcaccaactgctcttctgaaggtcctgagttcaaatctcagcaaccacatggtggcttacaatcatccgtaatgagatctgataccctcttctggtgtgtctgaagacagctacagtgtacttacatataacttacatataaataaatcttaaaaaaaagaaaaaaaagaaaggacccaaggagctgaaggggtttgcagccccatagaaggaacaacaatatgaaccgaccagtaccaccagagctcctagggactaaaccactaaccaaagtgtacacatggagggacccatggctccagctgcatatgtagcagaggatgacctagttggtcatcaatgggaagagaggcccttgttccggtgaaggctctatgccccagtgtaggggaatgccagggccaggaagcaggagtaggtgggatggtgaacagggggcaggggggatgggatagggggttttcggagggaaaaccaggacaggggataacatttgaaatgtaaataaagaaaatatctaataataaataaaatactactactactactactactaataataataatgaaagaaataaaaatatgcccagaggagctggagagatacctcagtaattaagagcatggctgttcttccagagggcttgagttcaattcccagcacccacatggtagctcacagccatctgtcactacagtctcatggggtctgatgtggtcttctcaggttcagatgtacatgctggcaaaacaccatttacataggacacattttttctttttttttctttttctttctttttttttttcttttttgagacagggtttctctgtatagccctggatgtcctggaactcactctgtagaccaggctggcgttgaactcagaaatctgcctgcctctgcctcccgagtgctgggattaaaggaatgagccaccatgcctggcatgacacattttttaaaagacatcagcactcaggaggcaagggcaggtagatctctgtgagttcgaggtcatcccggcctatgtagcaagttccagcacaccctgtgctatagagagagagacactgtctcagaaaacacggggctgggtgactgtggttgagagcactgggtgctcttactggaagcccagacttgattctcagcacccacatggtggtggcttataaccatatataactctagacttagggtgatctgatcttctagtctctgaagggaacatgtaggcaggcagaatacccaaacatagaaaataaacaacaacaacaacaacaacaaacaacaacagggtctggagagatggctcagtggttaagagcacagacttgttcttctaaaggtcctgagttcaaatcccagcaaccacatgatggttcaagatctgtaacaagatctgatgccctcttctggagtgtctgaagtttatttatttacagcgtacttacataaataaataaataaataaataaatcttaaaaaaaaataataaaacagcaacaactagttgggagatgatggcacatgcctttaatcccagcactcaggaggcagagacagttggatctctgtgagttcaaggctagacagggctacacagtaaaaaaaaaaaaaaagaaaaattacaaaaacaaacaaatagttgcagtagttcagaggctgaggcaggtgagtttccatgaattcttgaaatacttgggttacatagcgaggtcctatctcaaaacccaaaatctaggattgtagctgaatggtccaacattttcctggcatgtgtgagcccctgggtttgacatccagcactgtagatgttaacaaggcagatatggccttgacacctaaggtttgccgtgatctatcctaaaggacccctcccgcctcctcccttccagggctctgagcattagacaggctgttcttttctcttcttcctgataactttgcacacagcggtgttagtgtctgactgtgactttttattttctctttttgtctcaagataaaactgcaggtcaccttacacaatgcctatttctgcttctgtctttctaggtcttcactccaggaagccctaaataacataacagtggcaacaatagaatgtgttcctagcatgggagttatgttaattgcttgatgcatgttgctctcattcattctctctctctgagaacgggtctctctatgtagccctggcttcccggtaactctctacacagaccaagatggcctctgcctcgagtgtgtgtgtgtgtgtgtgggggggagaggtgagcacctctgtgcccagctatcgtcagtatcttagcatccttgatattctcgtaggataagtagataggtgtctttttttgggaggtgggggtggttcaagacaggctgtgtagttccggctgtcttggaacttgttctatagaccaggctggcctcaaattcacagagatctctcagatggcctagtgctgggattaaaggcatgtgtcccctctccccccacccccaccccccgttaaaccctaagtgtcttttttttttgttggtttgtttttgtttttgtcttttaaaaaagatttatttattatatgtaagtacactatagccatcttctgacactccagaagagggcatcagatctcattacagttgattgtgagccatcatgtggttgctgggacttgaactcaggaccttcagaaaagcattcagtgctcttacccgctgagccattattccagcccccccccccaagtgtcttaatcatgattctatttctgtgaagagacagcatgattgaggcaacttataaaagaaggcataaacggggtgcgggagcagtagctgagagtttatgtttgattcacaggcaggagaccgagagaggaggtggggagacactggagctggtgaaggttttggaaaccttaaacctacgcccagtgacacacctctccaacaagaccccacccattattctttcccaaactggggaccaaacactcaaaatatgagagtctatagaggctcttttcattgaaaccaccacagtgaggaatgccattcttgtattttctaagacaaaagtgagaagagaaagaggaggaggaggcagtaacagaagcccaagaccattcctgcttaggaaggttgtacttgtaaacccaattaaaccacagttacacctgaaagaagcatggggttggctttgagcgacagcgccccctgctgcatacatttaaagttctccccctagttgttagtcattggtcagcagcttagtcaatgaagtcaccagagaggtggagacagtccagggcagtaaggggtcaggaagataaatcaagggacagcttagtgttttttcctgccctgttacttcatttcaagcgcctgttttagaatctcctatgtgtgtcaccggaaacagagatgtgacctcattgtctacttccttgtttcttcagccatttcctgaggaaagcggtctggggaaggtgggagggagcaatggagagaacaaagagagagccaactcctggaaggtgtcctctgacctccttaagtacgctgagccacacatgcataaataataataaaggagccacttgtttgagcaccgttccacagcacatgcgtggaggtcagaggacattcgggagtctgttccctgcgtccactgtaggatccaggcattgaactcagggagtcaggcttgcagacaagtgcctttacccaccaagccacttcaccaggcccacataaggaccttttcccattacattaccaacctagtagcttttctcttctcttggcctgactctagccccactcaaagtcagcctgcatctcctgttttgctttctggagactcccagttagtaatgtgtgctggcccactggtagacaaaagttttttttgtttttgtctttgtttttatttttgctgtgttgttggttttgggtctgtttttttgtttgtttgttgtctgtcctggaacttactatgtagatcaggctcttcttgaaggcccagaggtttgcctctgcctcctgagggctggatctaaacttgtgcactgccttactcttcctggccaaagatttgataaaatttctcttgcagcatttgacagttatgtgtgcatgcgcgcacacacacacacacacacacaactataaggacagactcagtatctgcagtatctgcttttcttagcatggctgttttcaatatagatgctccatgagggatattaatgagcaaacaagaacttctctttatagttttcattctgaaacaaggtttcactgtgtcctttagctttcaacttgctttagtgcgcacagtggccttgaactctggattttcccgtctgcctcctaagtgctgagactgcagacatgtgccgcctctgccagccaggctctcttcactggaaagaacagtgtattaagagctagaaaagccaagttctagacttgaccttgcatgcagcggacctcatgatcctgaggcaggcattctttgcctctgcctctgtctcagcaaagggaggggtaggagatgcttagcagcctggctgtggagatgtccccactccaggatcttttctttctttctgtagttctggctagcccggaacttgctacgtagaccaggctagtctcaaactcacgaagatcagactgcctgtttttagagtgctgggattaaaagtatgtgccacccacacccagcttctttatttctttaaaagacaggggcctcaggctggagagatggttcatcggttaagagcactggcagctctcctagaggtcgtgagttcaattcccagcaaccacatgatggttcacagccatttggaatggaatctgattccctcttctagcaagcatgaaaacagaacacttggctggcagtggtggcgcacgcctttaatcccagcacttggaaggcagagaaacaaacaaagaaaagaaaaaaagaaaacaatattaatatacataaaataaataaataaaactaaaaaaaggaagtaaaagacacagcctctttcttaatacaagctaatatgaaattcaacatccaagccagcctagcctgaccccactcagggccatccccatgaacctcttgaaggatgagaattacaggcctgtagcaccatggcctccagggttctagaattttgctcacctctttctttctttctttctttctttccttctttctttctttctttctttctttctttctttctttcaagatttatttattattatacataagtacactgtagctgtcttcagatgcgccagaagagggcatcagatcttattatgggtggttgtgagccaccatgtggttgctgggatttgaactcaggtcctctggaagagcagtcagtgttcttacccaccaagccatctcaccagccctcacctctttcttcttgattcagggctgtctccgagtaccttccatgaacagatcggtcccaggggagcccttcataggtgaagacccagtgcctcatggtctccctcagtgctgcccagctgctgtggaatccagagaacagctggaggaagtggaggggagggaggaaaaccaggaagacaacaaggatggcttccacacatcactccttagaaggtccggggctttccgtgcccgcagttacactactgactccttcaaaagacacagttgggggcctggcaaggagttccaggatccaataagcaggtgagtccccagggcaccttctgaccctcccttgctcatctgtagaccttgggaagagtgttcagaaaggcacatcctggtgtcattgccccacccccaccctgccaccaatctctctggagagactcggatctctgaggaatgaacggagtggaaagctctcctggagaatcacagcccagcctgtgaacaagcttgggaaatatggagcttctaaaacaggggtctccacagtggcactcattcccacggatggcaccaccagcaggtgggctcgggaggagaactgggtgggcaccatctgagttccatagccccacacaacggagcaaaaacgacgacgacgacaacttggagatcatataatctagcctcttcattctacagccagaaaataggtccagagaacgtttaagaggcttcttaatgtaagtgggtactgttccccaggtgtctgccacgctgctggcttcagactgaggcggacctgtctcttggacaaagctgcagccagaaacagcaggggtttatgtttactagtttgtcagttggtttttgttttttgagacagagcttcaggtagcccaggctagtctctctcacgtactgagatgatagagataggccaccctgcttggctggggacagctgccctccctcagaggtctgcatattcttagcaggcttggggagaaggacccacgtcttccctatctcctggaaaatccctgaccacttcccccaaatagaggaagttaaaaagagaaggtcgggggaggggattgttcacatgagtccgaagtgagtccagccctccctccccccccccccccccatcctaccagcaagggtagtctcttgaccagggcacggtcttcttagacatgcccttatctctggtgagtggttcagcattcttcagctgttgggcatgagcatggacggagcagggcagcggcggcggggagtgggggtgggggtggtcctgggactttgtcccaacgatggttttgtgggaactgggtgaacagcaatatcttcccacaaggctagcttgagtgtcttttgtgacgtctgcctacagtttgagtgtcttttgtgacgcctgcctagattctctgggtgtctcattgtcaccacattaattctgtgcctcgggtgcagagggatggagcgctggctttcccgtcgctgagataaagatgttgtcacctgacaccaaaccaggagacttcagcttgccctgcccctccgtcctttctggagggtagtaccgcctttgtaccagcaggggccgctcttgtccgaagtcaactgtgctgagaccgagccatagtttgggtctgagttgtgtgagcctaggctaacaggaagggctgggctggggggcaaacaacagggctgggctgaggaactgttcgttcctggtgcccatcactgactactggctataagggttgtggtggcaatgtatgtttcaggaggagactgcagtcatcggaatgcccaggctcccaggaagccccctttctacagagcctcgaggaattgggcacccctctgggagctcagcagcaggagcagcagcaggggcaggagcagcagcgtggccaaccctttcaccgggtatgacagatagaccccagctccccctcctgatccttccctgccagcaaccactctgtactcttctgttccatcagctctctgtgcccggacctagctcgggctccatctgcgcccatctgaatctatcttctgtggccctctgtctgcttccctgtctatatgcgctgtcccggtcgcttggaagcctgcctctgtctctttctgtaacactgtttcttcatttctatgtctgtctctctgtattgatgcgggtatctctgtcccctccctctttaaagtcctctatctctctggaggctatgaccacttctttctgtgggccctacagttcccagagttagaactggacttatctgtgggaataaactaggcatctggtaccctgaaagactcagtaactctctaaccagagtttaataggaatagcaattgagaaagaatacagagcctagagtgtaggtgattgctgtggtcactgtatatcaagggtgaagccctgtgcttaatccccagcaataaaggagggccctgggaagagggaggtagagaggacccagccattgctcagctttctggatgaggaatataactggggagagctgtcccaggatctaaggaccacctaagacacacaggcttgagagaaccccctggctttgtaagctagtgtccttcatgctctcagccccaagcctcacggatgaagattcccccccccccccaaacgcccctgcagctggcagataacatgccaggcatgtaacgtgactttggaaaatagcttttcttttcttttttattttttttggtttttcaagtcagggtttctctgtatagccctggctgtcctggaactcactctgtagaccaggctggcctcgaactcagaaatccacctgcctctgcctcccaagtgctgggatcaaaggcgtgcgccaccacacccggctaatagtttttctcttctgattctcttcctcttttgcccagaccccctttcccctcatatgacttagcccgttttagtattgtgatttcgtctctcgttcccctgaggctcccctgtttattgtgtcctttctcccattcatctgatctataagacctttccttaatagtctctgggccttagtgtttggggttcttgtttttcctttttgtggtactcctccagagcctgcagaccaaaagtctgactcactagggctaggcaggggctgcagacaggcagacagatatttataagcacaatctctttccacaattgaccttttcacactgtaaaggaatttacagtgtgtgtgtgtgtgtgtgtgtgtgtgtgtgtgttgccatgcatgcatgcgttcatacacaggtgcatgcagccaactcctggctggttgctggcatctgaatttctggccctctcacttgcaaagcaagcactttcgtgaccacccagccacctctgcagctctgacctcctaaactacaacttgccctttgctctccagctcacggcagctacgaatactcttctattttccctttgcttttgagtttattttattttatcccagataggtctacttatgtagcccaggctgacccccttcattcctcctgcctttgcctctttagctctgggattgcaggcacacactgtactttttctgctttgcttttgtttataaagactgtgtagccttagctggtctgaaacttgaagtgtggaccaggcttacctccaatttgtgctgcttgtcctgattcttaagtatagagatcatatgcatgaacaaccacctctaactctggcttttttttttttaatatgagatttataagtaacaaaaccaaaaccaaaacaaacaaaaatacttcccaagacttacaacatcatcaatatcttcatccctgctgactggctgacatgttcttcctctccttccttcctccttttcttctctctctctctctctctctccccctctttcctttttaaaaatgtgtctattgagaccggatggcacagactggcctggaacttcttatagaacaggttggtctataaaggatttccagactgcctttgcttcccagtgctgggattaaggtgtgccaccaacctcagactaacttttttctttttcctttttttctcctttttttctttttcgtttttaatatccatctaattatgtgcctgcacatacgcacatgtgccactgtgtctctgtggaagtgggaggatagctttcaggtgttggctttctccatccattatacaggctttggtcagcgcaggctttattcacggatgtctctttggggctccccttttcttcatttccttcctgctataggtaacatcatgatgaattttatcattcccctttataaaatttgtttttttaaacagaaatgtatattttactgacaacataatatgtttttaatggctgaattttatttatttatttatttatttatttattttggtttttcgagacagggtttctgtgtgttaccctggctgtcctggaactggctatgtagaccaggctggcctcaaacttagaaatccacctgcctctgcctcccaagtgctgggattaaaggcgtgtgccaccactgcccggcttatggctgaattttaaagcaatgatgatattttataaaatgttttagattcttctttttctttgttctgtttgagacagagtctaggctgacttcaagcttgtgatcttcctgcctaaacttcctctgtactaaagttacatgggtgtatcctcaccccaacaacatagcttacaagcaactcttatttaatctctgtgttgttgcaaattgttacagccattcattcatattttatttatacttcctttttgagacaagagtcttatgtagcccaggctagagtggaagtctctatgtggtggacgatgaccctgaactcctgatctcccagtctctatctcttaagtgctgaaattataggcatacagcaccttgctggttccctgtggtcctagggatggaagccagggctttggtgatgccgagcaggcactctactgactcaactacatccctacatctttaaccctatacttttcccctgtaagtttattattatgggcagcataccaaggctcactcatggaggacagagcataactttgtgagcttcctttccctccaccatcccatgggttacagggatgagacccaggtgcaatcttgacacacgacacatcacctgcaccagcccttgctgtgttggttattttttgtttttctagagtatttttttcccctgcagccctcactgttctggaactcactctgtagaccaggctggcctcagattcacagagattcacctgcctctacctcccaagtgctggaaataaaggtgtgtaccactgctgcctggccactttgttttttaattgtttattttattttaatcttttctttttctttttttttccttctttttatttttttaattttttttttttttggttttccgagacagggtttctctgtgtagctctggctgtcctagaactcactttgtagaccaggctggcctcaaactcagaaatccacctgcctctgcctcccaagtactgggaataaaggcatgtgtcaccactgcctggcttattttaatctttcatattcttttttttttttgagacagattctctatattatgtatctctggctggcttggaactccttatgttagaccaggttggcctcaaattcacagagatctgcttgtctcagcctctgagtgctgggatcagaagcattcactgccacactcggctcaattttgttgcctttgagacagggtttctctgtgtagccttggcagtcctgggatattttttatgaactaggctagtcttgaacttggagatttgactgcatctgcctcctgagtgctgggactgaaggcgtgcactgccacgacccagtgtacctggtttttttttttttttttttttttaatggtatacatatgttgtgggtatatgcaactaagtaccatgtttgagaagggcagaggaggggcttggattcctggacctggagttacaggtgattgtgagctgtctgccaacatgggttctaggaatagaactccagtcccctgcaagagcagtgatcactcagaaaggcaaagccatctctttccagccctaacctttgttgttttctctctctctctctctctctctctctcctaaatatctccagtccatagatgaacagtgataataatgtctgggcagatgggttacctactggtgaagtgtctgcttggacacagaactgataagataatcagcacaatttttagctcaccccagctaaaattctcagtagcaactgacacattgtatgggtatataaatgttttcttttaaaagcattttcaacttatttatgtgtgtgcctgcatgtatgtctgtgtcccacatgtgtgtctggtgcctgtggagtcagaagagggtattggatcacctgggactggaattatagttgtgagacatcctgttggtgctggaactcaaacctgggtcctcaaggagcagcctgtgctcttaacactgagtttctttccagctccttggttctggctgtctctctctctctctctctctctctctctctctttctttctttttctttcttcctttctttttttctttcttttctcattcttccttccttcctttttttctttgaattatttatttattttatgtatatgagtacactgtagctgtcttcagacacaccagaagagggcatcagatcccattacagatggttgtgagccaccatgctgttgctgggaattgaactcaggacctctggaagagcagtcagtgctcttaactgctgagccatctctccagccccatagccccttggttttcagaataaggatacccactttgaatggactaaggtagaatctctctgtgtggtttgagttccctgtcccgctagctagggatatagaacttttttgtgcccggtttgcttgcccgtttgttgactggactgcttattttcctgtttcccccttctgttctagacattagtccccgtcacttgtatgtctagattttctctcgcttgtagctctaattgttctctcgtctcctcactctaattgtttcccttgctgtgctgaagcttttaaacttcatgtaattccacttgacgattgttgtcttatttcctgccatttggaatcctttacagaaagaaaatcctttgcccagggctggggatgtggctcagctgctgtcctgggtcatccattgcacctatggctaggaagatgtttcagccatttatactacttgctgctcttgcagaggaccagtatcatctggtctctttgggaacctgcacacgtgttgtacatatacacactcaagcattcatgcatacacaaaacccaaaataacaaaaagcaaacaagctagatctggtggtgtacacacacacacacacacacacacacacacacactgcatgggggcaggtggtggggagacagagacagaaggacagaaaaatagagacagagaaggagggcaagagatggctcagtgtttaaggactcctgatgacctgagtttgatattatgacacatattgtggaaggaaagaattagctcctgaaagttgccctttgacctctacaggtgtgctgtggcatgagcacacacacacacacacacacacacacacacacacaaataaaatctaatttaaaattagaaaaaaaaaaggaaaagcaagtatgatgtatgaaaacatcacattgtggcccttacatatattctattattctgagttgatttaaaaaacaataccctacatcccgatttacaaatgggatgcagtagcacaggctgactgcaaaccaagcacttggaaggtagagccaggaggataggtgcaatcctttaattccagcacccaggaggcagagccagatgaatctctaagttcgaggccagcctggtctacagaacaagttctaagacagccagggctatacagagaaaccctgtctcaaaaacacaaagccaaaaccaaaacaagtcaagatcgtcctcagctccatggtgatatcaaggccagcctgagctacctaagacccttctcaagcataagttgaaaagaaagaggttggcaggtgggctcagcaggtaataatgcttgctgtgcagaacacagcctgagtttgatccctgattcccatgctggaaggagaaaaagccactcctgaaagttgtcctctgacctccacacccaacagaaacacaaaataacaatggaaaatatatacggtggtattttctttccaggttaatggattaagctgctggatactatcttaactctttctagagaaatagcccagatgaggggtagtggagaatcttgggaggcctggtggagacacatttgcggatgtgggcaaagcaagggcttcatgtgagaactccacacaattccagggtcagagtttctgctatccatctgctgcctcttcggttccctcggtcactggcatgctgtccaaggctgtgtccatgagtgatatcaatctcctttcggactgctcagatccaaatggtgagtgaaagccgagaatggcggtccctttcgccattcctgtcatcagctgtgccagagttagctgtttggagttcagacgactgacatcatacactcctggggctcaagagagggatcttgtttgtttgttaaagagcttgcttttgagacagggcttctctgtgtcaccctggctgtcctagaacttgctctgcagatctgcctgcctctgcctctgcctccaccacctggctaacgtgaaggatcttattcaggacaccagcatctctgagactgtcctgccagtggcggaggacacggatagaaggggtctttccaggcttctccatcactagagatggaggatggttacttaaggcacatctttgtcctgaagatgacctaagcagggacgggcaagatggctctctgggcttattgggtaaaggtgccacaagtctgacaacctgagttcaatctcgggtacccacagggtggaaggagaggctcttcctgatcgccacatgcctgcccttcctctgatgtgcacacaaacaaataactgaataaagattagaagatggagtataggtagctcagtgctgagcctcggccctctctgtttaccagaacaggaaggaaccatgattggtcccagctagctcttcactttagcttgctcacaagttgttcagctgtgctctccccagaccccgccctctgtccttgctccccagtggctgccctcaggaatggcgtcacatgcacctgcagcctgggaacctgatccaggtggagggggctgggaaggcggccttaggtgcctttgtctggctttttactagactcctctcttttccttgtatgccttgcaggtaactcacctcagtcctatgtcacagacctcagcaaatggtgagtttgggggatcctgaaagcccacaacaggcctggatggaggagtgatgggtgtgggctttgtagcccgatgactccctgcttcttcaaacactgtggttcccccccccccccatgcttctgaggagaggccattttcctgagttgccgccttgttgtgcagtagcctgaagagatggggcagaaaaggagtagccaaaccctacagaatctgccggatagcagagagagatttgcttgctgttgtcagagacatatgggggagctggccattctgctgttggatggacaggggtgccacgggtgggctttggatggcagataaccggctgatggaaaatgagtctaaggagagctatttgagggctgtggaattctcagcagaggggacagggcccgaaatggagcttagaaatggagccggatgcgggacatttcaataactatgcaaataagcatgcaaaatcagcacctgttcatctggcttgtgtggctgaaaccttattcgcttagggcagccctcacactcagtgtctgtgtgggcaaaacacgggccctttaagaaccgggctctgatttgtgatcctaaaattctctagctgacacaacctcctggctccagttgggattagctcatgggatgggctgatgaaatcccaggaaattcggttctttgttggctctaggcccaggggcttgtttccaaacagcaaagggtctacacagggctcttgttctgagagggggaaatgccccctggagggccctctttccaaccactcttgatggagaacagtttgagaggaacccggccttcccatcttcagctggagaggaagcgggaggctgccttgatctgggaggagtctggagttttctcataagtagaggggcctggaaaacttgagcatcttgatccagaagagccccagaggtggggattatttccactctcctatctccgtggacacctgccatcccttcggtctgttttcttttccagcttcccttccttatctcttccctgtctctctgcagtggtaaacagctggaagaggactcggggacctgggcaggctcctccctgcgacggaccttcagcttcctcttgggcatgaccggcagggacaaggtaggagtcagcctgggaaacagaggcatagagccactatccttctcttcctccctgcccacccctccccaaagctcctgttagagactcaggccctcactgtaagatgtaccttcaaagctctgagtgtcccagtaaatcagcctttctctgttcccctcctctccagcttagcagatagctgctgcagacagctggaagagggaagggggcaggagctgagaaacgacccagggatgcctcatttaaggccacccatagctaaaaggtgggcaacagaaatcttgcccattggacataagaatgataattacagcagtgcctttcccttattcagagggtgttagacttttccaagtgcttttacactcgtaattttatgggtggatacagcaactgaggggttgaaagaggaccacaggcagagtgggagcttcaaggtgtgtgattagtgtatgtagcacatgtgtggccatgtgccttcggatgccaggaagtgaaggtgtcccaatctctcctctgtcattaccacttggccctgggaagcagggagctttggctgcagcctcaaccttccattttctttctttttagactctttgctgttttgaaacaaggtctccctctgtagctcagactcccctggaactcactatgatgtaacccagctagcggcctcagctgtgcctctcctcctggctcagcctccagagtgctgaaagtccagattctaccaatgagacatcacacttggccttattcattcatttgattgtttgtttgtttgttgtttttgagatatggtttcacatagctcaggctacccttaaattatggagttgaagatgaccttgaactcttgattcttctgtttctatctcaagtgctaggattcctggcatgcaccaccacacctagcaatggtggcctcttctctcccttctctccctcccttccttctctccctccccccttcctgatttcctcccttcctccctcccttnnnnnnnnnnnnnnnnnnnncctccctccctccctccctcccttcccttcccttcttcccttctccccttctttcttcttctggcaatgacttcccagcctggttgaccatcctgccccaagcattctgagcactggggctgcaggctccacttactgcaacacaaaaagccactctcctttccctctggtatgcatgtggtttccaccctaaggttacctctgagcaccgagagaaacctggaggagacaccattctattcatctggcagaatcatggggactcctgagtcaggttgttgcaagtgcaaaggcagggcccttctggaggccagactccgaaggccggcaggattccttccctataggtgggcagggaagggaaaggtgtaagcagatccattgctgggactctttgcagagagggagttggagctgatggagacatgtggcatacacatcacaatcttaaaacccctggatatgggggaggcagacagggtcaggaatcagactgctagaagacaaagcaagcaggaagcccttaggagccaagtctccctccccgcaggacacaggctctgtcacactgcatttgctcacccttggcctagcagccctgcaggagattgagtaacctgaagaaggggaacctgggtagaggctccggagcatggagagggaacaagaagagcgagccgagcgtaggtcagcatattgtcctgctccttggcctgtgttcacagggcctctaggcccgactgtctctgtatctctccctctgtcttctctatacccttacttgaatgtgtgtgcctacatcatgttccctttctccctgttcccagcttgggtaccagtgctgcacactgctagggatggagaggaggagggagcttggttctccctgcttgactgacatcctataggtggccaaactcctagtgctcatcttgtacttcttagaatagctccggcagagataagggatggtgatacattaatcaccatttcacagacaagataacctagaggctgggctacttagaggtgtagcaatcatgttaagtggcgggtgtctctctcagtaaaccccaaagcctttcttcacagctcttgctaggaagccactgtggtcatgtacaccttagacattcccaagtcaagttcaaggctcaagttaatcagaagaaggctgatttgtggactgtgtgtgcctggatctagacagctaggaacactcttggttcctccgatggccctttggaaaccagacccttcccctctagttgtctatggcaatggtacttcctcccccccccccttttcaagttgaatgagccaaagaaagtactggctacttttagatactggcagaggtttttaaattttttttatatattaaaaacaatttctcaaagatgtcactggtaggattacaggggtgggggctagaatgaaggggtttggggaaagggaagacccccagaagaaaggagaatgttcattgttccagaggctccagagaacagaaatggagtcaagctgaagacatagagcactcaatacagttttaaaggtttggttttgcagggcagacaagggagaggtgagcaggtggagcagacagcgagctgaggctggggaaacacagtaaaaggctagaggaggaggtcaccctcttcttccatagaccttccacatgggctttacgtactgaccagaccctcaaaagagtctgggggaaacctagatttactagttactcaagagtttggcttataacaatttctagttcaggccttagagaaaattgaggtctctgccccccccccccccccaaaccaggcagctcattctgacctctagctgattgttagtacatttctcagctttggctggtcactcaagcggggcaagtctggaggctcagagccaataggaacatggcaggtcctgaggccttcctaggattccttcagagaaaacagaattggtctgggaaagtcctttctgcctcatctggccagcctgaactggacattgtttctttttccctggcctttactatataaggaccctgaacaggagaatgggcacaaaaggtgagggagttcctaggcaggagataggtcagaggagcagagtgggaggggagcagagccggggtgaggagctgaggagcccaaccagcacagcgggtggatgaggcagccgagcccaaattagagactgaggctaaaattggcactctaggagtgcagggctgggctggaaacctgcagccctaacaccaccctccctgccccgctaccgagaagaacagagcagaagctggtgacagtggctgggcctcatctccctccctctttcttttttctttctttcttttttttttcggtgttttgagacagggtttctctgtgtagccctggctgtcctggaactcactctgtagaccaggctggccttgaactcagaaatctccctgcctctgtgcaacaccacgcctagccatctccctccctcattaccacacacttttgggactagattaggtagtaccctaaatttttacaaaactttgccccagggtgctcaggtttttacagagaaatcggagaccttgataggtggaaacggagcagactggagaatttccccagtggcaggaaactcaggttgactcaaagggtccagagaaatgaaaacccacccacactcctcagcaagctcaaacgtttccagacagggccaagttgtttctatagtctcctgtggcagagaaaactggtgtcaggacacaaggaaggatttcctcagctagcctcaggaaaggtggagccttctcaccttcactgccaaagtaattggcagaggtggggctgagaaggatggtcagagtgtggtccacaaggcccagaggggtgagaagctgggcggggggcggggggagtgaggggaaaaccctctcttgtggactcctagcttttggaaaggagtccccttcttcactcttttgggggagtgaagcctgttaacgatgaagcttctagttcccctttcattgccccctccctcttgtcataccagtccaacattgtaaaagcggtctgtgtactcaagcctgtttgatgagtgagcccttatggctaggtctcccagttaccgataaggtgatagaatccccttagggtctttaaagagtgaagttacccggaatgggcgccggtgtttttcaaggacagccgagctaagggaggtcgctgaggtcagagagtgttcctaagcgctaaagggaaaagggatcctcgaacctgtcccaaggacccctgtccagcagactgcagcgatactaaccccggcgtcccgtccggtgcgcgggtaccccgccctgcctccgctccgcctctccccttcctgagctcgggtgggggaggagactagggtttgaggaactggtgctgggtgcaggggcgaggggactcagacttcctgtccccgaggccgacgcgtgcggccggacccctcccccgccgttgctggacacccggggccgccgcgtcctcccgcggctcacgctggattatgtctcggatcgaatccctcactcgcgcgcggatcgaccggagcaaggagcaggcaaccaaggtgggctggctctgcgaccgggcgccctgccgacctctgggcctccgccccgcgtcccgcgtccccccgcccgctctggggcgcccgagtccgcgcgcagcggccggacggggtgggtggggctgcgagcgcgtgaggagggggctggaggaccgcaacgtgacccgcgtctccagcacccgcgcagcttctgtgcggggatctaggagagctgagctgggttaccagtggttcggcgggaccgagtgttttgggccgctcggaagaaagttgctccggtaagggatcgagcgggaaagaggggcgagcgtgtcgggttcctagggacgacgctcttgggcacccctttccgcaccccagttccgggggttgcttgcggccgtgccccctagcgccggctcggtcgttccccctttgtccccaccagcgggtggagggggccggagggggtgttttccaagctccctcccccaccttcccgcccctccaagacaaaagtcagctcctcctcttcttgcggatggactttccagctgtgattcagttcttgcctggggtaggcgggtggctaggggtcaagacagcaagcggccgcccattttctccgccaggccaaaccgatccatcaggtgaagcaagctgcctttgtgtcgctgggatgccttctcacatcctgagcgtctcggtgccaggacccagagtagttcccacccttatctgtttcatcagcttccaggctcctggttctccagccgcctcggttaacccagttcccccactcccctcagccatatttcgattatcgcctcggcttgggggcccttcacctgtcatctggagtctggctgtgtaattatcagcacactctgcaatacgacctctccagcacgcctttacaagtgtcctttattcctgtctttgtattcagacgccctcccaaatgccatgactttcctcacctcagctcacaggaagtggtgaagccgaggaggacttgtagatgaataagtgaagccaggggggcctggttcaggcggacggcgcctccctgtacctcaggacactcacattataaggctctctcggaaagcaaaggcaggaagggctttaatcttaatccctgtccttagcgagagcgtaatgaccctcccgcagccagccaaccaagcagatcattttcaggctggaaagccactctgcgaatggaaagctgccctctcccttcctccaaggttccaggctttagctacttgctttactgctacactgggagaaggtcggtaggggtggagagcctcgggggcgggaagctcagtttgaggctttttgtagggtttcgggatgggagtctgctcaccggaagaaagctagcagggctctgagcagctccagggtgaggtgactgagtgtgaattgtggggtggcagacaggctcttaacaaaccctagcgacaggccaggccccagctcccagagtctgtttattttttcaaccgtttgagcgagaccctggagtaaagccagggtgggtggggggaactttttgaaagcacggaaatttggttccaccctaaaaaggaaagccactgggggggggggggcaggagaggcagacctgtggggctgtacgaagacatcctcagggggcctttctccaatccagacacctggcatctcatcccctgtttttctttttttctttttccataacacagtaactggaaatccagactcctggcttttttatcttttgactatgctatggagaagggatcagggaatctgactggtctcccagagaccagtgagtggttctgagagggtagagagaccaggggaaggagggaggttgtcagtttgagctggtcggaaggggagggacacctccggaaagctgtggttactgaagtgggggagttggttcctagccacgaaccctggatctcccccccccccccccagcgcaccagctgtctcctttctttttatactgtgctgggaagtcgaggggcccactggaaatgagattatttgaggaacgtggtcttccccgatacctacgagggagggagaaaggtcaaccctgagatccgctgccctcccccacctctttccttactttgagatatcttctcagagggaagaattcaagtgtaacctgcccctttctccttcccggcataggatcggcataggatcgctccttccgcccctccacgcttgcttcccttttctctgcattgtttctgttcttccaggctgtcttctgttctccgccccctcagttctctctgccctacttcctacctcctcaagcctcaaagctgctctttccatctttaggcccccttatctctccaccctactttcctgagccctaaccgtcttggcccacagaacaaagccaggagcaccatgggtcttcctgaaccctgtatgtgatggggagcggggagagcgggctgcctttgttctgagttccagagaggtggctggctttgtttgcagggccaggagggcagggctgggggggagccctggagggaaagaagaatcctgacagtttgggagactggaggagttgggtcctcgaggaagctgaagtctggaggccatccaaaaagcttgtaggggtcatgggtgttcagcaaagcacttggtgaggagaaagcggcaaagctgggcccagggagctaagacttagagaggtcacctagggactgcaagatagctggcagcacctaaaacacccaggggcaccagaggaggtgaaggagggtctggtttctggtaccaaaactgtgaccttctatcagggagggcacagatcaaactgtgattcccaagtattgtcccatgcttcttgtattgggggtgtgtctctccgtcatagatgctcaggggtgatctttgaaaattcgtgcttaccaagctgagtggacataaggaagtagttcccattttaaagtttagcctctgtgttgatgtaggatgtaggttttgagtgaattaattggtcgtggtggtttctggagctggtggagaaatggctgagaagtgctggctggacccttctgggtttgtttgtgtctccttagggaggtgggggcagggctgcaggctgcagctaccccctcccaactcagctggcctgccttgtgccaggagggcagggagtctggcacagctattgtttgcctgcacaaatgcccgtctgtctgcgtttttcttgccttctctctcttggcccgacaggtgtggctgggtggggagcaggctggggtccagggaaactgggtctcagagtctctatctagctggattttattgcttatgacttaagtgcccttctcccacatcaccaggatgctgcccagtcccctgtccagtggtttaccatccttcattaagcagaggttttctaagtgcctttgtgtattccgtgatggccttctcttttgtttctgtctggggctttactgtctgcatctggctaccttctctcagcgtccagtctccccgtttccttctctggagtgtttgaaggagcagggcctcgaatagaccatccaaagtcgtcctcctggactcgcatcaggaatcttctctctcctcgctctccagctcatagatttccccttgtggaattgaaaccaagtttgcaagctctgcactgctcaacaacagcccttcttccccttcacaaccagtgaccctgagtctcagctgtccagggtggagccacgggcatttagtcccagtgggctccttcaagagtctgaaggaagaggctgaggccactctctcacagtcagtggtgattgtgaacaccacacagatctcccagaggccctggtgtggagagaggagggaggtgagaactgggagagcagcactgactcaccctgaggagcccgggaagccagagcctgggtttgcctttctgtgaatcattgttttctcttagcctagggcacaagatggggagaacttgtctccccacagtggccaagacttggtgtgaaaatggaaggaggttttgagttaacattctgaccccccccaggggaggactcagtcagagggagtaggagatctggcttgggagtgctccaggaagagggaaaggaaggactggaaagggcacagaagttcctatggttctcacaggcagtaaagggtgtccctagagcaggggtactacaggagaccctgtctttccttccttttcttctttcttttttttttttttaagatttatttattttacatatgtgagtacaatgtcactgtcttcagacacaccagatgagggcatcagatctcattacagatggttgtgagccagccaccatatggttgctgggacttgaactcaggacctctggaagagcagtcagtgctctcgaccgctgagccatctctccagccccattccttgcttttttacctcccttccccagcacacactgggtgcccgctgtacatgggtgaggcttttgggtttcaggaggaaagttaccttgaactcctgatccttctgcccctcatctcgccaagtgctggcgctacaggagcgtgccaaaacacctaagcttgttccgtttgatagtcaggtaaccccacgtgtaacattagcctggacagtgcccgtgagcaggcaagacttccgagatctttgaagaagaagcaagaagacatccagagctggacagcagagggttgggtcaagcagaaagggccctgagccctaaggtggatgtttggactgaggaatgactggtctttcttgcccctgtggtgctaggattaaatccagtgcttcatatctattagacccttgaaccctgagcaacatcccctgccctttttagacatattcttttaagatagtgtcttgctaagtagcccaggttggctttgaactgaccatgctcctacctcagccttcccagtgtctgggcttcctggggtgtacaccatccctagctacgattgcttcttctcctggacatactgtgacatggaggaggtgaagagctgttctgcgtgctgtgtgtaaacgggagacagtgaatcaatccagccaaacccccaccccccagtaagcagttcccatgttagtccattctccacagcttgagccctggggcgggctcagtccagctatctctgggacaatagtgctaggccgtgccagggccggatcgctggtgctgggatgtgctgttgctgctgcggctgctgccctctgcttgcccacctagagcaggggtcacttggagagagggtgagttttggttaggtggaaggcaaggactagagaagctgggtctgtgtgggcagtggtgcaaggagggaaagggctatcagagccctttctggtcccagtctcttggccactcccaacagaattgtccaggcaggtagtacagagagctgtgcggtaggaacctatcacagctttagaatatgtctgcaggcacactgttctttctggagtggcccttgccaggcgcggtgttctggtgtctgctagtctccttttacttacttgtttgtttttatttaaatttgtcataaatattcatactctagattggtgtcctagagaagcgtgggagggcagagaggtgaagagagagagagagggagagagagagagcatgtggcaagagatatttaggcttggcctttgaagtccaaggaggtgaatttgaggtgactttgatcttaaaaaacaaaaacaaaaacaaacaattaaagagttcccacaaggcagctggagtgccaagcagtgggagactttcctattgattcaggtaggtaggagccactagagcagggaatgctgaaatggcccatactagagtctgcaggaggagtgtccctcagaggaggagccagccgcagggacagggagggaggaccatcccttagagaagtagatgcatggctgagagagacggtgcagtgtatggaggagtgtctgcagcaagagcggggacaggagagaggaccaagataaggagagaagagagcaggccagataaaaagaagagccctgacttgcacgcctgcaagtcctgaactttggtgactgaggcaggaggattacctttagttcaaggctagacagggcttcatagtgagaccctgactcaaaacaaaataaatcaaaaagttaccaaatgaaaccccaacagtatagttaggggagaaaggaaaaatgtatggcggaggtggtaaagtgaaggggggacataaggaggtgatctctgtctagaccactgggctccatcatcctcaggccaccccaaggcccagggctctctggtccattgctctttggccaccccaaggcccagggctctgtggtccactgctctccagcccctggacagttgactcagcacctttctgcttccccttttcccatcctcccctctaactgccagcatggttagtggcgtaggcaggactgctcatccaggcccaggctgaatgcttttcactgaattgtgactttttgtcctagggtcccagccagtgtcctcaacttggggctcctactctcagccccagtcacctgaatgatgtccttgtctcctaacattttttcccccttagagataaggtttctctgtgcagctctggctttcctctcctggaacttactatgtagaccaggctgccctcgaagtctgagatttgcgagactctgccacccaaatgctagttttttttttttttaaagatttatttattgttatatgtaagtacactgtagctgttttcagacagaccagagaacagagaagggtgtcagatctcattacagatggttgtgagccaccatgtggttgctgggatttgaactcaggacctttggaaaagcagtcagtgctcctaaccgccgagccgtctctccagccccaaatgctaggtttaaagacgagcttcactcctgcctggcttgtcctctaacatctttaattaattaacttaactaattactttagatacagggtctcactgtgacattctgactggcttggaatttgctacgtaggctagtgtggcctcagactcagagatcggcctgcctctcctccccagtgctgggattaaagccgtgccccactgttccatttatcctgccttttctgacttattggttccgtgccatggtttggacgtgggtgtcagtttgttcttctgccgtgtgggacctgggaatcgaccagggtcatcgggtgcctttgcttttcttttaagctgtcttctaacctgtttgttttgtgttgtgttttgtttttgatcgtagtggtggtgttttgagatagggcctcatatcactatatagccaaggatgtccttgaactcccaagcttcctgcctccacctcagtgctgtttgtgcatgagtgtgtgcgcatgcacatacacgttgttgttgttgttgttgttgttttgagacagttgttcagtagcccaggcttgctgcaatagtcttagtcttcctgtcttagtcaggagttaacaggcatgggctaccacagctgacattgtcttttcaccttttctggctcttggagcttggggaggaacagtaaagaagtcaaggactctgacagaagctggaggaggtaggggaagcttaaaggcaaaggtaaacatagacctcggggtaagaaggtactcaagagtgctgcaggcctagcgctgtgatctggagttcacagggtttcttgggtactgagcccccacctctgtacgtacacacacacacacacacacacacacacacacacacacacactctgctagtgagggatctcttttgggctttgactgagtgtaagtagaagagttagagggttcggatcctggcctctgagttgatggtgtctgaagaggcatcctggcccccacccccagccaatctaataggggaatctcctgctttgccatccctgctcccccatgactgctctgaagacagcagctccaacacccgttgtcatggttatgagaggagctaactcccatagattggaaagcgctggtgagctggcaccctctgcttcactggtcctcccctctctctgcgcatcttcccccggcacagagaaatcgtacagcagcccgggggcgagcagagctaaggctggaaggtggagtgaggacgcagagctctagagctagggagatgagtgggaacaggaggcagcccagtcgccggggtcaggtaggtcagaggcctcgaagcctcagggactgactacccagggcctggtcatgcctggacagccacctcggacacccgtgcatagtgggttatgctttagcaattgctgtcacttcagcctctctaggcaggcatttctcccatgcctctgctgtttatctggacgccaggtacctgactgagtgtcttctgacctcacttctgtctctcaatctttccacagacccgggaaaaggagaagatgaaggaagctaaagatgcccgctataccaacggccacctcttcaccaccatctccgtctccggcatgaccatgtgctatgcctgtaacaagagcatcacagccaaggaagccctcatttgtcctagtaagtttttggtcccaaaggtgacctagcctcagttgccatcgacctctagttctcccgtccgtctgtccttcccaccctggatcctttaaaggactctattttccggatcccagccgggctcaagtgtcatgctcaggtgcttggtctcctgccacccttgcccacactgggtggtggctattggaatgtggcgtaagctggttggtctcttgggtgtggggtgacagaggctgttgttactctccatgcagctgtcgctggcttgggtatccccctcgcctcttgaacagctgctgacagttcggagaactgcctggagaatgagcaggaatgtgtgttataatgcagggtgggagaggagtagggagcggagggaagctgccagcctgcagctgcctctgcccatctccctggacagcttagacgcgaggactccttgcccctgcctttctgttgcatgtgagggaaaagaagtctgcagattcaaggacaggctgggattatccatttctttatccctgataaagaaattcagcagagacctgaatgatggagggaagggctcaaaactcctaatcttgcccatgtctaacctttatcctgccccaggaaggagacagaggaattccgacctccttaggataccattgcagagggctctagctccgccctgccccacccccacccccacccccatccccatgccttccctggagtagactcgagtgttgtaccttgatactgaccaacacaactccactctagcctcctaatccctttgggatgttggaaaggaatcccagatagaaccagggaggcctacccccctcaaaaagaaccagagaggcctgccccccccacttctttaccacttgatctagagccaaaaggatgaggaggtaaccccaatctagatccctctagagacctggcaaaatactcaatccggaagcttgttgccaggggaactggggaggtgggtagcactattttgagagcaggtggaaagcgggggctcgattcagagacactaggtgttgtgggtaggggaagggagctccagggggtgggcactgccacagcctggcttctgtcggccccttctgccccaccctgtgtgccttgtatttgtggaagtgagcgtggtgttgggcattgtctgcctgagttagcagagtttcctgtggtgtttgggggtggggtggggggagctgtagagctgagggcctgtcaggaagggaacagccatggtcccgagtgcaggctcagctagttcagctactcctttttcctttcctacttgatggagaggtggggtgggggatggggggaagcagatggagtgtgggagctgtagtttgccttactggggaacagaacttcccaggcctacaagagaaaaggcccccagaatggagttaatgcagaaggctgccaagatgggaaagggaagggccactggtccagactttgaagcagtaggcaggagcctctggcatatccatggaggagtatggattttagatctgagcacatctaagtgtagctgggtgacctaggtaagcaagcagcgttcagagcggattcttcatctgtgaagtgagtggggagctttcctcggagaccactgtgagttctggctctctgtcagcttctggtcttgggagcccccgtgatcatctgcagtgtcatctcctttgtgctctttgctcttcccaagcagcagacacacctttcttccctctggtcctccgggctgtagtatttcccaacctcctggatggtccacaccagacccctctcacttcagtacctgcttgaaggaaggggggaggacacacatgtgataatgaccaacaactctgggagagtgtctacaagctatatggcctggggagttgggtgtttacatgtgggtgtgtcacccctagtaccaccccagccctcccttaccctctctacccccaccctgccagcatgtaacgtgaccatccacaaccgctgtaaagacaccctggccaactgtaccaaggtcaagcagaaggtgagctagatggcagggtgggcagagggcttgcggggagggcatcgccatccctgcgggcctttccacacatccctcaccctctgtccctctccttgccgtggggcatcccagaccctcggcctgtgtaaacacagccctgccacactagtttacctatatcccgatgtccttaactgcggggtcaactttctcccaagagggcggatgccaggatctggcttgttctgggtgtgtggcagggcagtctttgggtgacagctgtttgtggtgtctctcttctgctctgtgtcacagcaacagaaagctgcactgctgaggaacaacactgctttgcagtctgtctcccttcgaagtaagagtgagttcacagggccaccaagccactgagcccacgggctctgctgcccccctgaggtcacacccagacacacaaagctccttttggaagtgccttgggagggagtgccataaaggatggtccttattctggggcttagtatgtagacaggctagtccacatagggatgagggacaaggatggcaggttactcgagccttgccacatgctgttacctatacttcatttggggactgagtgtccactgtcagttcaggaaagcgtgatgcccaggttccttctccccagcttggatcactgcagacaggtctcacatttccagccttcagtttgcttataggcttggctgggttggggtgggggtgggaagaacatataagaacaggctcttaattcatggtggtggcttgcacagtggacagtagcattaccttgatgggccttgccaattttctttgcctcttagggagctgaggacaggccagacagttccccatggctccccgtgaggagcctgggagagcaaagagccagggaattaagctttctcctgcttggcctccttccttacagcgaccaccagagagcggccaacgtctgccatttacccttccgacagcttccggcagtccctcctgggttctcggcggggcctctcctccttatctttggccaaaagtgtttccactaccaacattgctgggtgagcttctgtttggggcagagggggcctggcaggagagagtatagcccatgagagcgctgtgtcttcccctgagttcagagctggagacagatacgagaaagataagttccagcacagaatagctatccctaggagcccaagcttgggtcccaacctgggaagggacctcctgcccgagttggggtgatgcagatggcctccacttccttcagacatttcaatgatgagtctcctctggggctgcgtcagatcctctcccagtccacagactccctcaacatgcggaaccgaaccctgtccgtggaatcccttattgatgaaggtgagcagacccggccctggggagaatcgtgttggcaagacggtggtgtgagaagcctgggatgggaaggaagaggatgtagggatgggagagctaggctctgaggtgccagcggcactgatgcacacgcaggtgtagaagtgttctacaatgagctgatgagcgactttgagatggatgagaaggactttgaggcggattcttggagccttgccgtggacagcagcttcctgcagcagcacaaaaaggaagtgatgaagaagcaagatgtcatctatggtatgctaaggccactttggttcccctgcacctgtcttttaatccaggctttgcttacctgagtcttctccctgccacctacctgttgggacaccctcatcccatccttggcctccatgtccccagctagtaccaacttgttccctgtacacctacttcttggtgccgttggcaattttgttttttttgttttgttttgttttgtttttgttttcggtttttcgagacagggtttctctgtgtagccctggctgtcctggaactcactttgtagaccaggctagcctcgaactcagaaatccgcctgcctctgccttccaagtgctgggattaaaagcgtgcgccaccaccgcccagcactgttgacaattttgtaattttatatttaagagattagagtctcagcatgtaggccaggctggtctcaaactctcggtcctcctgcctcagcctccggagttctgagattttgagtacataccactgcacccagctcccaatgctctactcatatctcttgctcaagtcagtcctcggtcttcatcctgcctctcccatggccaacactgttccgggaactgggaagcctacacctctaacacacagaactcttgccctgaaagagtgtactgcttgaaatgacaaggaagtggtctgagacgacagccacacaagcgttaacttggaagagatccacataagaatcccatgagttgtgcccgaggtagagtacggcaggaacaaatgtccctttgtcccgtagagctgatccagacagagctgcaccacgtgagaaccttgaagattatgacccgcctctttcgcactgggatgctggaagagttgcagatggagccagaagtggtccagggcctgttcccctgcgtggatgaactcagtgacattcacacacgtttccttaatcagcttctggaacggcggcgccaggctctatgtccaggcagcacccggaactttgtcatccatcgtttgggtgacttgctcatcagtcaggtaggagaagacacacttgagcccgttcatgaatgcgtgtgagcgtgtggaggtcaggaggcagtcctgggagttggttcttccccatcatgtgagtcccaggatttgaattcaggttgcaaggcttgctagtaagggccatcttactggcctaggactaaacagttcttagctccagccaaactctggtgatcggaagggaagccaagcaggggacaactggagaggaggaagcagcctaactgaaggccagaggtgtgctgagggctgaggtgcggctctgtaggaaatgctcacctagtcttgctctcccgacttccagttctcaggttccaatgctgagcagatgcgcaagacctactcagagttctgcagccgccacaccaaggccttaaagctctataaggagctgtatgctcgagacaaacgcttccaacagttcatccgggtgagcaaggacctccaaggccaagcccagccttctcacggctcaaacccaaactctcccatccccagggtagcgtatgggagctgtgtgcttatacagggcagcccctcgagactcttgtggactgcgctcctagatctcttgtttgttgagacatggcctctctatgctgccctggctgtcatggaactcactatatagatgtggctggcctcaaaactcaaaacctgccttcctgtactgctattaaaggcatgtgacactacacccagcttactcttagatcaacggccaccccttactgggcaagaggatgttggtctagttttcataccatcattggtttgctcgtcaccacagatctgtggcattctcttactcatttcccagaagctgtgcctaggccaacatggggcggatgccagggtgggccagcttcagagcctgggctccagcctttctgtccccttagtctttcatcttcccttacagaaaatgacccgctcagctgtgttgaagcggcatggagttcaggaatgcattctcctggtgactcagcggatcaccaaataccctgtgctcatcaacagaatcctgcagaattcccacggtgaggaagagcatgggggcggggcctgcctggggatatccaggggcctcagaagggttggtggggagcggtgagcagtctcgggtagacttgggtttgggtggcattggttgaactctctctcatgctggaccaggggttgaagaagagtaccaagacttggcgtcagccctaggactagtgaaggagttgttgtccaatgtggaccaggatgtgcacgagctggagaaagaggcccgcctgcaggagatttacaaccgaatggatccccgggctcagacccccgtacctggcaagggccccttcggccgagatgaacttttacggagaaaacttatccatgaaggctgcctgctctggaagacagccacaggccgcttcaaaggtcagtggtgctcccagtggacatcagagttagatattctgtgtgagctgcagtcacccttagggactatttttacagcctttggccttgcaaggggaagagtcagaggcaaaacccattgctgcagaggtgcaaactccggccagaatcccaacaaaaatgcatcttggagacccagagtgagaattgaacaccgggaaggactgagaggctggagaagagcgactgggcttcagggctgtgttggggtggggggcagggggtgtcagagtgcactatcccaggctcacctttcagaatttatctgcagttaaagtccttgcccctaaatcaggacaggaaaatagcacctctaaacctcagtgttagcggtgaaggatggggggtaggggggtacctgaagccagagctcaatcggaatcgcatctatgctgtgaaattcctacccctagggcctgagtcctgtaagtccttactaggctctctcctccatccctctctctccttcccatccctcccacgcagcagctaagaatataaagcattgaggggtaaaaatagcaaggctggagagctcggtttctcagcgattagcgaaagccctccccttctgtgtccacagtttagtaaaaatccccacaggcaaagggtggctgtgtgttcttgactgtggcattcaggtcttaaagaattggtctttggttcctcccttcctctaagtgcaggaaccatgacagcctgagagcccggagggtggagcaagagagagcagctgaagcagggctggctggggtgggagacgagattagtcagaggtcaggttgacggtggccttcggtctgctctccttcaaggaaacttactttgtcctctctctctcacaaaaagacaggagtatgtcagaatatctaaaaaggtgcttgcactagtcaggtgccagacacagaacttaaaggcaaagaacacaacctgccttgttctggaaatcctacgacttagaaaaatcttggatcaaccgagtccggcttgtacttgcttgtacttcagccacccaagagctgaggctgaagaccctagtctaggaagcccgagttgagctggagagagagatggctcagtggttaggagtacttgcttttttttgcagaggctctgggttcagttctcagcacccacgtggcagcttacagtttacagccgtgtaactccagttccaggggatccagtgccctctttcagcatctgtggggattacatgcctgtggcacgcatgcagtcaaaaacacgtatacatacaaaataaacttcaaagaatcagaattggctgatttagatttttttttattattgttggttttgtttatttttttcttttttctttttttttttttaaagatttacttatttattatatgtaagtacactatagctgtcttcagacactccagaagagggcgtcagatcttgttacagatggttgtgagccaccatgtggttgctgggatttgaactctggaccttcggaagaacagtcgagtgctcttacccactgagccatctcaccagccctcttttnnnnnnnnnnnnnnnnnnnncaaaaacacgtatacatacaaaataaacttcaaagaatcagaattggctgatttagatttttttttattattgttggttttgtttaattttttttcttattctttttagacaatattttgctatgtagcccttggcaggcctagaacttgatttgtaaaccagtctgcctttatcttgtgagtgctgggaccaccacacttgactaaactagatgattaaaatccaaaaaaaaaaaaaaaaaaaaaaaatctgaagcaggtgaggcaagagttcctttgtgctccttgctggcccaggcggctgttttgtctggtagcatgggcaactctctcttcccctctattttcgtgttgtatgaatgaggaggttgaaccaggcagtggtagccacacttgggaggcagaggcaggcagatctctgagttggaggccagcttggtctacagattgagttccaggacagccaggaaaacttgtcttgaaacaatgaaaaagaaaaaagaatggtgaggttggaggtcaggaaaagatgaaggatgcagtgggagggaagagagacctgtgggggagacagggggacggagtctgagaagatgcgcctggtcctcggaagagggggcaaacagttgctttgagcctgtggttctgaccattttcccactcggtgtcttggccagatgtcctgttgctgctgatgacagatgtgctcgtgtttctccaggaaaaggaccagaaatacattttcacgtctctggtgagccttcttctgctcttttttttttttttttttttttaaaagattgatttatttatgtatatgagtacacactgtagttgtacagatagttgtgaacgttcatatggttgttgggaattgaatttaggacctctgctccctctggttggccgggcggtttgtgaaccaccatgtggtttctgggatttgaactcaggacctttgaaagcacagtcagtcctcttacccgctgagccatctcaccagcccctcttctgttctcttatcccttgcttttcttaccaagcccaagaaagtcttactgagtcaaatgcctattatagctcttaattctatatcataaaaagtaagatagtgggctggtgagatggctcagtggttaagagcgctgactgctcttccaaaggtccagaattcaaatcccagcaaccacatggtggctcacaaccatccgtaacgagatctgacgccctcttctggtgtgtctgaagacaattacagtgtactcacatataataaataaataaataaatcttaaaaaaaaaaaaaaagtaagatagtcagggctatacagagaaactctacctcgaaaaaccaaaccaaaccaacaacaacaacaaaagtaaagcaggcacaggcttatatctccagtgctgagaaagcagattctgagggttagaactctgaggctgtttggggctttgtagtgagttcaacaccagtttaggttacatagagagacccaggagagacagagacagaaaagagagagagagactgtgcatcgagggactcgtgcacatctaaatggtcctggctggttccgatgcttgggctcttgcctgtattgcatcaccgtcaatccttttggttttctaggacggaaaacccagatattaacggttaggattcctcagcctaattcttcctttcccctcacaggacaagccctcagtggtgtccttgcagaacctcatcgtaagagacatagccaaccaggcgaaagggatgtttctgattagttctggaccgcctgagatgtatgaggtgcatgcagcgtcccgagacgaccggactacctggatccgtgtcatccagcagagtgtgcgcctgtgagtgtgtacctgtgtgtacatatggcttcaggtcctagtcggcatatttcctgggaactgagctcatcaggagaggttggggcagaagctggggatagactagatgagtcaagacagaaagttcacatgaaaagttctaatttatatccagataacccggctacccctccaggatggtggtggcagacctgtcagccgtgacacagtgccagccacacatatatcactggcaaataggaccagcttgagctgaggtcctttctcaaaaactacaacaggcctggcagcgcatgcctttaatttcagcacgtgggaggcagaggcaggtggatctcttgagtttgaagccagcctaggctacagactaggtagtcaggactacaggagaaaccctgtctggaaaacccaaaccaaaacaaaaacctccagcacagttagttagtgctgtaactcaaatgtcagagctcctgcctagtgttctggacacctgggtccctccctggcaccacctaagtcagcagcaatccgcagaagagcagaagtcaaaaacaaggacaaagaagttgacaaaatggctctcctggcagagcgatcagagctagagatggacgcaggcttctcataacctttataagcctgaatggtaagtgtgagatgaggattagtgcaaagagtgacgaaggccactgaagggatgagaggagggtcctgtagaacatgtgcagaggagagaagctgatcgatcgctggtgtcttccacacacccaacctgcctgttgctctgtaggtgcccgtccagggaggactttcctctgatcgagacagaggataaggcgtatctccggaggatcaagagtaagttcccatccagggagtgggttgatttacaccatatcctcgcaaaataccgtgctgctctcagaaagatgagaggtgctgaagaggtggctcacctcttgtttgtaccaaatttcaaccaggttgaaagcgctggtttctccttcggaaggctcaggtgtgattctcagcaccaacttggtgactcacaattgtctgtaactccagtgtagtggctctctaatggccttggtcacctcagtcaccccaggcacatgcgtgatgcccacacctacgtgcaggcaaaactctcataatgaaagcttcaggtgggctgatagaggtctatcccaaaataaattgttaaatgaaaaaagccaggtttaaaacaatgtgaagtgtatgctaccattttgtaagtttagggtaaataggtgtgtgtgtgtgtgtgtgtgtgtgtgtgtgtgtgtgtgtgtttaaaatagagtagtatctctatgtcccaagggcatctaatgccctcttgtggcctctgagggcattgcctgcatatgtttcacagatgtacatggtacatagacatacatacatgtgggcaaaacacccatatgattcaaaataaaggttaactctgggcttggtggcccacgattttaatcccagcacttgagaggcagaggcagaaggacctctgtgagttcaaggccaacatgatctgcaaatctagtttcaggacagccagtgctgctacacatagagaaaccctgtctcaaaaaacaaacaaatattttctttaaaaaagattttatttatttatttattatatgtaagtacactgtagctgtcttcagatctcattaaggatggttgtgagccaccatgtggttgctgggatttgaactcaggacctctggaagagtgtcagtgctcttaaccgctgagccatctcaccagcccccaaacaaatattttttaaaggttaaataattttaaataaattagttttttaatgagagcagactgcagtggtgtacacttgtaatgccagcatttgggacccatagtgataggatcaggcattcaaggctgtcttaattccttttatattgctgtgataagacaccgtgaccaaagccactcaaagaaggaaggacttcatttgggtttacagtttcagggggttagggttcataatagtgggaacagcaggtggcagacgggaccctggaacagctgagaaagtctgagttgtttgagacccccaaagcccgcccccagtgacatacttcctccagcaaggccccacctcctagtcctccccagccacccactaggtactaagtattcaaatgcctgtgccttatggaaaacatcttgttccaaataccacagaggatagctagcctcaactatgtaaggagtttgaagccagcctcagctacacaagactttgtctcaaaaacaaaaacaaaaaaaagagtccaaaggccataatagctgtgtctgactgcaagttactccgctcactcaagtgagcagccctgtaagtgctctaatggaaggaacacggagagaatgaggtggctaacccaaacccttattcatccttttttttttttttaagatttatttacttttagtttatctactttggtgttttgcctgcatgtgtgtttcaaggtgccagatcccctggaattggagctatatggacacttgtgagcaaccatgtggttgctggaaattgaaccgaggttctctggaaaagcagccaatgttcttaaccactgagccaaaactccagcccctgttcatagatttttagaaacaaaagtaatgtttgatttacaccacacacacaagattttttgttttggggaatgcttcaagcccaaaattaagttctgtccctctgctgaccctgggtatccctctgctaccctgggctacccctctgctgaccctgagctatccctctgctgaccctgggctacctctctgctgaccctggcctgcccctctgctgaccatggccggcccttcacaagctctttgggtccttccacactcaacctgttcctatccgcagcgaaactgcagcagaaaaaccaggcgctagtggagctgctacagaagaatgttgagctgtttgccgagatggtccacttccaggccttaaaggctggcttcgttggaatgcccccacccgccctgcccaggggccttttccgtcttgagtcctttgagtccctccgaggcgagcgcctgctaaaggatgccctccgtgaaggtgagggctgctgaagagtctaggctgttcactcagcaccacaacccataaaggagttgggtttgttctggtctaactcctgggaaggaaaggggccgagatctgagcttgctgtcggatgcgtctccctcgggcaggctgagatgactcttgaacatttttgatgtcccttggatgccacatggctgactgaagccccactacccaaatgtgaaccccctaaatacttggatggtgtgtgttgggtggacccccactggttttgtctcctgtccccacctcctcctctttcccttcagtggaaggcctgaaagacctgctgttgggcccatgtgtggacctgcctatgacatcccgagaaccagccttacccttggactctgacagcggtagctgtcctggggtcactgccagtgagtacggggcatgaaagcaagaggggagtggcttaatcagggagggaaggggtcccggagcccccgaagaagtatattctgctcctccttctcttttctgcaacagatggagaggccagaaccttcaatggctccattgaactctgtagagcagactcggattccagccagaaggtgggttcttggagagccagggagtggccaaagaaagggcacagctggctggcctgtggatagacagctgctgaggaaggcccccaggtctgtgcctgctgactccccattcttgtttatttctgtaggatcggaatggaaatcagttgagatcaccacaggaggtgagatgggaattctgtggtagaggaggtagagggaagctggctctctgcgaaattgtagccagtttggatgatacttttaagtctgtctctagacattgtttccacacccggttgttaacttccggtacttacctcatcctaaaccttggtactacttcatcctctcctctgtcctcaggaggtgttacagccattgatcaatctttatggacttctacatggcctgcaggtcagtggggaagaaagggaggagccacccagaggtgtccatgcagatagatagatggcagccctcctaacaggcttaagtgctccctcgagttaagctctctgggacccggggattgagagaaaggtggagagaaatggtttctgaagcaccttttggcttcatcccatcccccaggctgttgtggtccagcaggaaagactgatggaagccctgttccctgagggccctgaacggtgggaaaagctatcccgagccaactctcgggatggtgaagctggccgggctgcggttgcttctgtaactcctgagaagcaggccacggagctggcactactgcagaggcaacacaccctgttgcaggaagagctgcggcgctgccagcggctcggggaagagcgggcaactgaagctggcagcctggaggccaggctccgagagagcgagcaagcccgggccctgctggagcgggaggctgaagagatccgccggcagcttgcagccttgggccaaaacgagccactcccggcagaagcgccctgggctcgcaggcctctggacccacggcgccgcagccttccagcgggcgacgctttatacttgagcttcaatcccccccaggtaaggccgcctggagtagttgtagaagcctacagaacctgaaggacatttagctgtcagggattggagcccaagtgacagcaggcaacagatttgtgtcagttgttaaaaggcttgccacgtaaacacgagagcctgagtttgatcccgcagaagcctcatcatatggttcatgttcacagccctaggccggggaggcagatgcaggttcacctcgcagctcattggccaaccagcctagcctctttggtgagctccaataggagaccttgtgtcataaagcaaggtagatgactttttttttctttttctttttctttttctttttttttagcagggggagggcttctccatgtagtcttgactgccctggaacttactctagactcagactcacagagtaggcaaactttgcctccacctcctgtgtgctagaattaaaggggtggtgcaccaccacctccaagctcaaaacatgacatctggggctggagagatggctcagaggttaagagcattggctgctcttccagaggacctgagttcaattcctaacacccacatggcagctcacaactgtatataatgcctgttctagagtttccaacatcctcatacattcatggaggcaaaacaacagttcatataacatttaaaagaaaaaagaagtaaaagaaatagccaggctgcctctaaccacgaccatctttcagggtggagagatggctcctaagagagggattcaagggatctgacacacatacaggcaggaaaaactcaatgcccataaagtaaaagtgaattagtctttaaaagaaaataaaaaaagtaatgacgggtgaaacccaacaggagccacactgttgctaaggagccactttgttatatgttgttactaagtctccaacccttacaaaagtaagtttgtttcctaaacctaatgtatcctgcacaccatgtttttcaagctatgctgaacttgtaaccccataatggtgtcccaccccttgtgccttgctaaactcctgaacaaggtgccgactgcccttccacgagatgtattcttgcacttacctatctggcaggcagccgagagccccgaatgcccaactctttggtccagatgttcataccaatctaaacagttgttttcttttttcctttttctttctttctttctttctttctttctttctttctttctttctttctctctctctttctctttttaaagatttatttattttgtttgagtacactatagctgtcttcagacacaccagaagagggcattattgatggttgtgagccaccatgtggttgctgggaattgaactcaggacctctggatgctcttaatctctgagccatctctccagccctaaacagtcgttctctatcaacccaaaccttttcccacaaaaaggacttcaaaaggcagtgaggggctgctctctaaaaccctgacttagcgggaggcagtcatctggccagacccttgtgcacttctatatacagcttgctttctttaatcagacacttggggaaattgttttaacgtgacctctggcttctttatacatgagtgcacacacatacagacaaaaagtactagttgaattgcaaagaaacttaaggctaagtttagtggcaggggcctgtgcaaatctccagcacttccaacaaacaaacatttctgctattagtctatgtggggcattatgagtgtggagttattgcgtatgaaggccaactgaaggaccaactgagcccagcagatacagtgtttaaggatatcagagtggtgacctcagtgggtggtggatctactgagagggagtcattggtgaaccccaggagacaaggtgtgttaaggcctgagggtctcactgccggtgcctgcacacggcccatcccctggactggtggttttccttccatagcccagtcgaggccatgaccgcctggatttgcctgtgactgttcgttccctccaccgaccctttgatgaccgagaggcgcaagaacttggtagccccgaggatcgactacaggacagcagtgaccctgatactggtagtgaggaggaagtcagtagccgcctgtctccacctcacagtcctcgaggtgagaccctcgagtggttgtggggtctgggtccaagcccttaggacggtgacttctaaatgtcctctaagtttgggaattctgggagaggctaggagggtttcctcctctgtgagtagacaaactgggggtggggtggggtagaactcttgagaagcagtggtttcctattggttgacgactccccacctttacaagtagtagaaatccatttgaaagcaaaacagctgaaagccgtcctcacctttatagtaaaggaaactagaaggaatgagtttcctgttctaatggtgacttaattgcctgagggtcatccggccatggtggccccaccttcacccttaggggcctttgtgtgaatctgtgctactactcatgggagagcctgcctgctcactcatcacctctaccctctctgtcaccttccagacttcacccgaatgcaggacattcctgaagagacagaaagccgagatggggagcccacagcttcagagagctaaggggacacttcccccacccccgcctggtgccccactgaagaacattagtaaagggggcaaaccttgaaagaactgctgattgtccttaccagttcctgagacccctggatacctaggggccatggggacttggggacatagaggccactgcactcctggtgtcctccaacagccacaccgcagatgccaacttttcatgccttctccccctacttaggaaaaattatttatttattgtttaatggttacagggggcgggcagggagtaatttaaagggccagggacatgggaaccaagccataagtattggagagcctctcctctaataccactgggatatgtttggccttagccacacagcctaacacccaccccagtgacacccatctgtggccacagcctactgcccctttaaggagggctgtgggtaggaccatgtcccttcccccactccccctagcctctttctgctcttcgttctcatcatcctccatggaaatctggctccttggagttgatggagcagaggctagggcggccataatgtatgggggaggggaaggaagaacctacagggaccagaatgtttggtttttagtttttgtttttttgtttttgtaccaaagccaaccacacctgttttatatttttaaaagaagattgtaggcacttctagctccatatctttgaacttgaggaattagggagacagtgacttatttcattgaccgtcagggggctcctattcagaactcttcctcagccatttggaagaagctctaaggtgggttgggaaacctctacgaaccctcacctcatctcccacagcggcaacgtttgaaacgtaagcaagaattgagggagggggatttttttttcaatgcaaccctaatgtccaccagcgatagccatttgtctgcaaatttaattgttaaaaaacaaaacaaagcaaacagtaacaacaaagaaaagagaaagagagagagagagagagagagagagagagagctcaagcagggaaaagacctaaagcgcatgaggtgctgactcagtgcccgatccaaggactgcggtgcatgcagccaggcagtgaccacggtttctgaaaaggggctgtcactacctcactgaagagggcatgaatggatgcagctgctcaaactcttattaaaaatcttaaaattgcaaggctggaaatgaagcgccgttcagcctccagcggctgttaatgatgcacacattagaaaactcgtttgcatcttattcatctgccatgcttggatagcacatctggttcttgccacccctctgttcccctccctgcccctcccattttcatgcccaccctggcttaggtctctgagcagcagcctgtaccgctctgtctcttggagaggccgtaagtggtttcagttcttggttttggcttattccacttcctgtttctaggccctacgcttaggccacggggcagggacagggaatgcccatccccacaacctgagaagcggggtgtgaagaagggtctcaggaccccaccgaaaaggggaattgaagttgcgtgggctgcagcaggccttgtgggaagcatccttgccctccagcagcttctggccctcaggaggcactttctctctaaatcatgggattcttcggctataggaattgttttataaatttatttactttagtatttattatctttgagacaaggtcttgcagtgaagcccaggctggccttggattcaaggcaatcctcttgcttcggcctcccaaatgctgcaattacaggcgcaagccagtatgcccagcccactgtgtttttcttttacataatgggtgcaaaaaagttgccaggccaaaaaaccagcccccacttcctctgcctgacaaatgcctcagattcaagccccccgatgctcagcagctgtgctggaggcagcgctaagcaccggggcccaagcatgcgaaggtcaggtggacgagactattacagagtctggagaagagcaggacagtttcccagccttccccagaggggccgggaggaaaacctagaacctgagatggatcttcagagtaggagttgggagagcctgggctccttccattgccttattaccatagccgcagtccagcatcagccagagcctttcccttcctcctgtcatcatctgtcccttccttgtccccctccctgatcccactttctgaacctaaagtcttcatttttgcccccaccgtcctccctcccacccccgctgccatttcaaagccctgtgactgctctgagaaccagggtcctgctagctttttgcttaaaccacatagctcccttagaggaggctctagacctgggcatgccgcgctccactttccacccccttttctccatgctgccccctccaagtcagggctacacaccgttccttgagttggttttgtcaatatttaccccctgggcactgtaaagcagatgcccccagaaaaggcaatatccggacccagcgggacctgagggggcaggaggaaggatgctcaggcgcgggaggattacccaccttcctggatggctgggagtagaactggcattttggagccagtttaaacatcataaagaggaaatgaaacatcgagaggctaattaaatcttgttcccgtcctttaatatgttgtgagttgggtgattcttaaatgctcagcgtctgtgaaccaggctggcgccccgaagtattgcagtgtctttacagctgctgctcttccggggccttgagtggctagtcacaacctggctacaaagcatccccaaagcctggtcctgaagggagggatggagtaggagctccataggcaacttagctcattatggttgtaaatgactatggaaaccaaagggataccttctgctcaggagacaattgcaaagggaggcccctgtagttagtgtctgtctcttagcagagtgtgatgttggtttcaacttttattgcccttcacctggttttttgagacccaagtggagcatgccaatttgcctagactgccagtgggtctcagggctcctgcctttctccccagctccacttggatccagtggttttatattgggtgctagagcttgaactcaggcatcagcacacgtgctccaagtgcttttcccccagctatgcactgtatttgtttttgctgttgtctctaatttctggtagcgttagggtgtgtggtgacgtcagagcacgcgggtggaggttaagggacagctttgcatgcttgggtctcggtacacctttatgtggctttggcaatctaactcaggttgctgggcttacgggccatgtgttttccctgctgcgccatcttgctggttcttactttattatgtgtgtgtgttctcacaaatgtgcgcgcgcgcgtgagggtgagcaatcagatcatgagacttacattatattccataaacaagtccatgtaagataccactgagacctcagtggctcacctgtacctgtctgccagctgcccatgttttctgtcgtctttccattttccatggaaggtgtcagtaccgggaaccctgcctatggcactgctggatccttttattttggagactgaaccttttattccatttaagaagagatcttgagccaggcgtggtggagcacgcctttaatcccagctcttgggaggcagaggcaggcggatttctgaattcgaagtcagcttggtctacaaagtgagctccaggacagccagggctacacagaaaccctgtctcggaaaacaaaaacaaacaaaaaacactttgtagccaggcagtagtggtgcacacccttaatcccagcatttggaaggcagaggcaggcagatttctgagaggccaacctggtctacagagtgagtttcagaacagccaggactacacagagaaaccttgtctcagaaaaaaacaagaaaacccaaataaacatcgtgtggagggtttagaaaactgcttccccaggtaaagacccttgcccgaaagcctgatgggctaagctgactcccagaatcttaagaggggggaaagagaaagcagaccccaagctgtcctgatcgccacatgcatgtggaacatgtctcctcgtctgaacacacttgaataaagtgtaatttttttaaaaatcaaagcaaggtgcgttggcacatgcctgtagttccagcacatgggaggcagaagcaggtgagtgtctgagttcaagggacagcctggtctacagagtgaattccaggacagttagggttaggtcgtaagaccgtctcaataaaaacaaagacaaggaaatgaaaaaaccttatgtttgcttctgacacacgtacaagtgtgaacacaaatgtacatgcaagcatgcatacatacatacataagcacaggaaagaaggaagaataggctaaaatgatctgaaaagctcaacttgttggcacatgcctataattcgagcatctgggatcaagattaaagattccaagcgaccctcagctttacagtgtgagaccagcctgggtatgatgaaaccctgcctccaattttagaaggggagaactgacttctagaataatttgcgtggggggaagattccagcccacatgctctggcgcttggctgaagtgcagttgtactcagtgagactagcttctggtttctgaccctcagcctacaaaacttttctgtatctcttgactccccacccccacgcccagacccttgtgattgttacccaatccttgattgaaagggacagatctattcactattctcaaaggctatacactcagggtctgcatcttgtggcagcaaaacgacagacaaacgttgaaggggaggcttctacatcattcctaatgggtacctctaagatgacaaaaagcttattggccagagaatacatttttgggtttggtaccaaagaggcataacgggtgccctattctaaagtgacagggagaaccgacacctgacctgttagtctaaaccgggtgatggacgttagttatcctgtgaagtacttgcatgaaaggtcaagacagtctctgaccgatctggtttattctcagttcctctttgccatctccagagataagctttgccacatccacctcctgtttggactccagcttctccgttctgtcacacccagagttggtgatcaaagatcagacttctcctggggacacagcagcctgactgagagagcagctgctcctccctagaatctgtgggctctgcccctgataggtctcagaaaggagagtgttcaggctgcatccttcatccaggtgttccattgtgtttgtgtgtgtcctagaagagccactctcctgggtgctggctaccgttctcccgcctacctccttgagggccatttgttccatgcaggccttcctttgaggccacagtcttgaccagagagctctgaaggagctgacaagaacctgctggggctcccgccgcaggagacaatagatcacagggttgaggcagctgttgctgtgggccaagcaggtggtgatgggaaggatgtaagtatgaaaggtgtagaaagtactgtcccagggcaccaggtcaaaccttaccagaatttcccagagagtgactacatggttgggaacccagcagagggcgaaggaagccaccaggacacggacagagcgggctaccactcggctgtcctgccattgtcgtggcctgcatctttgctgccgctctagaaaggccaacagcagcaggtaactggtggtaatgactcccaagggcacgatgaaggccagaactaccctctgtagctggtaagctcccagccagtatctgctggggaaacgcagaagacagaggcacacgccccacaactcaacttcagccccaaagattgctgtgggcacagtcaccagggcagctgccacccacactgccagggtgaccacacgggcccaaaagactgagaggtgactacctggtcccacagccatggctaccacccagtatcgcgcgatactcagtgctgtgattaggaaggtgctggcatagatgctgaggacggtggtggtcaggactaccttgcagagggcacttccgaaaggccagtggaagtccattgctgactcggttgcccagaaagggagagtaagggccagccccaagtctgctagagccaggctgaagacaaaggtatcagaagacaggccgggcacacgctgaccacagttacctagaacccacagtacggccaaatttcccagcaagccaatgatacctacaagtccataggccagtgcaaccatgatcctcagaacaaggaactggacaggcatggcagcaccgtcagtgctcagcacgctgtctccagagccattgacccagaagagggtgggcagagaggcagaagaattggatgtggccatcgcaagaccgcggaggttgctagagcacagcagagcagaggaaccagggagtgcccgccttccggcctggcaagcaaccacccgccgccgctgttgtctcaggagagctcttagaagagcccttggaatctgggtgttggtctagagcttcgggttgtaagagcccctgcccatgctcacacctaagagggacaggtgtgggtagaacagcctgcttcttcccagttggacaaccgtggtgggtggggcagtgcaagggagggctatgttcacactgtcaacatgcatgtaatagggaaggaaagggaaacagtagagatgtggagccaaaccagaagacgctttttctctctccccggagtgcagagagctctctgagaaaaggagaggtgtgaggagaggttagggaaggaatatggcattagaaaaccagactgggagtcagaaaaagagagaggaacacacatcactcagagtcccacagttgctgtgcctttcctgtgtctctctgattggggccctgtgctgctttgcttaaaatgttaatgggggcaggccagagatcggggctgtttggggaaaggggcctgctgccaagcctggtgatttgaattcagtctacaggatctgcataggagaaggatagacatgccactcacaagctgccctttgacctccacactcatctcacacacacacacacacacacacacacacacacacacacacaattctccccccaaaagtgttaagaaaatatacaattcagcgagatgccaaagagctgtggtcactgctacctgcatggctgaggcagctggatcacctgatcaccaaggccaaacttggcagtacaacaaggtataatctatatataaataaataagcccgtggagatggctgtccctggaacctgcctacataaaggtaggagaggacaggcatcccggggttgtcttctgacttttatacatgcacagtagtatgtaccccccagcactactaaatcttcaaaataagattagatggtgacaggcttaatggtttgctggcacacccagcctggtctgtctactgaattccaggccagacaaggttaggttctgaaaccctgtctcaaaaccaaaccaaacaagtttgggactagatatcaagtacctgcttgtcggccctgacaatgtgcactgggtggtcaggatccacaaggtgggaggagagaacagattcctgaaagttgtcctgacatttgcctgcattcagtagcatactgaacatccatgctcacacaggcaaatactatttaaatagttttaaattggggctagagatacctaaggagttagtatcttgcagatgacctgcgtgtggtacccagcacccatctagtatctcaccgtcatctatcactccagttctaaagaatttgaccccctcttttggtctccactggctcgaatgtgctacatgtccatacgtgcagacatacatataaataaaaattccttacagaagttaaatcagatgaagatagtccgttgttcagggagctagcgtgagtccataccttgttctttgcatgatgactgtcatttcaaggggaagtttggagcattggtcatggaaggaagcaggacaatgaacagctgttatcatgccaagggaacactgccaactaaaacacaggtcagaattcagtgcagtaccatgtgaccttgatgctaagaaggggaaagaaatgagacggaggaagttgcagttccctgtataccccttctgggcacattggacttgtgaggccataggtggatgaccacggccacaccttcaggtctgctctacatccctgaacagtcctgccaacctgtcccacccccactgccactccatttttctggtgtactcagagccccgtcatatccacattcctccatatcccaagcctcactgtagagttctggaacctgagaaaagcctttaccacacctcatcctgtctccccatgagctcagtctcagctgaagaccgtctctaatggcatcatctcctttctctcctcacatctctctccacggcaggagctttgggagagagcatggactggggaggtaagagtgagatttttttttcaaggattctgagagcagttcggcactcttctgctggttaaggaagtatctggtactcggttgtcttggggtgctgggggtggggtcagagaggcatttcagagaagctctagcccatatgagaaccccagacgtgagagagttgctttctgggaaacagaatgttggggttttgagcaagagagaggtgggatgaggttggcagaaggcactcagctgcaacccaagggctacctgtgttatagctgtgaagagaaaggtgtcctagcagtcaggagtcaaggaataatagcacaaagtcactcggcacaacaaaccccacacaatagatttattgggaaagacacctcagctagggagagaagctacagagaactgagcagaagacacgtgttatacagcttttcttgtggggcagagttttccagggtgggggttggtgagatttcacagcctgagcttgtgcccggaggggtcttcctgacgtcatagtctgagtccgactcatgtcaagtattcatttcttacggccatgctgttttggccagaattgtatagccagcttaggcactccagcgacccggctgccggtgtagatcagcagaacactgctcccttgcttgctgcaatcctccaaccccatcacttgcacacagaataaaaccaaaaccatgcagcttaggttggagagggagtttactgaggagataagatgcatgcatgagggtccccattcagaggcctagagcttatgcaggcagagctgtgctcagcagagagcacctgtaaccctgggactcccaggaagatgggagcagcatgagtcacttttctgtagcaggacttgggctacgttgtgagtttttctttcttccacccttctccatcccttttcttgcagcattagatagaagagaaaaggggacagagaggaaaggaaagagattcctgggtaaattcaggggtcgggaaggggcgatgttattgttaggccactcccttcttaggagcattgagttccttgaggcaagtttgatctttgccatcaggatatctaatttctttttcttgcttcttctttgcacacaaccacttaacaaatggagactgacaacaattcacagcaaccaacaacccatgctccctcttggggccctagcatttatacaccctctgaaaagtccccagcatcccaattgtcacacagtcacaaaaactatctgtaactgggaaagtcacactcctgttagagcacggggcaagccaaggtcagctgctgtgctcaatctgaagcagccccgtgtccccacacctaggatcaaaacagaagcacattcctagttctgtggtttttttgttttttgtttttgtttgtttgtttgttttttcgagacatggtttctctgtatagccctggctgtcctggagctcactttgtagaccaggctggcctcaaactcagaaatccgcctgcctctgcctcccgagtgctgggattaaaggcatgcgccaccatgcccggccgtcatgtggtttttaaagaaaccaaaattctcactacacttttctgttgctctgagaaaatgccatggccaaggcaacttaattaaggaagtttctttcggcttatggttcctgaaggctagagtccaccatggtggggaagaatagaggcagggcagcaggcacagtaacaagagcttggcactaagtgaggcaagaccagaaacactctacgcctgtcacctggagacattcttctaacaaggctctacctgtcaaaggtttccaacctccccaaacagcacagttagggtcactaactgaactcccagtgtttaaatatctgagcctacgggcaaatacttatttaaaccactacatagttggacctgggaaactcatgggtcacctatgggtgaacaagaagaccatcttaaggtggctagtgaagactatcacccaacattctccattgaactctgcacaaatgcataagtgcacacaaacacacacatcatatattcaaaaacacttaaacaattttgatgtattggatttattttctcttgattagaaaaatgaagagggcggggctggagagatggtttaacatttaagagtgattgctgcatcttccatagaacccaagttcagtccctaacacccacagaaagagggctcacagctacctgtaactccagctgtgggggagttacaacactgtcttctggcctctacaggcaccaacacacatgtgatatatacacatatctacacaaattttttattcatctttcttttttgtttttggttggttggttttggttttgcttgtttgtttgtttattgagacagggtttctctgtatagtcttgactgtcctggaacctggtctagaccaggctggcctcaaatttatagagatctgcctgcctctgcctcccaagagctggaattaaaggtgtgtgctaccactgcctgactgattttttgtttgtttgcttctttgaaaaagggtttctctgtgtagccctgaatatcctggaattcactctctagaccaggttggccttaaactcagagatctgcctgcctccacctctgccgcctctgcctcccaagtgctggaatcaaaggcacgtgtgtgcaaccaatgcctggttgcacttgctgttcttacagaggacccaggatagttcctagcacacacattatgccacatgatgctctctaattccagttttaggggatctgacaccttgttctggcctctgagggcac

SEQ ID NO: 682 - DNA, 4643 bp, Mus musculus
ggaggagactgcagtcatcggaatgcccaggctcccaggaagccccctttctacagagcctcgaggaattgggcacccctctgggagctcagcagcaggagcagcagcaggggcaggagcagcagcgtggccaaccctttcaccggggtcagagtttctgctatccatctgctgcctcttcggttccctcggtcactggcatgctgtccaaggctgtgtccatgagtgatatcaatctcctttcggactgctcagatccaaatggtaactcacctcagtcctatgtcacagacctcagcaaatgtggtaaacagctggaagaggactcggggacctgggcaggctcctccctgcgacggaccttcagcttcctcttgggcatgaccggcagggacaagacccgggaaaaggagaagatgaaggaagctaaagatgcccgctataccaacggccacctcttcaccaccatctccgtctccggcatgaccatgtgctatgcctgtaacaagagcatcacagccaaggaagccctcatttgtcctacatgtaacgtgaccatccacaaccgctgtaaagacaccctggccaactgtaccaaggtcaagcagaagcaacagaaagctgcactgctgaggaacaacactgctttgcagtctgtctcccttcgaagtaagacgaccaccagagagcggccaacgtctgccatttacccttccgacagcttccggcagtccctcctgggttctcggcggggcctctcctccttatctttggccaaaagtgtttccactaccaacattgctggacatttcaatgatgagtctcctctggggctgcgtcagatcctctcccagtccacagactccctcaacatgcggaaccgaaccctgtccgtggaatcccttattgatgaaggtgtagaagtgttctacaatgagctgatgagcgactttgagatggatgagaaggactttgaggcggattcttggagccttgccgtggacagcagcttcctgcagcagcacaaaaaggaagtgatgaagaagcaagatgtcatctatgagctgatccagacagagctgcaccacgtgagaaccttgaagattatgacccgcctctttcgcactgggatgctggaagagttgcagatggagccagaagtggtccagggcctgttcccctgcgtggatgaactcagtgacattcacacacgtttccttaatcagcttctggaacggcggcgccaggctctatgtccaggcagcacccggaactttgtcatccatcgtttgggtgacttgctcatcagtcagttctcaggttccaatgctgagcagatgcgcaagacctactcagagttctgcagccgccacaccaaggccttaaagctctataaggagctgtatgctcgagacaaacgcttccaacagttcatccggaaaatgacccgctcagctgtgttgaagcggcatggagttcaggaatgcattctcctggtgactcagcggatcaccaaataccctgtgctcatcaacagaatcctgcagaattcccacggggttgaagaagagtaccaagacttggcgtcagccctaggactagtgaaggagttgttgtccaatgtggaccaggatgtgcacgagctggagaaagaggcccgcctgcaggagatttacaaccgaatggatccccgggctcagacccccgtacctggcaagggccccttcggccgagatgaacttttacggagaaaacttatccatgaaggctgcctgctctggaagacagccacaggccgcttcaaagatgtcctgttgctgctgatgacagatgtgctcgtgtttctccaggaaaaggaccagaaatacattttcacgtctctggacaagccctcagtggtgtccttgcagaacctcatcgtaagagacatagccaaccaggcgaaagggatgtttctgattagttctggaccgcctgagatgtatgaggtgcatgcagcgtcccgagacgaccggactacctggatccgtgtcatccagcagagtgtgcgcctgtgcccgtccagggaggactttcctctgatcgagacagaggataaggcgtatctccggaggatcaagacgaaactgcagcagaaaaaccaggcgctagtggagctgctacagaagaatgttgagctgtttgccgagatggtccacttccaggccttaaaggctggcttcgttggaatgcccccacccgccctgcccaggggccttttccgtcttgagtcctttgagtccctccgaggcgagcgcctgctaaaggatgccctccgtgaagtggaaggcctgaaagacctgctgttgggcccatgtgtggacctgcctatgacatcccgagaaccagccttacccttggactctgacagcggtagctgtcctggggtcactgccaatggagaggccagaaccttcaatggctccattgaactctgtagagcagactcggattccagccagaaggatcggaatggaaatcagttgagatcaccacaggaggaggtgttacagccattgatcaatctttatggacttctacatggcctgcaggctgttgtggtccagcaggaaagactgatggaagccctgttccctgagggccctgaacggtgggaaaagctatcccgagccaactctcgggatggtgaagctggccgggctgcggttgcttctgtaactcctgagaagcaggccacggagctggcactactgcagaggcaacacaccctgttgcaggaagagctgcggcgctgccagcggctcggggaagagcgggcaactgaagctggcagcctggaggccaggctccgagagagcgagcaagcccgggccctgctggagcgggaggctgaagagatccgccggcagcttgcagccttgggccaaaacgagccactcccggcagaagcgccctgggctcgcaggcctctggacccacggcgccgcagccttccagcgggcgacgctttatacttgagcttcaatcccccccagcccagtcgaggccatgaccgcctggatttgcctgtgactgttcgttccctccaccgaccctttgatgaccgagaggcgcaagaacttggtagccccgaggatcgactacaggacagcagtgaccctgatactggtagtgaggaggaagtcagtagccgcctgtctccacctcacagtcctcgagacttcacccgaatgcaggacattcctgaagagacagaaagccgagatggggagcccacagcttcagagagctaaggggacacttcccccacccccgcctggtgccccactgaagaacattagtaaagggggcaaaccttgaaagaactgctgattgtccttaccagttcctgagacccctggatacctaggggccatggggacttggggacatagaggccactgcactcctggtgtcctccaacagccacaccgcagatgccaacttttcatgccttctccccctacttaggaaaaattatttatttattgtttaatggttacagggggcgggcagggagtaatttaaagggccagggacatgggaaccaagccataagtattggagagcctctcctctaataccactgggatatgtttggccttagccacacagcctaacacccaccccagtgacacccatctgtggccacagcctactgcccctttaaggagggctgtgggtaggaccatgtcccttcccccactccccctagcctctttctgctcttcgttctcatcatcctccatggaaatctggctccttggagttgatggagcagaggctagggcggccataatgtatgggggaggggaaggaagaacctacagggaccagaatgtttggtttttagtttttgtttttttgtttttgtaccaaagccaaccacacctgttttatatttttaaaagaagattgtaggcacttctagctccatatctttgaacttgaggaattagggagacagtgacttatttcattgaccgtcagggggctcctattcagaactcttcctcagccatttggaagaagctctaaggtgggttgggaaacctctacgaaccctcacctcatctcccacagcggcaacgtttgaaacgtaagcaagaattgagggagggggatttttttttcaatgcaaccctaatgtccaccagcgatagccatttgtctgcaaatttaattgttaaaaaacaaaacaaagcaaacagtaacaacaaagaaaagagaaagagagagagagagagagagagagagagagagctcaagcagggaaaagacctaaagcgcatgaggtgctgactcagtgcccgatccaaggactgcggtgcatgcagccaggcagtgaccacggtttctgaaaaggggctgtcactacctcactgaagagggcatgaatggatgcagctgctcaaactcttattaaaaatcttaaaattgcaaggctggaaatgaagcgccgttcagcctccagcggctgttaatgatgcacacattagaaaactcgtttgcatcttattcatctgccatgcttggatagcacatctggttcttgccacccctctgttcccctccctgcccctcccattttcatgcccaccctg

SEQ ID NO: 683 - protein, 1096 aa, Mus musculus
RRLQSSECPGSQEAPFLQSLEELGTPLGAQQQEQQQGQEQQRGQPFHRGQSFCYPSAASSVPSVTGMLSKAVSMSDINLLSDCSDPNGNSPQSYVTDLSKCGKQLEEDSGTWAGSSLRRTFSFLLGMTGRDKTREKEKMKEAKDARYTNGHLFTTISVSGMTMCYACNKSITAKEALICPTCNVTIHNRCKDTLANCTKVKQKQQKAALLRNNTALQSVSLRSKTTTRERPTSAIYPSDSFRQSLLGSRRGLSSLSLAKSVSTTNIAGHFNDESPLGLRQILSQSTDSLNMRNRTLSVESLIDEGVEVFYNELMSDFEMDEKDFEADSWSLAVDSSFLQQHKKEVMKKQDVIYELIQTELHHVRTLKIMTRLFRTGMLEELQMEPEVVQGLFPCVDELSDIHTRFLNQLLERRRQALCPGSTRNFVIHRLGDLLISQFSGSNAEQMRKTYSEFCSRHTKALKLYKELYARDKRFQQFIRKMTRSAVLKRHGVQECILLVTQRITKYPVLINRILQNSHGVEEEYQDLASALGLVKELLSNVDQDVHELEKEARLQEIYNRMDPRAQTPVPGKGPFGRDELLRRKLIHEGCLLWKTATGRFKDVLLLLMTDVLVFLQEKDQKYIFTSLDKPSVVSLQNLIVRDIANQAKGMFLISSGPPEMYEVHAASRDDRTTWIRVIQQSVRLCPSREDFPLIETEDKAYLRRIKTKLQQKNQALVELLQKNVELFAEMVHFQALKAGFVGMPPPALPRGLFRLESFESLRGERLLKDALREVEGLKDLLLGPCVDLPMTSREPALPLDSDSGSCPGVTANGEARTFNGSIELCRADSDSSQKDRNGNQLRSPQEEVLQPLINLYGLLHGLQAVVVQQERLMEALFPEGPERWEKLSRANSRDGEAGRAAVASVTPEKQATELALLQRQHTLLQEELRRCQRLGEERATEAGSLEARLRESEQARALLEREAEEIRRQLAALGQNEPLPAEAPWARRPLDPRRRSLPAGDALYLSFNPPQPSRGHDRLDLPVTVRSLHRPFDDREAQELGSPEDRLQDSSDPDTGSEEEVSSRLSPPHSPRDFTRMQDIPEETESRDGEPTASES

SEQ ID NO: 684 - DNA, 1883 bp, Mus musculus
ggtgcaggggcgaggggactcagacttcctgtccccgaggccgacgcgtgcggccggacccctcccccgccgttgctggacacccggggccgccgcgtcctcccgcggctcacgctggattatgtctcggatcgaatccctcactcgcgcgcggatcgaccggagcaaggagcaggcaaccaagacccgggaaaaggagaagatgaaggaagctaaagatgcccgctataccaacggccacctcttcaccaccatctccgtctccggcatgaccatgtgctatgcctgtaacaagagcatcacagccaaggaagccctcatttgtcctacatgtaacgtgaccatccacaaccgctgtaaagacaccctggccaactgtaccaaggtcaagcagaagcaacagaaagctgcactgctgaggaacaacactgctttgcagtctgtctcccttcgaagtaagacgaccaccagagagcggccaacgtctgccatttacccttccgacagcttccggcagtccctcctgggttctcggcggggcctctcctccttatctttggccaaaagtgtttccactaccaacattgctggacatttcaatgatgagtctcctctggggctgcgtcagatcctctcccagtccacagactccctcaacatgcggaaccgaaccctgtccgtggaatcccttattgatgaaggtgtagaagtgttctacaatgagctgatgagcgactttgagatggatgagaaggactttgaggcggattcttggagccttgccgtggacagcagcttcctgcagcagcacaaaaaggaagtgatgaagaagcaagatgtcatctatgagctgatccagacagagctgcaccacgtgagaaccttgaagattatgacccgcctctttcgcactgggatgctggaagagttgcagatggagccagaagtggtccagggcctgttcccctgcgtggatgaactcagtgacattcacacacgtttccttaatcagcttctggaacggcggcgccaggctctatgtccaggcagcacccggaactttgtcatccatcgtttgggtgacttgctcatcagtcagttctcaggttccaatgctgagcagatgcgcaagacctactcagagttctgcagccgccacaccaaggccttaaagctctataaggagctgtatgctcgagacaaacgcttccaacagttcatccggaaaatgacccgctcagctgtgttgaagcggcatggagttcaggaatgcattctcctggtgactcagcggatcaccaaataccctgtgctcatcaacagaatcctgcagaattcccacggggttgaagaagagtaccaagacttggcgtcagccctaggactagtgaaggagttgttgtccaatgtggaccaggatgtgcacgagctggagaaagaggcccgcctgcaggagatttacaaccgaatggatccccgggctcagacccccgtacctggcaagggccccttcggccgagatgaacttttacggagaaaacttatccatgaaggctgcctgctctggaagacagccacaggccgcttcaaagatgtcctgttgctgctgatgacagatgtgctcgtgtttctccaggaaaaggaccagaaatacattttcacgtctctggacaagccctcagtggtgtccttgcagaacctcatcgtaagagacatagccaaccaggcgaaagggatgtttctgattagttctggaccgcctgagatgtatgaggtgcatgcagcgtcccgagacgaccggactacctggatccgtgtcatccagcagagtgtgcgcctgtgagtgtgtacctgtgtgtacatatggcttcaggtcctagtcg

SEQ ID NO: 685 - protein, 613 aa, Mus musculus
VQGRGDSDFLSPRPTRAAGPLPRRCWTPGAAASSRGSRWIMSRIESLTRARIDRSKEQATKTREKEKMKEAKDARYTNGHLFTTISVSGMTMCYACNKSITAKEALICPTCNVTIHNRCKDTLANCTKVKQKQQKAALLRNNTALQSVSLRSKTTTRERPTSAIYPSDSFRQSLLGSRRGLSSLSLAKSVSTTNIAGHFNDESPLGLRQILSQSTDSLNMRNRTLSVESLIDEGVEVFYNELMSDFEMDEKDFEADSWSLAVDSSFLQQHKKEVMKKQDVIYELIQTELHHVRTLKIMTRLFRTGMLEELQMEPEVVQGLFPCVDELSDIHTRFLNQLLERRRQALCPGSTRNFVIHRLGDLLISQFSGSNAEQMRKTYSEFCSRHTKALKLYKELYARDKRFQQFIRKMTRSAVLKRHGVQECILLVTQRITKYPVLINRILQNSHGVEEEYQDLASALGLVKELLSNVDQDVHELEKEARLQEIYNRMDPRAQTPVPGKGPFGRDELLRRKLIHEGCLLWKTATGRFKDVLLLLMTDVLVFLQEKDQKYIFTSLDKPSVVSLQNLIVRDIANQAKGMFLISSGPPEMYEVHAASRDDRTTWIRVIQQSVRL

SEQ ID NO: 686 - DNA, 80406 bp, Homo sapiens
tgagacctagtctcttaaataataattaattgtattttattaatctgttctcaagttgctatgaagaataagctgagactgggtaatttttaaaaaaagaggtttaatttgttcacggttctgcaggctgtacagcaagcatggctggggatgcctcagggaacttataatggtagaaggcaaagggaaaataggcacgtcttacatgtctggagcaggaggaagagagtaagaggggaggtgctacacacttttaaaccagatcttgtgagaactcatatcattagaatggcaagggagaaatctgcccccatgatccaattccctcccaccaggcccctcctccaacattggggattacaattccacatgagatttgggcagggacacagatccaaatcatatcaataataattatgtatacgtttaggtttattggtgagggtaaatgtggtctttgtatttgtttttgttttgtcttttttttttgtattttcaataatttccttcaattatagttaacaaaagattttctatgagcttggccaggcgcggtggcttacgcctgtaatcccagcactttgggaggccgaggcgggtggatcacgaggtcaggagatcgagaccatcctggctaacacacagtgaaaccctgtctctactaaaaatacaaaaaaattagccaggcgtggtggcgggcgcctgtagttccagctactctggaggctgaggcaggagaatggtgtgaacccaggaggcggagcttgcagtgagctgagatcatgccactgcacttcagcctgggcgacggagcgagactgtcaaaaaaaaacaaaaaaaaaagattttctgtgagcttaagtgactataatttcttttaatcatccaagaagaagcactgattgaatgactgtaattttttttttgagatggagtttcgctcttgtcgctcttgtcttgagtgcaatggtgcaatctcggctcactgcaacctctggctcccgagttcaagcgattctccagcctcagcctccagagtagctgggattacaggcactcaccaccatgcctagctaatttttgtatttttagtagagacggggtttcgccatgttggccaggctggtctcgaacttctgacctcaggtgatccaaccacttcggcctcccaaagtgctgggattacaggcatgagctcccatgcctggccaagtgactataatttttttatccataacatatattgctttggaagtttacttcaaaaaccatgacactgagtataacatgggacccttaaaatttagctggaaaaaaataccatacactttagatttaaaaaagatgcctaggccccatatggtggctcatgcctgtaatcccaggactttgggaggccaaggtgggaggatcacttgaacccaagattttgagaccagcctgggcaacaaagtgagaccccatctctctctcttttttttttaatatttaaaaaaatcagtaaattttaaaaagaagcctatatatatatatatatatatatttttttttttttttttttttttttttttttgaggcggagtctcactctgttacccaggctggagtacagtggcacaatctcggctcactcaacctccgcctcccgggttcaagcagttctcctgcctcagcctcccgagtagctgggactgcaggcgcatgctgccatgcccagctaattttttcgtattttattagagacggggtttcaccgtgttgcccaggctgttctcgaactcctgaactcagccaatccacccgcctcggcctcccaaagtgctaggattacaggcgtgagccaccatgcccggcaaagaagcctatattttttcattcctgcagaatattgccggcatgagatcagcatgtattggcaaatgttttgtaagtggtgcatttagtccacaggttgaaaggctgctacaactttagcttcatctctttccgttccttaactcttgagccagtgctagcaatgtctcccacactgtggtcctgcgccctctcaaggctggttatttcaacttcacctcggcaacaattacttacctggcccaggaggatgggcccgttgtggtgagttgcccaaacccttagctggatggaatttggatctgccttcccttaaaatctcttgtggtgggggtaagagggggatgaagagaggttgattaatagataccaaaatacagttaggactgggcgcagtggctcacacctgtaatctagcatttttggaggccgaggtgggcagatcacctaaggtcaggagttcaagaccagcctggccaacatgcagaagccccatctctactacaaatacaaaaattagctgggcgtggtggcaggcgcctgtaatcccagctacttgggaggctggagcaagagaatcacttgaacccaggaggcagaggttgcagtgagccgagatcacactactgcacttcagcctgggcgacagagtgagactccgtctcaaaaaatatatatatatagttagaaagaataagacctagtgttcgatagtttagtagggtgactatagttaacagtaatctaatgtatatttcaaaatagccagatgagaagcatttgaacatttccatcataaagaaaagataaatgcggccagacgtggtggctcacgcctgtaatcccagtactttgggaggccaaggcaggtggattgcttgagcccaggagttggagaccagcctgggcaacatggtgagacccccatttcaaataattagccaggcatggtgcacgtgcctgtgatcccaggtactcaggaggctgaggtgggaggattgcttgagccccagaggttgaggctgcagtgagccattttattgccactgcattccagcctgggcaacagagtgagaccctgtctcaaaaaaaagataaatgtttaaggtgatggatatccatctaaaaagtatagattgtaaaaacaaaaacctcttacagaaaatttacacagtagctactaaattctgagggagataacattaaccagacacttggtattgtcctaaggaagtatgtttcaaattaaagttctggactagagtgattgaaatggatgggagaggtgtaccatggccttccccttctcttcattccttctgccttccttttcatctggagtgtgtcatttgctgcctactgatgtccttgtctttctgatctgtcttctctgccactgtcagattcttcccagtctccactgttactctctccttcccttgcttagattgctcctgcttacggcatcagggctgagcttttctgcctctcactgcacccccctccagtagtctagctattttctgcctccagccttctctcccactctgcccatacagaccctacatcctaattaggccaagctacttcccataccttctcccccaactcagtccttattctttcctttgtgcctttgttctgtttgaagtacccttttccctccactccattatatctgaagccttctcaagacccagctttgagctatgtctccttgttttctgccttcagttcatattgctctttgctattcattcttttcttttttcttttctttttttcttttttttctttttgagacagagtctcactctgtcacccaggctgcagtgcagtagcgcaatcttggctcactgcaacctccacttcccgggttcaagcgattctctgcctcagcctcccgagtaactaggacaacaggtgtgtgctaccgtgcccggctacttttttatatttttagtagaaatggggtttcaccatattggccaagctggtctcaaactcctgacctgtgatccgcccgcctcggcctcccaaagtactgggattacaggcgtgagccaccgtgcccggccactattcattctttcataaacatatattgactgcatctaaacttctgtagcacttatagtctatggcacttgaacatttaatcactgtcttcagtagtttgtttcttatttatagatcttccctctccccacccccacctcccaatttaattataaactccctgaggccagtaactgtcttagatttctgtttcccatatatgatagaaactcagtagtaaacagtcttttgattgatgtaaaggtcaatagacatttatgaagcccctgcaatgtgccagactctggggaataccaagaggattaatatactgtccaagtcctcaaaaagcttaagtcataaatgtataaagccaaataaatgtataaatttatgaagccaaaatgtgtgatcctccataccagtagggctgtaggctaattagtacacagtagggaagggacttaacacagtcaaccatagaatgaaaagaactaacattcattgcaccttctgcattttcgtttttcataaactacatggaaccatattcttctaaacctagcggtgttttcacatccggtatcatttctgctttcagaaccaacctcaggactctttggttctacctggtagttgatgggttaatagacataaaatcaaaggctttgctgccactttggaataaagttgtttgcagtgtgctccaaactcttggcttcctctccaagacaaaggaatgtggaccagactcaacccctcctctaataatgtacatttgggtagggctttatacttcattatatatttttgctatttcatttgagcctcacattaaccctgtgaagtagtggatttttgctggaggattaagtaaatgattaccaagggtaagtcattccacgcacaccttgccctgtagagggaccagtggtggtgagcaacttcactctttgcagagtctgaggctcagacagaagaatttggctttaatttcagttgcatgcctggcctaccttgtttaatatatgttctccatggggtatttctcaggtcttctggctcctaggtactcctctttataacacactaagagagaatcatccaactctctctagccaaaagctttccctcatcttcttgaagttcttctgagcctttgggaactaagactctaatgcatagagttgggttggttgggactgccctttctcagagtagatgaggtggaacttcatgaggtggacttcccttaatgtcgttcttttcttcttttcagattggctctaccagtgcacctggacagggaggaatcctggctcagcgggagtttgacaggcgattctcccctcattttgtaagctttctagtgttctctctcatcagttccttggtatgagaatgcccttttggttctggaccctcttggcttccacagatttgttttgttggttggttcttgccctgtgtgttttttggtgtctgatatagatactcatcaaatagattgatttagccatgtccagagatttttggcaatgagatcacaattgccaaaaccataaaactgacttaagtagagtcccatctttgagtagatacccatcttaaactcctgggtctattttgaggtttaaaaaaaaaaatctgattagattcagagggtcatagatcattgggtaggttaagtgggaactttactgtggtctagtctaggaaagaattttttgaagatgagcctgaagtactgaatgctggaattcattcagtgaataagtatgatgttccagattatgtgctcattctgtgctctgctttggggacacagtgatgaataagacacagtcccttccattaaagatcttacaggctggcgaggcaccatggctcatgcctgtaatgccagtgctttgggaggcagaggcgagaggaccacttgcggccaagagtttgaggctgcagtgagccatgatcacaccactgcactctagcctgggtgacacagcaaaaccctgcctctgaaaataacaagatcttacgagctcatagaggactcaaaatagtaaatggggaggctgaggcaggggaattgcttgagcccgggatgcggaggttgcagtgagccaagatcgagccactgcactctagctgcctggacaacaagagcgaaacgctgtcaaaaaaaaaaaaggtaaatggggaaaatgctgtgatagaggttatatgccaggtgctggaggagcctgcagcaggaacatctaatgagaggggactttctggaggaggtaaggaagggcaggcacttgaggagagagagcagccgagattgagaaaagcatggtgtgattcaggaatggcaagtagtttatcaaggctgaagggcagaatgtgaggtggaggaatggaaaagagggggcctgaagtgtaaacaagggttagatcataggtggcttgactgtcaggggcaagaccagggcatctccattctcaaaaattgtctggaacagaagcttctcttccagtctggtttgggtcgggtgagtcctttggtttcacagcttgaaagattggtctttagagagccattctatatcaggattggtcagagaggaaccttcttgcctaaagttctgcttaaaatttgtgctgagttaggcctggtggtgtgtacctataatctctgctggaggatcgcttgagcccaggagtttgaggctgcagtggctatgattgtgccactgcactccaacctgagcaacagagtgagactctatctctaaaaaaataaaataaaaattaagaaaatttaggctgggtgttgtggctcacacctgtaattccagcactttgggaggtcaaggcaggagaatcacttgagcccaggaattggagaccggcttgggcaacatagtgatattttgcctctacaaaaaataaaaaaaaaattagccaggtgtggtggtacgcccctgtgatcctagctactcaggaggctgaagtgggaggattacttaagcccaggagatcaaggctgcggtgagccgtgaccatgccactccactccagcctgggcaacagagcaagaccttgtatcggccgggcgcggtggctcatgcctgtaatcccagcactttgggaggccgaggtgggcagatcataaggtcaggagttcaagaccagcctgaccaacatggtgaaacccagtctctactaaagatacaaaaattagccaggtgtggtggcatgcgcctgtaatcccagctactggggaggctgaggcaggaaaatcatttgaaccctggaggcggaggttgcagtgagctgagaatgtgccactgcataccagcctaggtgacagggcgagactccgtctcaaaaaaaaaaactaagactttgtatcaaaaataaataaatttgggctagactgctccctttctcattggactcatattttccctggcttctcctgtgccctaatccagacttctaagcaaggtctttgttttcctttacagctggactgggcagcctttggggtcatgacccttccctccatcggcatccccctgctattgtggtactccagcaagaggaaatatgacactcccaaaacgaagaagaactgattggggcttccacagccctcctctcccaagaaatccaggctcctctcccaagaaatccaggtgctttccagactccaaagggtatcttaaatgcaatctcttctctcttagcccttggccactttctcctggatcctgccctgctctcagccatagtgaaggaccagccctaggagtctgcgagagcctccttggttccatcgtgaagccataaacaggaatgcctttggcaatagccttgagcctagagggccctctgatgccccactgaggtgctgttggtttattgctggcaacgtgaattctctcaggggtctaggaggggcattttggagactgcctgacaccacccctatcccctgcctccccctctcagaagagggtggaagatgaaatgaaagctatgggactcttggaggatacccagtgtctattctgggttagagaagtgcttactaaggggttttctaataaaaacaaatgccacattgacttgtctgttttcttagcccccgggtgaacacaggtgattattggaactcagtctttgcccagacccctgggcaagcgagctgggttctggccttgctgcaggggttgtgggcgggtcctgttcccatggagatatctgcccttttgaatcttttgcttccatcccttattttcctctgattgttgttctcatcagtcaccacctattgccgtacaccttccttgccaggcagctcctcttcacagctggagaatgtaggatggggaaagatggtctgcagaggaacagctattgtcatccccttagatctcatctgatttattgactcagtatttgttttttttgtgggttttttttttttttttgagatggaatctcgctctgtcacctagtggtgaacaccggtgcctggcacctgagtgttcttgaaaagctatctctcatgcctgacttctagccctttctcgttaagaactagctttttggccaggtgcggtggctcatgcctgtaatcccagcactttgggaggccgaggtgggcggatcacaaggtcaggagatcgagaccatcctggccaacgtggtgaaaccctgtctttactaaaagtacaaaaaattagctgggcgcagtggcatgggcctgtagtcccagcagattgtgccactgcactccagcctggtgacagagggagactctgtttcaaaagaaaaaaaaaaaagaactaactttactttttttttttttttttttttttgagatggagtcttgctctgtcacccatgctggagtgcagtggcatgatctcggctcactgcaagctccacctcccgggttcacgccattctcctgcctcagccttccgagtagctgggactacaggcgcccgccaccatgcccggctaatttcttttttgtatttttggtagagacggggtttcaccgtgttagccaggatggtctcgatctcctgaccttgtgatccgcctgcctcggcctcccaaagtgctgggattacaggcatgagccaccgcacccggccaaaactagattttcttgagctttaattttattttctttttttgagatggagtctcgctctgttgcccagcctacaatgcagtgttgtgatcttggctcactgcaacctccacctcctgggttcaagtgattctcctgcctcggcctcccgagtagctgggattacaggcacctgccaccatgcctggctaatttttgtattttagtagagacggggttttactatgtaggtcaagctggtctcgaactcctgatctcaaatgatctgcccacctcagcctcccaaagtgccaggattacaggtgtgagccagccaccgcgcctggcccttttttttttttttttttttttttttttttgagatggagtcttgctctgttgcccaggatggagtgcagtggtgtaatcccagctcactgcaacctctgcctcccgagttcaagcagttctcctgcctcagcttctcaagtagctgggattagaggtgcacaccaccacacccggctgatttttgtgtttttagtagagacagggtttcaccatgttggtcaggctggtctcgaactcctgacctcaagtgatctgtctgcctcagcctcctaaagtgctgggattacaggtgtgagccaccacacctggcctgaatttacttgtaatgcttctgttctttgagctctggcagggaagaagtacctggatcccttgagttgggctctaagcgtgacctgtggaaaggcagtgacttttgctgctgcagcagtggggagaagccactctgagctgactctgtccaactcaggaatgccgtggtctgagaacagcctcccaggcaagagggaagcccaacaaacaccggctttgtttctgctaccgagtttcccagtttagattctgctcccccggctcccctgcccaactggtttaacctttctttagcccagcaatcagagcctccaggcccaggaggatgaaaagaacatggagacgagaggctccaaatggagtagccctctgccagctcacatccctctttcaggggctgcagcttggacatcccaagactggccaggttacaggcaaggaggatatatttgcttttgttcattgtgttcctggtggaaacctgggacttgctcaggagaatggggaggataggccaatgagtcagaggcttgggtttgagaacaggtgtggggaagggaaagggaactagtctgatatgcatcattttgcactccaggactatggagtgttagcctctgaaggaggaaatggtattttccatctgtgtagtctccaaggaaaatgtaatgagttaacctatgggcggggggagtggggggtggtggcggggttctggcttagagaatagggtaaacttcataactctggaacataatacaggtgcttcttgacttccaatagggttatgtccgataggtttatatgatatgcgtatcaggatgtaaccctgttgtaaattgaaaatgttttaagttgaaaatgcatttaatacacttaacatatcaaacatcataactttgcccagcctaccttaaacatgctcagaacacttacattagcctacagttgggcaaaatcacctaacacaaagcctattttattatttttatttattttttgagatggagtctcactctgtcacccaggctggagtgcagtggtgcaatctcagctcactgcaaccttcacttcccgggttcaagcaattctcatgcctcagcctccctagtagctgggattacaggtgcccgccaccatgcctggctaatttttgtattttattattattttttttttctgagacagaatctcactctttcccccaggctggagtgcagtggcccaatctcaactcactgcaacctccgcttcccaggttcaaacaattctgcttcagcctcccgagtagctgggactacaggcatgcgccaccacgcccggctaatttttgtattttttagtagtgacagggtttcaccatgttggccaggctggtctcaaactcctgatctcatgatctgcccgcctcggtctcccaaagtgctgggattacaggcatgagccaccgtacctggcctaatttttatattcttagtagagatgagggttcaccatgttggccaggctggtctcaaactcctgagctcaagtgatccacccacctcagcctcccaaagtgctgggattacaggcatgagccactgtgcctggcccagaaagcctattttataataaagtgttgaatatctcatgtaatttattgactactgtactgaaagtgaaaaacagaatggttttatggtactcggaagaggatttctactgaatgtgtatggctctcacactcttgtgaagtcgaaaatcttaagtcaaaccatcataagtcgggaccatctgtataagattccttccttaatctgaactctgagaggtgctcctttcccaaaagctgggggcgtctttattgtacctttcccttacaaaactcagcactttgtgtcctggcccttgtcatgaagaaggcaactaggagggaaacccaggcctgacacagatgacaagagaagcattgtgaagacagttggtgtcacaggcaccttgaaacaaggccaaagctagatacctcatctcctaagagatcagctttcttggagtcagaatggaatgtgaacctcccttaagtagtggtgttggagaatataagagcctctaaaatctatagacagaaagtcttagctggaatagttggctttaggattgagccctcttaacttcttgaggtaatttaataggaggctgagtggcagacaacactcctccgctctaactgaaaaccaccctagggaggtgtgaaccttgatctcaggattgtgtgcagatctgtgagggaggaggaaagtaagcactgatcccacatccttcctggaggctgggtacccaaactgaggctcctccctaaaaggcaatacagacagtaggtcagccaccagcatgttccaggtgtccccactcctggagactagccctccagccctccctcattgtgcagactttcagctggcatcggctcacccacacaccccaccctggtaccaggaggagccaggtgccttgatttccacccccttcctgtactcggctttggcactcgaagaaagtgagtgggaaacgggtataagaatttctacaggccgggtgtggtggcacacgcctgtaatctcagcactttgggaggctgaggtgggcggatcacctgaggtcaggagttcaagaccagcctggccaaaatggcaaaatctcgtctctactataaatacaaaaagtagccaggtgtggcggacgcctataatctcagctactcgggaggctgaggcaggaggactgcttgagcccaggagttcaagtcttcagtgagccatgatcatgccacagcactccagcctgggtgacagagtgagaccctatctcaacggaaaagaaaaattatatatatataatatatatctgcccaccttgggcagattatatatatttatatataatatatataatatatattatttatttatatataatgtatatataatatatattatttatttatatataatatatattatataaaaatataaatataaaaatatatttttatataatatatattttatatatataaatatacatatttatatattatatatatattatatataaaatagctctccctcttggagcctgtttcctcctctgcacaatcatgaaattgtttaattggaggatttttgaggacccctcaccagtacgatagggctggtattacccctttgttgttatgcagtgaggaacatgaggaacaaccactgtcactttctcatcttgtgggtgaggtccagccaggtggggaagggcacacacagttctacatccagcagcagctgctgtcttccactcactgacagagagaatttttgagcaaggatagaccatagattacctaatttgatcctctcatttaatagatcaggaaagataaggggtgaagcggcttgtccaaggttgcccagccagtggcagctagcatatttatttattatggacccagcatttatgttccactgtttgcacatgtttcatttaacatctgcattttacagatgaggggatgaggctaaataggtggcacaaggtcctgcaactagtgacttggcagaggcagccaagatcttccagctctaatatgccctttctactagcccacaggaggcgaggagtgctcccctttacctcaggaagtccgatgtccgccccagctgtcttctgccccagggaaagcagtgaaggtgagtcagcccccgccccaccccagaagctgttatctgggaagagagttggggagctggtcaaatatcctgccgcctggtatccacaacaagccgtgagccccggatatgctgagttgcttggtcacccctgttcctggtgctgacgctagggcccttctcagtgcagctgcccttgtaactgctccaccctgtactttcatcacaaaaaaatacaatctttcctcctccattgctgtaacctgcctcttaaagggaccgacaatcaggtttttttgtttgtttttttggtttttttgagatggagtcttgctctgttgcccaggctggattgcagtggtgtgattttggctggctgtaacctctgcatgccgggttcaagtgattctcctgcctcagcctccccagtagctaggattacaggtgcgcaccaccacgcctggctaatttttgtatttttagtagagacggggtttcaccacgttggccaggctggtctctaactcctgacctcaagtgatccgcccgcctcggcctcccaaagtgctgggattataggcatgagccaccatgcccggctgacaatcagttttgtagctgaatttgagagggcaaaggacaccactgacctgaggaccctgctgtgaagtaggtttccagctgcagctgtttctttcccagagatgtccgctttctcccctcctcagtttctccctgaccctgttggaggaagggtaaacgttccctggggtgtcaggttcccacatactctctcctcagggtgaccccagcatggcttcttgtacctgtttctacacaagtctgaattttgtagccaccctgtgttcaaggaatgctgaagacagagggacccaggagtccctgggatcagtaatggcactgaaagagttaaggtcctgggcacagcactgtttagggtgtttgaagtagggcggggaaaggaagggctacagtggatgaagaggcagctgatctggactggaatgagtcccccctttctcttatgcaaacttctggaccatgaacagctcccttaaaaggaccaagagagaggggacccccaccaaagtgctggactgggttcttaaaggggccacctgaagcaggactttttcccacactgaagtcaccaactgacagcagaaacaggtcccccatctttgggatatctcccagttctggtgagtttccctcttccctttcctgggtccttaccctcagaccctctcttgccacacccatctggcatagcacccagaacacatgcccaggaaactggcaggaggtagaagaagactggttggtcttgacccttttcttctctatccgccataaataaagggctagtctgggtcccaagcccctgatagaataagcatatagctacaggtccagcagaaaggaagagggcagggtccctaagttcactttactaaccaattaaaaaaaaaaaaaaggtggtcacacttggaagcccagagcagcaaaattcctgactgacttacgaacctagtacatcaaggacatggggatgatttagggagagtgtctgagatgcctgtggctgacttagtagaggggtgtgtggttagattagggggctggggatgccttgaaattcaggaactaagtacagatgataatgcctctcaggagacaacccggaagctgataggacacatggcttttgcccatactggcctctgccccactaagggatggtagccaggtcccaccattgtatttgtgcatagacccttgtgggtcctcttttctgtgcctgacacttacaaagtgctaaaataatctttgctgaatgaatggatcctctatatcttttactttcctttcatttttggaattgtggcaccactctctggcagtggacaggaagatcagagaaagagaatgagttccaggacaccagcgttcagccaagtcaggcggatgggtgaagcaggagggtgtcagagacttgggtgctcctgtcttggaacggggtatctagggagcaggtgggaaggaattgtagctcctggcttctttatctgaggcgaagagaagctctgctttagccgtctttgcagggcactgctggattaatggttcactttctacaggagaagaaatgttaggttaaattttgaaccatcgaagagtttttgtgaccctgtgtcccacccccagggccaggagatttggaggagagccagtacaacatgtcatttggcctctcccttccacctcagtctttattatcctgttctcttgggtcttctccaatattggccacctcggtagatttaggatcccagagccagactcagaaagcttctcagtctgcgaaagggccggccagcattgcctccaggccacaacgcctggctgtttggttactgtcagcagttcctcccctatgttcagtgtttgctggcagcaaacataaccagagacctgcctgcgccccatcacctcattcagaggtctaagctaacagagggagcagaaaggatacattgaacttctttgggacccctatctcatttcttttggaagctgctgcttttctttggctggggtcggggaggtaggaatgaggtgggtaaaaataatgttgccggatttctttcaaagctagccacttggcctggtgtggtggcctgtaatcccagcactttgggaggctgaagtggggtggatcacctgaggtcaggagttcaagaccagcctgggcaacaaagcgagaccttgtttctacaaaaattacaaatattatcccagtgtggtgttgtgtgcctgtagtcctagctccttgggagtctgaggtgggaggattgcttgagcttgggaggtcaaggctgcagtgagcagaggtcgtgctactgtactccagcctgggcgaccgagtgagaccctgtctaaaaaaaaaaaaaaaccaaacatatggccgggcacggtggctcatgcctgtaatcccagcactttgggaggccgaggcagatggatcacctgaagccaggagttcgagaccagcctggccaacatggtgaaaccccatctctactaaaaaatataaaaattagccagaagtggtggcaggcacctgtaatcccagctactcgggaagctgaggcaggagaatcgcttgaacccgggaggtggaggttgcagtgagccaagattgcatcattgcactctagcctgggtgacaagaacaaaactccatctcaaaaaaaaaaatatatatatatatacatacacacatatatatacacacacacatatatatatatgcacacacacacatatatatatacacacacatacacacacacatacacacacacacacacagacacacacacacatatatattaggatcccagactcaggatatatctatatatcaggctttgtgggctctctgttgcaactaccaactttgctgtcataatgcaaaaacagccatagacaatatgtaaatgactgagcatggctgcgttccaaaaatactttatttacaagcactgaaatttgaatttcatataatattgtgtctcaaagtattcttttattttttttcaactattaaaaaaagatagcaggacagatttgtcccagaggctatagtttgctaacccttgctttaaatttccagaggccattctatccctttcttctccttgaagaggacaactttgtcagggctcatcagggtctcaaaggacagaaaagcactcatttcttcttgctcttcttgctctggttgcatacacttttccatcagaagtggtgtgtaactgttgccatcatagttatgttagtgtcagcccatgggttatttattgtctttctctaagagaaaacagtaggtgaccatcatatgatgcctatttctgcttctatcttgggcctcctgcctccttctttctttttctttctttcttttttttttttttttttttttgagatggagtctcgctctgtcgccaggctggagtgcagtggtgtgatctcagctcactgcaacctccacctcctgggttcaagtgattttcccacctcagcctccctagcagctgggactacaggtgcacaccaccatgcccagctaattttttttgtttgttttttgagacagagtctcactctgttgcccaggctggagtgcagtggtgcaatctcggctcactgcaacccccgcctcccaggttcaagcgattctcctgccttagcctcctgagtagctgggattacaggcatgcaccaccacacctggctaatttttttttgtatttttagtagagacagggtttctccatgttggtcaggctggtctcgaactcctgacctcagatgatccacccgccttggcctcccaaaatgctgggattacaggtgtgagccaccatgccaggccaatttttgtatttttagtacacatgtggtttcaccatgttggccaggatggtcttgatttcttgacctcatgatcttcccgcctcgcctcccaaagtgctgggattacaggcgtgagccaccacaccaggccaagcattattctttctagctctctgtttcaatataccctgccgtctctatgcctctaaataataataacaacaataataatagtatttattgagcacctaatatgtaccaaaaacagatggaagggggactaggtgcattgcatacattatcatcaagtctctcaacatccttacaaaataagtacaggcccagtggcttacgcctgtaatcctggcactttgggaggccgaggcaggcaaatcagttgagcccaggagtttgagaccagactgggcaacatggtgaaaccctgtctctactaaaaaataccaaaaaaaaaatcagccaggcatggtggtgcgcacttatagtcgcagctacttgggaggctgaggtggaagggtcacctgagcctgagaaatcaaggctgcagttagccatcatcgtgccactgcactcagcgtgggtgacagagagagagcctatctcaaaaaacaaaacaaacaggccgggcatggtggctcatgcctgtaatcccagcactttaggaggccgaggcaggtggatcacctgaggtcaggagttcgagaccagcctgaccaacatggagaaacccgtctctacagaaaatacaaaaattagcccggcatggtggtgggtgcctgtagtcccagctactcaggaggctgaggcaggagaatcgcttgaacccgggaggcagaggttgcagtaaaccgagatcgcaccactgcactccagcctgggtgacagagcgagactccatctcaaaacaaacaaacaaacaaacaaacaaaacccccaaaacaaagtaggtcttatcattccttttttttttttgagacagagttttgctcttattgccgaggctggaatgcaatggcacaatctcggctcacacaacctctgcctcccaggttcaagtgattctcctgcctcagcctcccgagtagctgggattacaggcatgtgccaccacgctggctaattttgtatttttagtagagatggggtttcaccatgttggtcaggctggtctcgaactcctgacctcagatgatccacccgcctcggcctctcaaagagctgggattacaggcatgagccacctcacccggcttctcattcccattttacgtgaatctgaagctcaaaaaagctggctgggcaggctgggtgcccaggctgggcatggtggtgcacacctgtaatcccagctactcgggaggctgaggcaggagaatagcttgaacccaggaggtggaggttgcagtgagccgagatcacgccattgcactccagcctgggcaacagagtgagactccatctctaaaaaaaaatttttttttttagagatggagtctcactgtgttgcccaggctggtcttgaatgcctggcctcaagtgatcctcctgccttagtctccctaagtgttgggattacagatatgagcccctgagcccagaccagccagcttttttttttttcttttttttttagccagagtttcactcttgttgcccaggctggaatgtgcaacggcacaatctcggctcaccgcaacctccgcctcccgggttcaagtgattctcctgtctcagcctccctagtagctgagattacaggtgtgcgccaccacacctggctaatttttgtatttttagtagagatggggtttcaccatattggccaggctggtctcaaactcctgaccttgtgatccacctgcctcagcctcccaaagtgttgggattacaggcgtgagccactgcactgggcccaaaaattttttttttacttagagcatggtggtgcatacctgtagtcccagctactggatgctaaagcaggaggatctcctgacccaggagtttgaggctgcagtgagctctgatcaaagctgcactccagccttagcaacagagccagaccctgtgtcaaaaacaaaaaaaaaagttaagttcccaaggttatgtggcttatgaaagtggcatagctaggccgggtgcgttggctcatgcctgtaatcccagcactttgggaggctgaggcgggcagatcacctgagctcaggagttcgagactagccctgccaacatgtctaaacctgtctctagtaaaaatacaaaaattagccgggcatggtggcaggcacttgtaatcccagctacttgggaggctgaggcagaagaatcgcttgaacccaggaggtggacgttacagtgagccaggattgtgccactgcattccagcctgggcgacagagcgagactccatctcaaaaaaaaaaaataaaataaagaaagagaaagaaaaaaagaaagtggcagagctagcaaatttgacagacttaaaagctgtaacaccctaaagaaattatggtctcagagttttgaataacagatgtctctctctattaaaatattatatattcccattccagctcccagtagaatgtctaagaaatctttgatgaccagtgcaatctgtggaggttatacacttggaggaagggacagcacacgctgatggtttgcagtggtgggaagaccatctgatccagaggcaggaagataagtaaaatgacttcttagagccccttcctgctttcccagctcccctcccccatctcaagcatctgatcccagacctatttcagaatctcctatctctttgctcagtggaagcagtgatatgacatgatgtgatctcatttgagggctaaataaagccattgtgtgagacccagccctggcctctcccctgcaccatttcctgagctcaagaggctaagggaaaatgggaggggggctaggagagttaatctaatggaaaaagaagcaacacgatgatgggacccccagtttgaatttcagacagtggaggagggaatattgctaggagggagttgaggaagccttgttaaacctcatctctttgagggacagaataaaaagtattggcatcatagcataggcagggttagtgggtggggatgaggatgtgagggagaaactgccagacagattccattttcacagagggcagagaccatgaatgaaatgacagagatgctggaaaaagggtagatctttgagaagaggtcagactccagttggtctgagctggaggaagaagggtgaacagttacacaaagatcttaagatctgaggtacctgtcagtggggccagggtgagtttcacaaagatcttaagatctgaggtacctgtcaatggggccagggtgacaggacaccatctctagcaggaacatccacacagacagaagaaaagcaaaggtctccagttcactgcacttccttcatcttgccaaattcaaccctgcaggctgggcgcagtggctcacatctgtaatcccagcacttcgggaagctgaggcaggaggatcgcctgggcccaggagtttgagaccaggctaggcaacatagtgagaccccatcgctataaaaaatttaagaccaggtgcagtggctcacacctgtaatcccagcactttgggaggccgaggtgggcggatcacctgaagtcaggagtttgagaccagcctggccaacatggtgaaaccccatctctactaaaaatacaaaaattagctgggtgtggtggtgcatgcctgtaatcccagctactcgggaggctgaggcaggagaatctcttgaacccaggaggaggaggttgcagtgagctgagattgcgctactgcactccagcctggcaacaaaagcaaaactccatctaaaacaaaacaaaacaaaacaaaaatttaaaagttagctggatgtggtggcatgcacctgtagtcctagctactcaggaggctaatgtgggaggattgcttgagcctgggaggcggaggctgcagtgaggcttgagggtgacagagggagagagatcctctctccaaaaaaaaaaaaaagaagaagaagaattcaaccgggtgggcacagctgagacaaggctaggaggtagaggttgaatacagggtgtaaagttcaaaccaactttcttcttctgggaggtccctgaattccagagctcacagtatctacgcagtgtccctgcctccccgtcacggcctctcagtttctgtcctatttccagcccccgttccccttttcctagtatatttccagttcctactcttctctccaccccagcttttcacagtatttttgtcaacctccctctgcctccaaatctcagctttggaggccactggttgggagggaccctgccatggcccttaggctctgacctgcttcctgtagatctgctcatcctgtttgtacccaacatacctgatggcacagggcccatttgtaggcagggagggagaggatctctcctggtggctggctaaggggttccctgtccattgctcccagacgcgatgagcacagatgggcacagggccatggccactctcctaggcttctccttttctctccttagacacccacccaatgggggaatagcattgccgtctgtagaggcctgagcacctgcctccctcccttccctgtggtaaacaggcacacagccaccccaggcacagcactttctttctttttttttttgagacggagtcttgctctattgcccaggctggagtgtaatggcgcgatctcggctcactgcaacctctgcctcctgggttcaagcgattctcctgcctcagcctcccaagtagcggggactacaggcacgtgccaccatgcctagctaatttttgcatttttagtagagacagggtttcaccatattggccaggctggtctcggactcctgacctcgtgatctgcccgccttggcctcccaaagtgctgggattacgggcgtgagcgactgcgcccagcctgtggcgcagcactttcttctcagctgctctgggtggggtgagggcagtgaacagattgcagtgacggaggaaagtagattgaagggacaataactgataacctggacttccctggggtggttaagacaacctggagaaggtctgacagccccacagaaagccttgaaagagggaaggttttgggtcccggcttcctgatccttctgggcactcctgatgtctaagtagctagaagtggtcccaggagaaagggagcctgggagactcattagagcagaaggtcgagagagacatggcctaagagtgaagtgtacagaggtatgcagtaaatgctatttcccttcctgcccttcctgcccctggtactctgggacttggcacttctttctggagtggggcttatcattttcaactttaagagcacctgagggttcttaattctgagacacactgaggcaagccatgatgccaaccgggagtgttgggcactgagaacaacgcccatttgggagagagtggaggaaatgtgtgctctgtggctgatgcttggagcccttctctttgcaccatggagagaggtcagactggctttcactctgcatatgaccagactcttagaagaagaaatcatgccgggcatggtggctcacacctgtaatcccagcactttgggaggcagaggtgggcagatcacctgaggtcaggagtttgataccagcctgatcaacatggagaaaccccatctctactaaaaaaaaatacaaaattagctgggcctggaggcgcatgcctgtaatcccagctactcaggaggctgaggcaggagaatcacttgaacccaggaggcagagattgcggtgaggtgagatcacgccatagcactccagcctgggcaacaagagtgaagctccatcagaagaaggagaagaagaggaagggggaggagagggagagggagaaagagaaatcacaacactttatcactcatgaaccttttctccctgctacttttttctaccttttttttttttttttttttgagatggaatcttgctgttgtcatgcaggctggagtgcaatggcacaatcttggctcactgtgacctccgcctcccaggttcaagtaattctcctgcctcagcctcccaagtagttgggattataggcgcccgctaccacgcccggctaattttttttcttttttttttgagacaaagtctcgctctgtcgcccaggctggagtccgacctcagctcactgcaagctccgcctcctgggttcatgccattctcctgcctcagtctcccgagtagctgggactacaggcacccgccaccacacccagctaatttttttgtatttttaatagagacggggtttcaccgtgttagccaggatgatcttgaacgcctgacctcgtgatccgcccacctcagcctcccaaagtgttgggattacaggagtgagccaccgtacccggcctccccctgctactttatctgcctaaaatcctctccctctaccctggccaaatcctaaccactttacccttccaggcacatctcaaaggccatctgcttatttctgtttcctcctcccctttaaaaacaaaaacaggcccagcgcagtggctcacgcctgtaatcccagcactttgggaggccaaggcgggcagatcatgaggtcaagagatcgagaccatcctggctaacacggtgaaaccccctctctactaaaaatacaaaaaattagctgggcatggtggcaggcacctgtaggcctagctactcgggaggctgaggcaagagaatggcagaatggcatgaacccgggaggtggagcttgcagtgagctgagattgcgccactgcactatggcctgggcgacagagcgagactctgtctcaaaaaaaaaacaaaaaaacaacgaaacaaaaaaaacaaggccgagcacggtggctcacgcttgtaatcccagcactttgggaggctgaggcggacggatcacctgaggttgggtgtttgagaccagcctggctaacatggtgaaaccccatttcttctaaaaatacaaattatccaggcatggtggggtgtgcctgtaatcccagctactcgggaggctgaggcaggagaatcgcttgaacccaggaggcagaggttgcagtgagctgagatcgcaccattgcactccagcttgggcaacaggagcgaaactctgtctcaaaaaacaaaacaaaacaaaacaaaagcaaacagtgtcttactctgtcacccaggctggagtgcagtggcatgatcatagctcactgcagccttgaactcctgggctcaagtgatcctcccacctcagcctcccaagtagctgggactataagcacgtgccaccacacccggctaacattttgtttttttgtggagacagtgtctcgctatgttgcccgggctggtctagaacagctgggctcaagcaatccacccacctcagcctcccaaagtgctggctgagccaccgcacctggccttttttgagtctcccaactggtcacgtgccctcactcctttaacagcctaaagccttttgttgaaacttctcttgtggcatttggcatatgtgagccagttatggagtcatctgtgatttgttcttttgcttgttcacacacacacacacacactcacccactcactagactctgattccttgaggataggaacaatatctatttctctttgcttggctttctgctatataagtcctcagtaaatggaataagaaggagacaatgaggatctctttatgtactagaaaggacactgaactgggatccagaaaacctaagttctagccttgagtctgcagctaattcacaatgtgaccctgaggtcacaatgtgtcacaatgtgaccctgaggtcacaatgtgtcacaatgtgacacattatccagttatgtgtctcagtaaagtgagtggtggctaggcactcctaagtccagctgactgtgacacacttctagtcccaaggtttcagagttctagaaccctgctcactcttatttcctgctgacgcagactggtctgtgtgtgtctcccacgaacagagccgtcccagacgtgttctgagcaggtggagacaaggtgcccgtgaggccacactggcctctgcctttctgcagttgaatccagagaacaactggaggaagaagagatggggaaataaaggaggggaatggctcgcatgctgtacccctccaaaggtcaggggctttccgggcccacggccgaaaacaaagacgtcttcagaagacatagttgggggcctggcagggagctcgagggcccactgaatacgtaagcccccaggggacctcctgtacctccttccttccaggcctagaccttggagaaaatgggaaagtgggaaggaactagataactctctagtcatctccctcaagagacaaccatccgaagaacaacaagaatcaaggagacctgggccctcagtcctttccctggagaaccagagctcaatcccatttgtgggcctttgggggaggatggatgctgccttccaaaatatgcctctccacagtggctcttacctccttctctcagggaagactgagggtgggagtgggagggaggtgtggagtcagggggagtatcaggacactggatcttcttgcttctgcctcccacggtgggtttcatagaaccacataatggtgtaatagaaccacaaaggaactcagagagcatatggcacaatctcctcattttacagataaggaaaccgaggcccaaagaactttcagagatttcttgagagaggtggtctcacggttgggacatttggcctgccccattgccaggcctttgccgggcttttggttgcaggctgaggacaacccaggatgtcttggattaactcatggtcccgcattgccacatgagatcagttgttcttgctcagacttctgcataggcttggtggactggagcagagagatcatctcttccccctcccttggaaaacccctgaccacttccccaaagtcagaggaagtcagaaagagaaggtccgggggtcagcatgaagagttcagtgtgagtgaacattgtaggggctgctggccatggaagggcactgtctctctgctttgacaatggtccccttgaacaagttcctttagctctggtgagtgaaccaaccttccctagctcccgggcagggctggctggtttcagtgaggggagaggaccctgggccttgtccctgaactggcttgggtgggaactcagatgagaagcaatgcctgcagggctcatggcaccttcctaagggtagctggctgaaagcagagatgcccaaatgcctgggccccccttatgtggcaccaactgtatctcagggtctttcaagtgtcacccacctttcacagtcaggcattaattctgccccttggttagagagggaagggagtcctgagtgcactatttggctgagcaggggcaaaggttggcatcagcaaccaggcaaggagggagaattcagcttgctcttgctgttcgccttcccctgaaccctggctttcttctggaggcagtactgccctttgaccagcaggggccactcttgcccacagccaactctgcagccctggcaaagcagagccccaaagtaggaccagtttgggtctgggctgtgcttatgccaacaggaagggctgggctgggggcaagcaacagggctgggctgaggcgaggcagtgttcctccctggtgcccgtcactggccactggatacagacggtagtggtggcgatgtgtgtttcaggaggagactgcaagcatcgggatgcccaggccccaaggaggccctcttcctgcagatccgagaaggactggacacctttctgggactgcagcaccagggtggctacgcctcccggctggtacggacagacagatccccatgaaggcccctgccttgctcctcctctcctgcccctcgcctgtctagccaccattctatcctacgtctcctctgttctgccagctgctgggtctctctgtgcccgggcattgctctggctccatctgagcgaatgggaatctatcgtctatgcacctctgtctgctcccctgggtctgtgtgctctgtccctgactccgggtaccctgcctctgtctctttctccaagactctgtttcttcctttctgtgtcggtgcctctgtgttgatgagggtgtatgtgttcctctctcagtaaaagggccctgttcccctagtaattataaccacttctttctgtggaccccacatttccccaatttggagctgaacttatttatttatttatttacttatgtattttgagacagggtctccctctgttgcccaggctggagtgcagtggcgcgatcttggctcactgcaacctctgcctcctgggatcaagttattttcctgcctcagcctcccaagcagcttggattacaggcgcctgccaccacactattggggaacctgccccgatagtcatgtgggttcttttctattttccctaagcgtcggccagtttgataaataaagggacagagtacaaaagagagaaattttaaagctgggcatccgggggagacatcacatgtcggtaggttccgtgatgccccacaagccgcaaaaccggtaaggttttattagggactttcaaaaggggacggagtgtacgaatagggtgtgggtcacaaagatcacgtacttcacaaggtaatagaatatcacaaggcaaatggaggcagggcgagatcacaggaccagaggaccagggcgaaattaaaattgctaatgaagtttcgggcaccattgttattggtaacatcttatcaggagacagggttttgagagcaaccggtctgaccaaaatttattaggcgggaattttctcttcctaataagcctgggagcactatgggagactagggtttatttcatccctacagtctggaccatagaagacggccacacccaagggggccatttatagacccaccctcaggggtgcattctctttctcagggatgttccttgctgagaaaaagaattcagcgatatttctcccatttgcttttgaaagaagagaaatatggctctgttccacccggctcaccggtggtcagagtttaaggttatctctcttattccctgaacaattgctgttatcctgttcttttttcaaggtgcccacatttcatattgttcaaacacacatgctgtacaatttgtgcagttaacgcaattatcacagagtcctgaggcgacatacatcctcctcagctgacaggattaagaaagtaaagtaaagacaggcataggaaatcacaagggtattgattggggaagtggtaagtgtccatgaaatcttcacaattttatgttccaagattgcagtaaagacaggtataggaaattataaaagtattaatttggggaactaataaatgtccatgaagtcttcacaatccacgttctgccatggcttcagccggtccctccgtttggggtccctgacttcccgcaacaccacaccctgcaaagttttgtatttttagtagagatgggttttcaccatgttggccaggctggtctcaagctcctggcctcaagtgatccactcaccttggcctctcaaagtgcagggattacaggtgtgagccaccatgcccagcctggagccgaacttattatctgtggaatgaaactaagatctggtaccctgaacaataataattctctaacaaaacaatcataggatgatcgatggagaaaggatatagagattgcccagccttctggcttaagtaaacacaactggggggatcttcaaccagggtttaaggaccattaaggatacagaagggctttggagaccccactgggcctgctagccagcagaccctgagtacactgagatgtctcaagtctgctggctaaaggttgcctccccttcagctcatcatctagctggccaggggttccaaccctggcctcattgtttgggcgcctgtggtttcggggagaggctgaagggagcagtatatagcctatcagggaagcagcaaaaaacaaaacaaaacaaaacaaagcaaaacaaaaactccatgtcatcccatcacctgctttttttatttttattttttgagatggagtcttggtttgttgcctaggctggagtgcagtggcacgatctcggctcactgcaaactccgcctcccggatacaaacaattctcctgcctcagcctcctgagtagctggcattacaggggcctgccaccacgcctggctaatttttctatttttagtagacacagagtttcaccgtgttgaccatgctggtctcaaactcctgacctcaagtgatcccatcaaccgcttttctccatcagcatctttgcatgtctcccctgatccccatttcaatgtactacagtagaaagaacaggatttcggagtcgaactgactgctagatccttcatttatttacccgctgagcaatttattttatctttctgaaaatcagaataataaattgtcttttaaaattgtgattattaaatgaacaaaaggtgtcaaagtattcagcacagaggctggcacataagatgagctcaataggccgggcgcggtggcacacgcctgtaatcccagcactttgggaggctgaggcgggcggatcacgaggtcaggagatcgagaccatcccggctaaaaacggtgaaaccccgtctctactaaaaatacaaaaaattagccgggcgtagtggcgggcgcctgtagtcccagctacttgggaggctgaggcaggagaatggcgtgaacccgggaggcggagcttgcagtgagccgagatcccgccactgcactccagcctgggcgacagagcgagactctatctcaaaacaaaacaaagattaatgtaggatgaattgacctatttccaatattgagtttatctatccatgaaaaataatgtaactatttatttacttaggctgtctaaaaaaaagtcttcaaaaaaatatttctctacccttacttagtgaaaaaaatctatatatatatatgtatatatatattttttgagacggagtctcactctgttgcccaggctggagtgcattggtgtgatcttggctcactgcaacctccgcctcccaggttcaagcgattctcctgcctcagcctcccaagtagctgggactacaggcgtgtgccaccaacccgggctaattttttgtgtttttattagagacggggtttcaccgtgttagccaggatggtctcaatctcctgaccttgtgatccacctgcctcggcctcccaaagtgctgggattacaggtgtgagccaccgcgccaggcctgcctgtttttttcattacctggctggcctctataggttgagtttgccatctctgaaaaccattcagggtaaatctctcttcttagatacttttatatactaagaaagcctgggcttgaactgcaacagagtaatgactgcaaaacagcggagtaacttcccaactatttaaagtgcaatatcccaatatgggttttggaaaggggtgggaggcctggatttgaagagaggccaagctgtggggaagtaaagagcatgaggggaggacagatgaagcctgcccttggtgtgaggactcttgacatgattccaggatcaggattcctgtcatccatctgctggccctttggaccactcggccactggcatgctttccaagtctgtacccgtgagtggcatcaactgtctcttggaccgttcggatacagatggtgagcaaaagtagggagcaaagcagaggtggccccttcccctatacatcttgttgccactcctcatagctagctgttcagggtccagatgtcctgtattatgtttagccacatacccttggaactcctagaatggctttattatttttttttcttttcttttttttttttttttttgagaccgagtctcactgtgttgcccaggctggagtgcagtggcgcaatctcacctcactgcaacctctgcctcctgggtttaagtgattctagtacctcagcatcctgagtagctgggactacagaagcgcgccaccacacccggctaatttttgtatttttagtagagaaagggtttcaccatgttggccaggctggtctcaaactcctgagctcaagtgattcgcctgccttggcctcccaaagtgctgggattacaggcgtgagccaccatgcctggcctcagaatggctttattcaaataagcaatctgaattctggactttggaattctgaaactcctaccaatgaaagcggacataggacatagtgaggttctccagcctcccctgtcaccagagatgcaagacagttacctgcaatataccttgtcctcaagatggagtattgggagctctgggtgaaacctctgaaacatcagtctcccagccactgtctccacataacccggtgctctgttcccatggctcctaaattcttcagctctgccctgcttagaccccgccctctctccctgctgcccactgcccgccctcaggaatagcgtcacatgcacctgcagcttgggaacctgatctaggtgaagcgggtgggggaggaagccctgggcgcctttgtctggctttagctagacacttctcatctccttttgtgttggcagggaatgtatcccagtcctctgccattgacctcaggaaacggtgagtgtgggggactcagaatccttcaaaagcctctataggggaacagcaatagggtctaggctatggttttgtagccccagtgggttccctgcttcctgaatcattcctccccttaacatttctgatctaagacctccaaatatccttccctgagctgcatagaattcaccctctcttctttggtttgggtgggctcaccaggttcccggtagctgcatgagatggggggagaaattaggagaaaaggagtatccagggcacagggtgtccattgaataatagagcatgggagttgcttgctgttgtcagtggtatagggtaaaagggcagatagactgttgaacagtcttagtgagggacaatgaccaaggaccatggatcagcttaggatggctcagataatagaccaatggggattggccctaaggagagctgggcaagggctgtggagctcccagcagagggcagggcctgaaggcagagttcaggtctggaggtggaggctgggagatttgaataactatgtaaataagcatgcaaaatcagcacctgcttatttggctcctatggctgaagcctgattagagtgggtcagccctctaagacagtgtggatgtgtaagcaagtaatggtccctttaagatatcaggctctgctttgtggtcctgaaaatctctagctgacacatcctcctggctctgggtttgggattagctcatgggatggggctgatgaaatcccaggaaattcagtccttattggctttaggcccagaggccttctccaaacagcagagagggtcgtacacagggctcttgttctgagaggagaaaatgccccccgggagagcctccgccccataccacttccgttggggagcagcatgaggaggctgggcctcccatcctgagcctggattaggtaggaaggaggagtctgtatttatctgggtggagcctggagttttcttcctaaatagaggggcctgggaaactgaaatgcccacatccaggaagtcctaggaggtcaggatgggggcttatctttctctcccaatccttcctctttcttccttcccattctggctctgctggtcatggcaccttcatccaccatctctcaggaagttatctttttcttcatttccagcattacctccatctcctcatgtcttctttttctctatgcagctgcagccagctggaaggacattcaggtacccgggtaggctcctccctgcgacagaccttcagcttcctctcgggcatgaccggaaaggccaaggtaggagtcagctggggaagcaggaggcttgggacccactgccctctccagttccctttctcccatcccaccatcgccacctcccaccactccccctattagaaactcagagcaatggttccattttttatttttttatttttttaagagagggggtttctgtctcccaggctggagtacaatggcacaatcatagctcactgcagcctctaactcttgggcccaggaaatcctcttgcctttacctcccaaagtgcagggattacaggtgtgagccactgtgcccagccaaatgcttcaaattttaaggaaacacatgctatctcttccagcctgtgtctctgtgtcccagtaaatcaccttttctctgctttcccctacgcatccagcttagcagtcagctgtggacagatggaaggggaaaagggccaggaacctcagaagctgaggaatggcctagccctccctctctttaggcctcacatagctgacaggtgggcagcggaaacctcaaccattggacataataatgataataattacagcactactttttacttcttcatagagtatcagggtttgcaaagtgcttttacactcataattttatgggtgggtacagcagctgaaggagttgaaattagaccacaggcagagtagaagctgggaaagtatatgattatggaagcacatgcatacccgtacatgtgcggccatgtgctgttctgatcccaggaagtgaaggcacattgttctcatccttattaccaaccgttgggctctggtgaaaccgggagctctgcctgctccttgaatttgtttccactttcttcatttactgtcagagtgagccgccccccttttcctcccctggcctccccaagtatgcatgtgctttccaactcggggcggcttctgagtattgaaagaaaccccagggaaatcatcatcatattcaccttgaagagccatgagattctcaccagtaaggttgcctgggctcctcccagccccacccgcagtgccagggttctcccctcttccagcctttttttagccaagattcccttttctctgggtgggctgggaaggtcaagatgaaagcaggtcatgttgttagcacctctcaccacaggccatgggtcgggagttgaggctaatggaggcatgagactgggtgagtctcagaagaggagcagctggagaatctgaaagctgatgggaggggagggcaggtgggacagagaggtttctctcccatgggggaacggagatctcgaaggaacaaagcaaaagcagaaaccttggggtctgagtctcaccttcctacaggctgtctcactgcagggtaggggagtctgctagtggaatcactcccttttcttgccatgggaatggtaggggaagtcagtactgcccaggggccatccagatcccggttggtctgtttgtccacccttgacctaacagtctgatggagggttgagcaacctggtgaaggggaatgagggcagagactctggagcccagatgggaaagagggaagcgccagagtgagtcaggacattgcctcgctcagcctttcctccccacgtctgtcatcctgtcttcctctgtttccctctccaccatctcctgctacatcttccttccaccttcatgaatgtgtgggcctgcttcacttaatctctttctccataagcagtaaacatcagggggtggggctggagagaagctcagtcaagcagtgagagaaggaagtagcttagtccctcctacttgagtagcattgcacacttgatgaaacactttcaactcatttaattcttataacaattctggcaaagataagtatttcaatctcaattctacagacaaatacttaaaggttagttactttgcccaagatctcacagctcataagaggtggcgccgtattagaaactcagggctttggctgtgtattgccactgtttctctcaatagccgtaacacaacagttcattccctctcatccttcccttcttccagcttctggctggatggccacttaaggcaatttggccttaatcacctcctcccagaatatacaaggtccagaccaatagaagaaagaagaaaaacaaaccaccttgggacagtgtagagcttgggcttgggtatcctcgggagacccatctcttctccaactggccgagactttggcaaccaggttcttccctgggacctcctccctacccctgaaatgggagggacacatttcgtcaagttaaatgggctaaagaaggtgatggctatttttagatcctggtagaaatgtttgtttctgtgtatctaaaaaattatttctgaaaatctggaagatatcactggataggagtagagggggcgctggaatgaagaagggtcttggaaaaggggggcaggtgacaccaaggagaagggaaaagtgttcattgttcaagaggatatagaaaacggaaactgagtcaagctgcaggccaagctcactaaacacaggtgtttttaaaggcagaacacttttcttttccctgtccctagtccctttccttgttattcatctcctaaggggaagaagagggcatagggtgaggggtagggtaacagcaggtgggatggaaagtagactgaaggttggggtgggagacagaaaagagttggagggtcgggtcctcttctttcatagagaccttcttagttgagttgagggaccatgaggtcgcttgaaaaaccccagggttcaaattctatgtttcctgggtacccaggctggagtgtggccctttaagattctatccatagcttgcagcaccctcctgccccaggcctgggagagaagctgaggtcccaccccagatcttgtctctgggcctccagtgggtggaaccttgaggccaagattctagcctctggctgtctgtttttaaatttagtacattcctgagtcttggctgcccacctcaggggaggtgagtctggagttctggggccaggagcctcaggcctcttggtttgggggagttcctacaccctccccgtaggtatacttggcaggtgcaagccaggaagaacaagctgtggccctggggaagtccttcctgctttctaatgtccatccagcctgaactgggcacggtttatttcctcttcctttttcctggtctttgctatttaaggattctaaacaggggaatgggtgaagaaggaggtgaaggagttgctaggaaggaggggaagccggaggggcagtgtgggggtagtgctgggggtgaggagcccaaccagctcagccagtggtgaggtagtggagcccaaaaatagtggcagaggctaaaattggcacctacaagagtgctgagttgggcttgaaacctgcagcctggccccactgctgagccagggcagagaactgctggatctgggttgggtctcccctccctcccttcttctcccacgccctttggggccagaatcaggcaggaccctgctaaccgaaggctctgtcccaggcctctctgtgcttctggtttctccagagaaatgggagaccctgagaggcagaaatgaacttcactgtaagtgatcatagttagactggaggaggaattttcccaatagcaggaaactcacccaaaggctggctcaggctggggaaaagggtccagagagatgaatgccccaccttaccctgcttcttggggagaggctggttgggccctaactttctttgactagggcaggctggtttctggtctttcagttccggcttaacttgcaacagagagaactgcagttagacacatggaaggccttcggtaaaagtggagaatcccaacctagtcccccaaagtagctggcagaggcggagctaggaggagggcagagtggggtcaggaaggccccagaagggtggggcatgtgggagaattctctcctctctgttcttcgacctctgggagtgaatcctacccttcccgtgtactgaagatccagcgtttagttctcctttgatttcctctccctctggccacccctgcccccaatcgtaaaaggggtcagtctgctcaggcctgctttgatgggaccccgaaggccaggaaggaactggtcctgggttttctaagagctgggggcggatggaattctcctgcctgcgggtctttaaagactgaggtaacgcagtaggggagggaaaaagggagggcgaggggagaagggaagaaggggagggcagaggggaaagggccaacctgggtccggcgagggctgcggggctgggttttaggaaaagaagagctaagaggcgggtctctggggctagagggcgcccccaggcgctggaggggaaataggcagaggggcctctcaaacctgtcctaggaccctcgtacctctccgagctgcccccacacaaaccctggcgtcccgtcctgcgcgcgggcaccccgccctccctccgctccgcctacccccttcctgagcttgggcgggggaggagactcgggtttgaggaactggtgctgggtgccgggcgaggggagtcagacttcctgtccccgagaccaacgcgtgcgggccgaacccctccccccgccttcccccaacaatacaggacgccggggtccgcgccgcgtcctccctggtccccccgtccgattatgtctcggatcgaatccctcacgcgggcgcggatcgaccggagcagagagctggcgagcaaggtgggctcggaaacccctctcctttcgccgcggtcctcgggtgctccccgaaccccggcacccgcggtgcatctcctgtctccccgcctgctttctgggcgccaaaatcgggcggagcggtggatcggcgagcggcgggacggggtgggtggggactgcgagcgagtgggtaggggtggggggagcggcagacgcgacggtgctgggatcccgggagggagcggagcggacctgggcttggtcgcctccaagccggcgggaccgagtgctttaggccgctcgaaagaaagttgctccggtaagggacggagcgggaagagggaggtgtgtgtctcgcgggtgggggcggtggaagctccggcacctcctctcaccccgggccccaccggcttgggcttggcgtggcgaccccccatcactccccaatcgctggcttggtcgttccccctttgtccccgccatccggcggaggggacgggagggggtggtttcccggcttcctcccaccaccaccaccacccctccaagacaaaagtcagctcctcctctcctcgcaaatggactttccagctgtgattcagttctcccctctgggtgggcgggtggctggggtcgggacggccgagggacggcttacttcccccaaaccatcacctctaggtgaagggagcagaggtctttgtgtagctgggctcctttcctccatcctgagcccttctgcctggaacatagggcctccatccctatctgccccgccagcctcctagctcttccttctcccaacctgaaacccttaggctgacacacctggcactatgcattgtgttccctgcccttcctcctcctcccccagcgctctcattctcttatctgctcgtcttggggtcccttcacctagcatttcatgagtctgggtgtataattatccacacgcctcccccatcatgacctcttggccactcctctccaagtaccctttatccctgcctttgtacccagccccattcccaagtgccctgacctttccacacccagaccccaggaaatgatgaagctgacttgcaggtgaataagtcagagctgaaaggaaggtggtgcctgcagacagcacctcccagctcctttggggcccccgcactgtacccattatcagaaaggacaggtcccagcccagagttggtttaatctctggcttctctccaacctgagtgccctactaccctggtgccagcctatgctgatcaccaacttcagccaagggagcagtaccccttaggagtccttaagggtgatggaaagccctcccctccacctccctggtagttcctagccaggctacctgtcttgatgctaaactgggagagacagaggttccatcctgggttgggggtggagggccagggaaagcagctttaaaaggactttccttagggggttgggattagattttgctatctggaaagcaactggggattcgagtagggcctaagacaaacagagggccggggtgaggtggctgaagtgtggtggaacagtggggtggcagacaggctcttcacagcctgcgccagcccaggccccagctccaaaagtctgtttattttttcaaccgtttgagctgagaccctggagtagagccaaggggggcgggggaggttttttgaaaccgcagaaatttggttccaccctaaaaaggaaagccatgggggagctggttgggggaagacctggctagggggtatagagagcggttctgggggggcaggtagctactgggatcccttttccattattgtggggagctgggacgtcagacatctgggtgttcatgctctgtttttgtttttgtttttggtggtggggggactggctcttctttctactatgggggctggctgtgtggggcaggtaatttgggaatctggctggcagcagggagtcgggggctgagtgggtggatctgagagggcaaagaggccaccggagaagggtggttgtcagtttgggccggtcggaaggggagggccacctccggaaaactgtggttacagaagggggagttggttcttagccaacaaaccctggatcccctctccccctccccccagcacaccagctgtctcctttctttttatactgtggtgggaagtagaggggcacccgctggaaaagacattatttgaagaagatggtgtcccctgctacctccttggggggatgggtcacagctaagccctgacacctcagcccctccccattccttgcctcattccctgggagctcctcctaggaggaggaatgtaagtttaacctgcccctttctctgtcccatcctcacaggatctctctgtgtagccccctccatgcttcctttttcttttcactccatttctgttctcccaggctgtcttcagtcctccacctcctctgttctctctgctctacttcctacctccacaagccccaaacctcacaggtcccctttctctctttagtcccctgttcttccctttctcctttcccaaaccccaaccatcatatcccttagaacaaagggtccttttctgccaagcagggaccagaggtccagggatggctgtggaggctgggggtccccttggaatctctgtggtgggcaggtggagtggggagtgtgcagagcgactatttctttgttctgaggaatggagaggtggctggctttgtgtgcaggactaggagtgcagtggagaggagagctgggggagcccaggagggagctgagagggctgacggtgttggaggagagtggaagaatggggggtcctcctggtggctgaggcttctggggacatagacaaaaattctaggggtcgtggaggttagggagagagttgagggggaggggagaagtgaggataggggaagggagtctaaagcttagggaagtcactgagtgacttgcaggaggttagatggggcctagagaaggacctactgaggccgaccagaggagttacagtggggtctgatcttagccactctggctgtggaatttgaccttggaatcaaggaggggacagatgtgaatgtgtgcatcccctgtgtgcatgttactggtgtgctggtgtgtcagtgtgtctgtctgcctgcctgccctcctattctgtacccagatgctctgggctactgttttgaacagtggtcagcaaagtagggggttcgtgctctctggccacgaggaagtagcttcatccttagcttcagtttctggttggaaatatcatctaggagctgagtgagcggattggttaggatttctgaagctggtaagagaaaaggctgagaggagctggctggacccttccgggtttgtttatgtctctttgggagagggtgggggtggggttgcaggcagcagctgcccccctcccaacccagccggcctgccttgtgccaggagggcagggagtcctggcacagctattgttcacttgcacaaatgcctgtctgtttgcatcgcttacccccccctctctttctgcttgtctctctctcctggcctgacaggtgtggccgcgtagggggcaggctgggttccaggatgcttgggtctcagggtccctaacctgatttattccttgtggcccttagcaatcctcttccgtttcacccgtacccactcccattgccagtgtctcatcttcattcactaagcaagcatttattaagtgcctttgtgtgtgcagtgatgtctttctgtgttgtttctggctttggcattagtgtttccacttggctgccttcccctctgcctcctgtcttcatcttgtccctggaagctcataaaggagcagggcccggctgagaccaccccaagccctcttctcagtcccacccccagcaatccctcacctcttcatttcccagccctatagctcctcctccaggactcagtgcccttcatagccaacggcgcctctgctgtccaggggctgagccacaggtgactcgaatcctggtggaatgctccacaggctctccggtcactattacagagggtgtggacagaggtgtcaccatcttggggaaggggctgctgccaggtacagctggaggagaggtgattctgagtactctgtgactctcccagaagtcttgatttggacatacctgagagagaagcaaaggcagctgagagagctgggcacagtggctcgcacctgtaatcctagcattttggaagaccaaggcagctggatcgcatgagctcaggaatttgagacaagcctgggcaacatagtgagacctcatctctacaaaaacattaagtttttaaaatctattattaaaaaaaaaaaagtcagatgagagcttagggcttgcttggagaagctctacctcgcctgggtggatctgcctggccttgctgcctgctgggagcccaggaagccaaagtcctagccttggcattgccttcccctccatgtacgtcactgtttcctcatcccttattctgggagacaaagtggagagaagaggggagactgtgtttgcctttgagcttttcagtagagatccacaatgccctctgccattgctcccatctttctttcttttttcttttctttttttttttttgagacagagtctcgctctgtcacccaggctggagtgcagtggcatgatcttggctcactgcaacctccacctcctgcgttcaagcaattctcctgcctcagcctcctgagtagttgggattacaggtgcccaccaccatacccggccaatttttgtatttttagtagagatggggttttgccatgttggccaggctggtctcaaactcctgatctcaagtgatctgcccgcctcggcctctcaaagtgttaggattataggcatgagccactgcgctcggcctggccctgtctttctttcccaaaagtgactgagatctgggatgacagtggaaggaagtttggggttggtcttctgacttccagaggaaaccctcagggtctaaactcaaaggaaataggagagaatggcttagagcccttcaggaggagggagaaaagagaaacaagaagagacagaaggttctaaagctctgataaggaaggaagagggtttccagaataggggccagggtgctactgagaccccatgtcttggtgtccatacatccttccttgcttctttgcttccttccttttctttcattttgagacatgtattgggtgcctattgtataccaggtattgtgctaagggctttcatattctttatttatccttgatgtagcagtagtgtggatgaaggtgtgtagcaagaagaacttcccatgggatttgtgagaaagagacagaatgactctaggtctgacgtgggtggctcacacctataattctagcactttggggaggctggggcaggaggatcacttgatcctaggagttcgagaccagcctgggcaacatagcaagacgctgtctctacaaaaaaaatttaaaaattaggtgagcatcatgatgcatgcctgtggtcccagctatttggagggctgaggtggaaggatcacttgagcccgggaggtcaaggctgcggtgagccatgatcatgccaatgtactccagtccaggcaacagagtgagaccctgtctcaaaaaaaaaaagaaaaaaaaaagtatctagatgctggagagcaaaggactgaaccaagcaggaagggcctctgagcactggggtgggtgttatggattgtggagtaatgggccctttttcttggtgcataggttgggtcttggaggtaaagggctgtcctacttgggcgtgggtaaatgggagaccaatgtgattatcttaagaatacctggaaaagagtaggacaaagaaccaaacaagcccactcactccacctctggagcaggcacccctggtaagcaggccctatgtccttccatcctcagaagcctgagccctggggcgggcacaggcaacctccgggacaatagcactaggcagtgccagggtcgcttgctgctgggcagtgcccatgctgggatgtgctgctgctgtggctgctgcccgctgctggcccacctagagcaggggtcacttcgagagagggtgagtgttgggaggtggaggaggcagggcccagagtaccagggctgtctgtggagcattgatgccagagagaggaagggccactagagaccctgttctctggctgccccagtcttctccctccctttgccactccatctgagctggtcagacagatgagtgtttgtggatgccacagggggagggtggagggcaaaggacagaggtcaggtgtggaagagagtactcgtagcagcactggggcagagctgcagcactgcccattctggagtgaccctggtccagccatgttgttttttttaatactattttcagcttgcttgcttttacttatgtgtgtatatatatatatgtatatattttttttttttatagagatgggtctcgctgtgttgctcaggttgttctcaaactcctggcctcaagcgatcctcccacctcagccccgcaaagtgctgggattacaggtgtgagccacctcaccggcctcttgcttttaattcaaatgtaatacatgctcaaacttttggtttgagttatatagaaggctgggagggcaggagaggaggagaaaagggagagtatatggcagtgggaagagatttttggacttggtgtttgaggtcctgtgaggttattattcaaaggtgaatttgaacttctttttttttttttttttttttttttgagacatagtctcactctgtggcccaggctggagtgcagtggcccaatctcaacccaccacaacctccaacctccccggttcaagcaattctcctgcctcagcctcccaagtagctgggattacaggtgcctgccactacgcccagctaattttttgtatttttagtagagatggggtttcaccatgttggtcaggctggtctcgaactcctgacctcaggtaatccacccgcctcgacctcccaaagtgctgggattgcaggtgtgagccactgcacccagcctgaatttgaacttctaaagaggtataatttggtgcaagataggtggaggttagaccaaagggagcattttctagtggtccgggtaggtaggtgccagaatagaaaaaaggaggccagaacattttagaggtttgagttcgaggctagaggcagctcagcttcctgaataagcctaggtagaggagcagttggcctgcgtgaggaggaggggaggagaggctgtgggcgggagaggagaacagtggcggagaagcaaggctgagaaagggaaggcagagcgggaggagcctaggagggagaccctgagaagagaagggaggacatagagagagcaggagacaggaggaggatgcgaaaaatggatgattggggatggggaggatgcatgaggggagaagggattgaccccaagacctctgggctctggacatcatcaggcaaacctggagcttgggaagagaggcaggaaagagaaggatcttgggcccaggcactgcagccccatgccctctgtccctgcactgttgactcagcccctccacacttcccctttctttctaccattttctgccccaagcaccaggcccgtgcatctcttcccctcctccacctctcagctgctggcgtggcctcgtggcctcggctgagtcagtactggtctcctagagtccgggctgagtgcttcccgctgaactgtaatcctctgtccccagtccaggtcctctgacttggggcttctaccctcagccatctggatcctgatttttgatttctgagagcctgggaaaccttggagggagtggtcttctcagcttctagtcctgctccaagagcggagggaaaatccagagatcagagtcacaactaaggaaggtcctagaatagtgggaagagtgatatccccctcttctcaccttctcaggctttttgggaatcacaggggcttgaagagggacagattggaggtcagggagaatgacttgacttgcagaggcaggggcactgggggaaatgggagacagcagagatggaaaatgcggctcagaggctccgaggaaggtgtgcgccatctgcggagatcaacactgaaggatggagggtagatgtcagaaaggacttcctaggatgggagagaccagttgggtaaggagcaatagaggaaactctcctaggttttaactctggaaagtagtatgagagggataaaagttagactgcaggagagattttccgctggaagcaaccaagatggctggctgagcttccttacttaaagatcccagagtggaagagtgacccaaaggcagctagctgcctttgcctcaaggttagtaggggacatgctgcctcccagacaggccctgtgtgccgtggctgagggttggtgaaaagagttagaggtctgggatcctgacccctgggttgggggtggcaggggaggcattctgcccccttcagccaatctaataaggggatctcctgccccccccactgtgactgccacagagacagcagatccaacactggttgtcatggttataagaggagctaactcccatagattggaaagcgctggtgagctggcaccctccgcttcgcctgctctcccctcctctctgcgcatcttccccctagcacagagaagagagtacagcagctcgggggtgagcagagctagggctgggaaggtggagtgaggacgcagagacctagagccagggagatgagtggcaacaggaggcagcccagccgtaggggccaggtaggtcagggacccagaacccatccgggctggctgccccagagcctggcctggtcactcccggacagctgcctctgacacccagttgcaggctctgctttaggaactggtgtctttccagcatcctcaggctggcattttttccttgcctctgcccccagcctgtctctctggactccaggcaccctggcattttccagcctcacttcctctccctctcatcccttccacagacccgggaaaaggagaagatgaaggaagccaaggatgcccgctataccaatgggcacctcttcaccaccatttcagtttcaggcatgaccatgtgctatgcctgtaacaagagcatcacagccaaggaagccctcatctgcccaagtaagttgtttggaccctgagagtcacccagactcggtgcccactgaccctgatcttttcatctgttttttctgcctggatccatgagggtcactcttctctctgatccccagctgggcccaaatgccagggccagttgcttgatcccttgctccctgtcctcactctgaggggtggtggctgttggaatatggcataagccggactatctgggaatgtgggggaggggaggctgtgctggctcctcttgcagctgtcatccaccaggcaccccccttgctccccgaacagctgctaagggttaggggaactgattggagaaggagcaggaatgttgtatgtgtggagggggtggggtggggggtgacagaggaactgggtggaaagctgccagccttgcagctggctctgcctgtcttcctgcgcagagctgggcattcaggacttcacagtccccttgcccctttctttctattgactatgggtggagcctgaaatctctgctgtttcaagcagaagatgtgattaggacccttcatctcaaatttctagtgagaaagagggaatgtagcagggatgtgtgtgttgaggggcaggggttagaattcctgcccttcatccacatctgagtgtagtcctgtctttagggagtataagccaggaattctttccttccccagtacacagagggctcctgctgccccctctccctcaattcctcctgaagttatggcagagatgcctctgattagagcaggattgaaggtattgtgacctgctactgaatagcggacaaaagctctagcctgtaaatccctatgaaacttggggaaggaacccccagaaaggaccagtgatgggcaacccgctcgggtccccttctacgctgtgggagctttgtcattttgctcttcacaataaagcttgctaccgctcaaaaaaaaaaaaaaaagaaagaaaagaaaaccagtgaagcctccctactttcctcactgttcaatttagagttgtgaggatgaggagggaaccccaatctagatccctatagagacctgacaaaattcccaatccggaagcttgttgccaggggaacaggggaggcgggcagcactattttgagagcaggtggaaagcggaggttcaatccagagacactgagtgttgggggtaggagaagggagctccaggggggtgggggcagctgcaacccccacttctgtctgccccctctgctccaccctgtttgccttgtatttgtggaagtgagcgtggtgctgggtattgtctgaaagagttagcagagtttccggtgttgttggatgggggaggggaagctggagagggccgggagctgagggcatgtctgggaagggcacggccagggtcccagtgcctaggctcagcgaatcctcctttcttcttctctcctaccccatggcaaggtggggtggaggatggcggagaagcagatggagtgtgggagctgtggatttgcctgagttgggggaacaggactccctgggcctggaagggagaaggccaggcttggtggggagttgcctgtcccttctttaccactggagccatcaatcagccttggagctgctgaggcccagccagagtccagggcatgtggtgcgagggaaggagcacggcctttggattcaggcccaccggagtgtaaacaccacctctcccactagccgtgtgacctctgatggacgatttagccactccaggacaggttcctcatacatgaaatgaggataactgaacctccctctacgggtggttaggattaagtaaatgtggaacatttactattataaaagctcagggaatgtaaatttcccctctgcccctagcccccattctggctgcctctgtgccatcttctgttctgtgggagtcctctcttccatctgccattcgcaaccaccttcgtgcttcttgagctcatctctggcagccagtgacccctgctcccctctggtccgcccttcaggccaccttggggtcaggattgcccatcccacttgattgtttaatttcattcagcacctatacccccctcacttcatttcctgcttgaaggaagagggaggtgggaggagagggactggggtgtggtaatggcccagaagtcggggaaggggggagagtccccgaggactgtgtggccaggaggagatgggtgtctgcatgtgggtgtgtcccctcctgtaccacccggccctcccttcaccctctctaccccaccctcccagcctgcaatgtgactatccacaaccgctgtaaagacaccctcgccaactgtaccaaggtcaagcagaaggtgagacggcagggagggcagagggctgggggagagggtagtgagtgtgcggtaccctcatgccttttccattcattccctaccctgtgtttctcaccacccacctcctcaccaaggggcagcccagaccctcaaccccaggcctcgggccccaagtaggccaggcctgttgctgcagacatgtccccacagcactgggctcaatcaccctgatccccttaaccatagtgccagctttctcctaagggggccggccacctagctcctgtcccatgcctctgggggtgatccttgggtgacagccattcttggtatctctctcctgctctctgtctcacagcaacagaaagcggccctgctgaagaacaacaccgccttgcagtccgtttctcttcgaagtaagagtgagtagttggggagtggaggaggtcccctaagaccctggaccccaggctgctcaacccatgggctctgctgccccactaaggttgttcccaggcatagcaccttcctcttcttgattggaagcagatagtgggggcctaagggagggttcggactcttggacttagaggcagaaggggagagagagtccgaatggggatgagggctggggatgggtggtcgcctgagcctggccgcagcctgcatttttatcagttatttacactgcatttcgggagtgttggtagcagctgtcaagtgtcaattcagacagctttggtgtaacagaaagagcatggcccttaggtataaagagcagagcctcagtccctgcctagccattacccaagtcaccctggacaagtctttttgtctttctgagctcctgtttgtttataggcttatgtcagggaggagataagtaagaaaaagctctttgtgaacattagagtatggcacaaatgtaaggtggcattctcattaccatctttcttgactagaggggctgaggtggagtgagaggatgcctcattcctcattgaggagcctaggaggcctcaatcctgggaagcaccagagtctgatgtttgcctgctgggcatctctcccccacagcaaccatccgggagcggccaagctcggccatctacccctccgacagcttccggcagtccctcctgggctcccgccgtggccgctcctccttgtctttagccaagagtgtttctaccaccaacattgctgggtgagcctctgtttggggaaaggggcagccagagagtgtggcagtggaggccaagggggtgctgagaggtccctttccatccctgagttcagaactgtagacagacaaataaggagaacttagggggaccgcctcttggatcctggctttggttccctacctgggaagggatcttttgcccgactgggggtgatgcagacagcctccactttcttcagacatttcaatgatgagtctcccctggggctgcgccggatcctctcacagtccacagactccctcaacatgcggaaccgaaccctatccgtggaatccctcattgacgaaggtgagcaggcctgggcccaggggagccctgaggaacatgaagaggggctgggggatgagaggctggtgggagtagcctggaaggacaaggagggaagggatctagagaagggccagggacccagggaagggaactcaagacctctgagttgcttgccctgctaatgtccagcagaggtaatctacagtgagctgatgagtgactttgagatggatgagaaggactttgcagctgactcttggagtcttgctgtggacagcagcttcctgcagcagcataaaaaggaggtgatgaagcagcaagatgtcatctatggtaagccaagaccaccctagtcttcctcttccttcaccaggtcctgtttatctacttccttctttatttttctttttctttttttttttttttttgagatggagtctcactctctcaaccaggctgaagtgcagtggcatgatctcggctcactgcagcctccacctcccaggttcaagcgattctcattacaggcgcctgccaccatgctggctaagttttgcatttttagtagagacggggtttcaccatgttagccaggctggtttcaaactcctgacctcaggtgatctgcccgcctcagcctcccaaagtgctgggattacaggcgtgagccaccgtacccggctgtgtccttctttctaccagcccctacctctcaaaaccctttccctcttggcctacaagaccctgcctggtatcccacaggttgcccactaggtccctacctcttgatgctgttggtctccaacaccctctctttatcccttctttatctctgtcttcagtctttactctgtgcttgttccacgcttaacaccgtgctggagactgtgggaagcctcgacatgtagaagacatatggttcttaccctaaaatagctcacagcttgagatgataaggtgtaaagataaaaaatggaactgggcgtggtggctcatgcctataatctcagcgatttgggaggccgaggtgggaggatcacttgacgccaggattttgagaccaacctaggcaacaaagcaagacctctgtctctaaaaaaaaaatatatatatatatatgtatatatatatatatatatatatatatatatttttttttttttttttttttttgaagcagagtcttgctctgtcgcccatgctggagtgcactggcgctatctcggctcactgcaacctccgcctcccaggttcaagcaattctcctgcctcagcctcccaagtagctgggattacaggcgcctacaactacacccggctaatttttgcatttttagtagagacagggtttcatcatgttggccaagctggtctcgaacacctgacctcaggtgatgcacccgcctcggcctcccaaagtgctgggattataggcgtgagccaccgtgcccagccgtctttaaaaaatattttaaaaaactagtcaggtgtggtggcatgtgcctatagtcccagctacttgggaggctgagacaggaggatcgcttgagcccagaagttcgaggctgcagtgagttatcattgtgccactacactccagcctgggcaccagagtaagacctcatttctggaaaaaaaaaaataataataaaatttttgaaagataaaaatgagggccgggtgtggtggctcatgcctgtaatcccagcactttgggaggccgaggtggggagatcacgaggtcaggatttcgagaccagcctgaccaatatgaagaaaccccatctctactaaaaatacaaaaattagccgggcctggtggtgcgtgcctgtaatcccagctactcaggaggctgaggcaggacaactgctcgaacctaggaggtggaggttgcagtgagctgagatcgcgccattgcactccagcctgggcaatacagtgagactctgtctcaaaaaaaaaaaaaaaaaaagataaaaatgattagaaaagtatctaagatcataataatgcagaatattaacctggaatggaccttgaaaacctcacgtgaactgtgaggtccttatcctagggccccacgagttttagccaagccagggtagaggccaaatgtcccaatgtcccccacagagctaatccagacagagctgcaccatgtgaggacactgaagatcatgacccgcctcttccgcacggggatgctggaagagctacacttggagccaggagtggtccagggcctgttcccctgcgtggacgagctcagtgacatccatacacgcttcctcagccagctattagaacgccgacgccaggccctgtgccctggcagcacccggaactttgtcatccatcgcttgggtgatctgctcatcagccaggtgggaaaaggcaggacccctgggtgacattcatggaaggaggtgtgactgggttgggcatttcttgggtccaaattctaggggttggaggggagccagggagagctggagaaacaggaagccagcctgtttggcaggaggccagaggtgtgtccagtgggtaaagtgtggctttgggggaatgctgacctaaccttactcgaccaacttctagttctcaggtcctagtgcggagcagatgtgtaagacctactcggagttctgcagccgccacagcaaggccttaaagctctataaggagctgtacgcccgagacaaacgcttccagcaattcatccgggtgagcggacctctccagatcccatgctcatggcccaaacccaccctccccaactcatgggggtagtgcctgtgagctgcacccacatggaggtcaggcattcgccacccgtgcagaccatccatacacagatcctgtcagcagtaacccctcagaatgctagagcacgttgtggtagtttcccaagtactttttgctccttcagttggtcctcacaacaaacctgtggcgttgttatccccattttccagatatgtcacctaggcaagcatgaggtaaatggccacgccagggccagcaccagagctcaggccccaggcctttctgttgccctcccctctggccctgagccctgcctcctcccttgtagaaagtgacccgccccgccgtgctcaagcggcacggggtacaggagtgcatcctgctggtgactcagcgcatcaccaagtacccgttactcatcagccgcatcctgcagcattcccacggtgagtaggcaggcccaggagagggccactgggagacggccacctggggtgaggaaaggctcggtatgaccacaggaagggtggggtcgggtgtgaaaccctgggcagcctctaaaggtggaatcaagacacgatgggaactggggtgtgagtgaaactggttgagccgttccccatgccaacccccggtgccagggatcgaggaggagcgccaggacctgaccacagcactggggctagtgaaggagctgctgtccaatgtggacgagggtatttatcagctggagaaaggggcccgtctgcaggagatctacaaccgcatggaccctcgggcccaaaccccagtgcctggcaagggcccctttggccgagaggaacttctgaggcgcaaactcatccacgatggctgcctgctctggaagacagcgacggggcgcttcaaaggtcagacctgctcggcagactaggcaggaattcaaagtcagatggagagtgggagatgcctgcaggtcttagaatcaacctcttttggccgggtgcagtggctcaacgcctgtaatcccagcacttagggaggccgaggcgggcggatcacgaggtcaggagattgagaccatcctggctaacacggtgaaaccctgtctctactgaaaatacaaaaaattcgccgggcgtggtggtgggcgcctatagtcccagctactcaggaggctgaggcaggagaatggcgtgaacccaggaggcggagcttgcagtgagcccagattgcaccactgcactctagcctgggtgacacagcaagactccatctcaaaaaaaaaaaaaaaaaagaatcaacctccctttatgcagcccatacaacagtgagactcagtgggagagaaaaataggatctctgtggcagaaaagcctgaattctgcagttaactttatggaccatacagggccttccctatcagtattttataatttctttggtccttgcatgcctagagagctactagttttactgaggaagacaaagaagctctcagactggaggacaggatcagttgattcccccagctggaatcccagctaccagggatgggagtaagcaagagctttggggagcgcagccagaggaggcccagaggaggggactgagccggtgaaggacaggcagggaggagaagagacagcagggcagagggagcagatcaggggccagggcacactttcccaggctctctttccagaatttgtctgcactggcaaagtctttctcacctaaatcaaagcaagagaatagcaggccttggctttggggatgagatgtgagggacaataggaaactgtgatacctgaggccaaagcctgcctgagcctctgtacctgtgtcatgaaatccctgctccctgggtttggatattgtcagtcttcaccagcctctttcctttatccctttctctccttcccatctctcccacgcagcagctaagaatataaaccatgggggattaaaaatagcaaggctggagagtgttatttctgaagcatttagcaaaagccctccccttctgtgtgcccacagtttagtaaaatccccaagggcaaaggaggagtgtatgttttctctctctcttttttttttttttagaaacagggtctcgctttgctgctcaggctggggtgcagtggtgcagtcatagctcactgtaactcaaactcctgggctcaagtgatccttctgccttagactcctgagtaactgggactacagacctgcaccaccacacccagcacatttttaaattttttgtagagataagatcttgctatgttgcctaggctagtcttgctcagactcctggcctcaagtgattctcctgcctcagcctcccaaagtgctgggattgtaaatgtgagccactatgcctcgccctctgttttcttgattgtgacatccaagttttatggaattgatctttgtttcctccctcagtcttggagtgctgaccccataggatctgagagcttggagtgtgaagcagagaaggaaattgaagcaggggcctgctggggttgaaggagatgggtgggtgagggatggtctttcagtcctctgcgagaggaaggaaactttctccctccctaccaagctcaaaattagaagtgggaatatgccaggacagggagaatttaggtcagatagccgtaaaggtcttccttagttagatattagaaatggaatttaaaggctaaaaaatgtggtccaggctgggcacggtggctcatccctataatctcagcactttgggaggctgaatcaggcaggcagatcgcctgaggtccggaattcgagaccagcctggccaagatggtgaaaccccatctctactaaaaatacaaaaattagccgggcgtggcagcattcacctgtagccacagctacttgggaggctgaggcatgagaatcgcttgaactcaggaggcagaggtcacagtgagcagagatcacaccactgccctccagccagggcgacagagcgatacttggtcccaaaaaataaaaaataggccaggcgcagtggctgatgcctgtaatcccagcacttcggcaggccaaggcaggcagattacttgaggtcaggagttagagaccagcctggccaacgtggtgaaaccccgtctctacaaaaatgcaaaaaattagccaggtgttgtggcgtgctccttaatcccagctgctcaggaggctgaggcaggagaatcgctttttcctgggagacagaagttgcagtgagccaagatggcaccactgcactccagcctaggcgacagagtgagactccgtctcaaaaaaataataatagaatcaaattaaattaaaaataaataaaaaataaaagtatggtccctcttgctctggggaaccttatgaatctcacaaaaatcttggaccctgtcacccaaaaaaatacacgagttatgttaatatgtaaaactatttacacaccttcagaaggtttacagagccactgaagcctgacatcccagggggtctgtaggccctaggttaagaaacctgaatcagtcaggtagaaagggttttctgtagacactgagtgatccctgtggttcctgctagcccacaacgctgttttgtctgatagcacatgaatctttctgcaccctgcccgccccccaccccccacccacactgtttttaagctgtaagaatgtgtgaccaggcgcggtggctcatatctgtaatcccagcactttgggaggccgaaactggtggataaacctgaggtcaggagtttgagaccagcctgaccaacatggtgaaaccccgtctctactaaaaatacaaaattagccgggcatggtggcacacgcctgtagtagtcccagctccttgggaggctgaggtaggagaatcgcttgaacccgggaggcggaggttgcagtgagccaagattgcaccattgcactccagcctgaacaacaagatgaaaactctgtatcaaaaaaaaaaaaaaaaaaatagaatgggtgaggtgtgagaggtctgaaaaagtgcaagcagccagagggaagagaggccaggaagagggaaactgggagctctaacctgatgggataagcctggtccttgggaaagagggaagcagctgctcggaccgtctagtgctgactgttctcccaccttcatccccttccagatgtgctagtgctgctgatgacagatgtactggtgtttctccaggaaaaggaccagaagtacatctttcctaccctggtgagacattcattcttcacctttctcagcacagacaagtgttttagtctcttcttgctttcctgcccaagcccacgagagctctggagtcccccagagtcaaacagctataattgttactattaccgtaataataaaaaataagagcagctcacaggtactgttactgtgcacaggcacttttacacctgtgggaaaagattattttcgtcctcattttatagatgatgaaagtaaagcttcaagtcagttaaataatttgtcaagggttgcacacatttctaagtcccttctggctggcaccagtgcctggctcttaactggtattgtaagatgactcttcagtcctttcagtcctcgtccagaaggattgaaggcctaaatatgccaagggacaggattcccaggcttaatccttcctttcccctgactggcaggacaagccttcagtggtatcgctgcagaatctaatcgtacgagacattgccaaccaggagaaagggatgtttctgatcagcgcagccccacctgagatgtacgaggtgcacacagcatcccgggatgaccggagcacctggatccgggtcattcagcagagcgtgcgcacgtgagtgtctgcctgccgcctgcatgtgcttatgacctcagggtacctgcagcattagatcccaaccatagaactccctgggaacagaatccagcattcagaggtgggggaagaggttgagggagagacaaaatggcccaagactggaaaggtcacctatgttcttatgtcctgtaaagccacattttatacattgccaacctcaactccctttcaaattcagcatgagctgacaagcaagggaatactttgagctgtcacatggtggcatacctgccagccaacagtacagtttcagctgcattcacatgttcatctgtaggcagagggctgttatttggattgtattgtattttacatttatttttctaaaaatgaatgaaaaagaggataatgaaagcatcgatactagagaggaacaagtctcataaacagactcaacacaatagaagcaagaaggaaatcagtgtgtcaaagcagcaaatctttagcttctattggacacacattagatttgaggcagtcaactatgtgtctaattgtgatgggaaaaaacatcaaataaagcacaggtaagatgtttaaaatggattctggaagattatgcctaaagaatgaagtgtaagtgtaattctaattcagatttttacaggttttctttcttttttttttttaattttttttgagacagagtctcgctctcagctcactgcaacctccacctcctggattcaagcgattctcctgcctcagcctcccaaatagctgggactacaggtgcccaccacgaccccaggcaaattttttttttttttttttttttttggagacagagtctctgttgccgggctgcctcagcctcttgagtagctgggactacaggctcacgccaccatgcccagctaatttttgtatttttagtagagacggggttttaccatgttggccaggatggtcttgatatcttgacctcgtaatcgacccgcctcagcctcccaaagtcctgggattacaggcatgagccactgcacccagccaaatttttgtatttttagtggagacggggttttgccatgttgaccaagctggtctcgaactcctgatctcagatttatccgcccacctcagcctccaaaagagctgagattacaggcattagccaccatgcccagccaagatttttataatttttctttagctttcagggaatcagttctcaactttataatttgtaaacctttttttttttttaacttctgcaccatggaattttgaaaaggtttttagaaatgcatataaaagtatgaaattgcaggccaggcacagtggctcacgcctgtaatcccggcactttgagaggctgaggcgggtagatcacttgaggtcaggagttcaagaccagcccggccaatatggtgaaacctcgtctctactaaaaatacaaaaattagccgggcgtggtggcataagcttgtaatcccagttacgcgggaagctgaggcaggagaatcgcttgaacccgggggtggaggttgcagtgagtcaggattgtgccactgcactccagcctaggtgacagagtgagactccatctccaaaaaaaaattatgaaattgcctattccaagaaagcagttcaaaataacctgtcctgttgacagatctgtagtggcttctttattaatagtattaatatttataattgtggccaggcgctgtggctcacacctggaatcccagcactttgggaggctgagacaggcggaccactggagttcgagaccagcctggccaacatggcgaaaccctgtctctactaaaaatataaaacttagccaggcatggtggtgcgtgcctgtagtcccagctgcttgggagactgaggcaggagaatcacctgaacctgggaggcagaggttgcagtgagccaagatcctgtcactggactccagcctgggcgaaagtgcaagactctctctcaaaaaaaaaattataattgtggaaattaataatattaattgtaattgatttgttgagcttctgttatgttcaaagcactttaacatttcatttaatcctaatgaaaaacctatgaggaagatattaccttcatttttcaaatgaggaaatagagaggttaccacctggtaaacagtggagccaggatttgcatcctgtttgcttgatgccaaagcctgtacttgaccctctgcactgtgctgcctttccaagcgacctttggagagatatatctcagtaaacgcagataatcagtgctaagaaatgggagaaggtcggccgggcgcggtggctcatgcctgtaatcccagcactttgggaggcggaggatcacctgaggtcaggagtttgagaccagcctggccaacgtgacgaaaccccatgtctactaaaaatacaaaaattagccaggcatggtggtgcgtgcctgtaatcctagctactcaggaggctgagacaagtgaatcacttgaacccaggaggaggttgtagtgagctgagatagcgcccttgcactccagcctgggtgacagagtaagactccgtctcaaaaaaaaaagaaagaaaagggagaaggtcaggactaaattaaagctagggtgtgaggctgaggagtcttatcagaagatggaagcataaggcatgtttgggaaggagggaaggctgattctggtctataacctagcttctgtctctcaatggcatgcgacctgttacccctccagatgcccatccagggaggacttccccctgattgagacagaggatgaggcttacctgcggcgaattaagagtaagtccacccacaaggagctccttagtaatttataatacattcacacaatggaatattatgcaactgttaaaaagatgagatggctctatgagggctggtgtagatccacaactgaaacatattaagtgaaaaaagcaaggtttaaaacaatgtaaagtgtatactaccatgtgtgtaaaaataatatggaagaccaaggttgggtgagtaacttactttttcactgtaaggccttatattagttagggtatgatttaactgctatactaaaagaccacaaaaatcttcttccttaaaaaaggaagtagattggccgggcgcggtggctcacgcctgtaatcccagcactttgggaggccgaggtgggcggatcacgaggtcaggagattgagaccatcctggctaacacggtgaaaccccgtctctactaaaaaatacaaaaaaaaaattagtcgggggtggtggcgggtgcctgtagtcccagctactcaggagagtgaggtaggagaatggcatgaacctgggaggcggagcttgcagtgagctgagatcacgccactgcactccagcctgggcaacagagggagactccatctcaaaaaaaaaaaaaaaaaaagaagtagattggctggatgcagtggctcacgcctttaatcccagaaggatttgggagacaggaggatctcttgaggtcaggagttcgagaccagtctgggcaacaaaacatacatagcaagaccctgtctctacaaaaaattaaaaaaaaaaaaaaatagctaggcatgatggtacacacctgtagtcctggctactcgagaggctgaggtgggcggattgtttgagcccaggagttcaaggctgtaatacactataattgcaccactgcactccagtctgggtaacaacaacaacaaaaaaaaccccaacaaggtagaatattattgctgtcaacataacagttcaaagtgggaagtgcagagtagtggtgcagctctgccatctttaacatgaagttttcatctctatgtcatgtctgaagtggctactccagctcccactgtcacacctgtatcacacctagcaaggaggagtaaaggaatagagtttatacccttttttctttttctttctttcttttttttttttttttttttgagacagggtcttgctctgtcgcccagggtggagtgcagtggcgtggcgtgatctcgactcactgcaacctccatctcccacgttcaagtgattctcctgcctcagcctcccaaggagctgggattacaggcatccaccaccactcctggctaatttttgtatttttagtagagatagggtttcaccatgttggccaggctggtctcgaactcctggcctcaagtgatccacctgccatgcccagcctatacccatttcttttaagagcagatctggaagatgctcatatccattggccagaatgtagtcatgtagcaatatagtcacgtgcaagtcaggctggaaaacatagttgttaactgggcagccatgtgtgcccagatgaaacttctatgcattttctcattaaaggaagatggaaagaatgaacactgttggacaacctgcaaccccttccacaaatcttttttttttttttttgagacagagtcttgctgtgtcgcccaggctggagtgcagtggtgtgatctcggcctcactgcaacctctgcctcctgggttcaagcgattcttgtgcctcagcctcctgagtagctgggactacaggcgcgtgccaccacacctggctaatttttgtattttaagtagagacagggttttgccatgttagccaggctggtcttgaactcctggcctcaagcgatccacctgccttggcctcccaaagtgctgggattacaggtgtgagccactacacctgaccaacagaaagctttttcttttttataaatgccaaaataacaaaattaagtctgccacactgccccaccctacccctctcccctagggctgtcctctactggcgctcttgcatacccctacgtcctctcatgtcctcacttgttccttatctgcagtggagttgcagcagaaggaccgggcactggtggagctgctgcgagagaaggtcgggctgtttgctgagatgacccatttccaggccgaagaggatggtggcagtgggatggccctgcccaccctgcccaggggccttttccgctctgagtcccttgagtcccctcgtggcgagcggctgctgcaggatgccatccgtgagggtgagggagctcccagggaagagtccaggctcaagcactcaccgtcacagaatgtggacatgtgactagacatggacaaacacagacaagtgggatgccaaccctataaaccataaacggccctgagtgcctcttctgggccagttcctgggaaaggcaggggaggaggtgtggtccttgctgctgctccatatcgtccatgctgcatggactctgctgcctcgtaggcatttactgccctttacctcatcagtggttgtgtgagtgaaaccccactgccagtgcagggggcattcccccagatgcccaagtgtcccacatgtgggggtgaatggcattcccctcagggtcctgtgtcattcctgttctcacctcttcctctttccccacagtggagggtctgaaagacctgctggtggggccaggagtggaactgctcttgacaccccgagagccagccctgcccttggaaccagacagcggtggtaacacgagtcctggggtcactgccagtgagtaccagggcaggggaccaaggtagtaggtgggaggggccaaagttagtagagtggtaccagggatcaagtggtatcagggccccagggaagtgagctcagccatccttttctccttctcaacagatggtgaggccagaaccttcaatggctccattgaactctgcagagctgactcagactctagccagagggtaggtcctcaagaggttctgggacttggcaagagggtgggagagggacagccagcctctggatcctcaacacaaagctgtcaggggcaggcacccaggatttgtgtgcctgctgactccccattcttgcccatttctgcaggatcgaaatggaaatcagctgagatcaccgcaagaggtgagatgggaattgatggtataggagactgaagggaggatgttcttagtctgagtagttagagcccagtttggagtggggtggggaaagcgtctacattcaagtatgtctccggatcctactgtccccacacccacccttgttcaacttttgggcagttctcccatcctaaagctggggccctgttcccaccctgtctgtcctcaggaggcgttacagcgattggtcaatctctatggacttctacatggcctacaggtcagtaggacaagggcttgaatggggaaggggaggagccaggctagagatgcctgtttaggtggggcatggtcatcccaacaggcctttctaaataccctcccaatccaagctctccaggagcgatgatctgggccttggagggtgaaggcgaggggtagaagagcacaggggttctgataaacccttctgcctgcattctactcccaggcagctgtggcccagcaggacactctgatggaagcccggttccctgagggccctgagcggcgggagaagctgtgccgagccaactctcgggatggggaggctggcagggctggggctgcccctgtggcccctgaaaagcaggccacggaactggcattactgcagcggcaacatgcgctgctgcaggaggagctacggcgctgccggcggctaggtgaagaacgggcaaccgaagctggcagcctggaggcccggctccgggagagtgagcaggcccgggcactgctggagcgtgaggccgaagaggctcgaaggcagctggccgccctgggccagaccgagccactcccagctgaggccccctgggcccgcagacctgtggatcctcggcggcgcagcctccccgcaggcgatgccctgtacttgagtttcaaccccccacaggtaaggtggcctgcagtggtgaatggacctggggtggacataagggtccatggagcccgaaagaaattgggccattggggatttgagcccaaatgcaatcagtcaactgacttgaaggatattgagatactggttggagaactgaaaagaaatgtagatgggtgcaggggtggaggaaattaactcgggtcgtggtgctgaaagaggccagttggtggtggatctcctgaaggggactcatgggtgagccccaggggggagagctgctgccttcagccaagcagaacctccaatcttcacactactcagtccctgacctgctgttcttcctgcccactgtccacagcccagccgaggcactgaccgcctggatctacctgtcactactcgctctgtccatcgaaactttgaggaccgagagaggcaggaactggggagccccgaagagcggctgcaagacagcagtgaccctgacactggcagcgaggaggaaggtagcagccgtctgtctccgccccacagtccacgaggtgagaccctggcggagacatggaccagaggtagagtgcagcctgggtacaggccattgggctgtggcttccaaatgggccctaactgacctgtgaggcttgtagtaactctagggagggacttcctgttttgtctgatgatgaatgggtggtggaagtctaggaagcaggaggggcctctctcctccaactggttggtgattcccaacctttagaagtaaaaacagattcttttttaaaaaggcatggcggctcaggcctgtaatcctaacactttgggaggccaaggcaggaggatcgcttgagctcagaattttgaggccagcctgggcaacatagtgagacccaccttctctacaaaaaaaaattcatttatttatttttttattttatttaattaatttatttcattattattttttgagatggagtcttgcactgttgcctgggctggagtgcagtggcgtgatcttggctcactgcaacctctgccttccaggttcaagcgattctcctgcctcagcctcccaagtagctaggattacaggcgcccaccgccacgcccagctaatttttgtatttttagtagaaatggggtttcactatgttggccaggttggtcttgaacggctgacctcgcgatccacctgtcttggcctcccagagtgtcgggattacaggcatgagccaccacgcctggctaaattttttttttttttgagatggaattctcactctgtcgccaggctggagtacagtagtgagatctccgcttactgcaacctccgcctcccaggtccaagtgattctcctgcctcagactcccgagtagctgggactacaggcacatgcctccacgcccagctaatttttgtatttttagaagagatagggtttcaccatgttgcccagtctggtctcaatctcttgacctcatgatccgcctgccttggcctcccaaagtgctgggattacagatgtgagccactgcacccggtctattttattttattttattttattttattttatttatttatttatttaagatggagtctcactctgtcacccaggctggagtgcagtggcacaatctcagctcactgcaacctccacctcctgagttcaagtgattctcctgcctcagcctctcgagtagctgggatttacaggcatgcactaccacacctggctaattttttttgtattttttagtagagatggggtttcaccatgttggccaggctggtctcgaactcctggcctcaggtgattcacccacattggcctcccaaagtgctgggattacaggtgtgagccaccgtgcctggtcccccaaaatttttttaattagccaggtgtggtggagtgagcctgtagtcctagctacggagagtgagagtgaggtgagaggatcacttgagcccagcaggttgagttgacagtactccgtgattgctccagcctgggcgacagaaagagacccggagacccagacagaggatctcactctaaaattttttatgttagagagagggtcttgtgctgttgccgaggctggactcaaactcctgggcttaagtgatcctcccaagtagctggggctacaggtacataccactgtgcctgggaaggtatagttttttgttttgttttgttttgttttttttgagacagttttgctctgtcacccaggctggagtgtagtggcacaatctcagctcactgcaacttccacctcccaagttcaagcaattcttgttcctcagcctcccgagtagctgggattacaggcgcatgccaccacatatagctaatttttggcatttttagtagagatggggtttcaccatgttggccaggctggtctccaactcctggccttaagtgattctcccaccttagcctcccaaagtgttaggattataagcacgagccatggggccagtttttaaagtaaaaaaagtttcaaagaacttcaagtttttacagttggttcatgaaataaaaaattaccaaaagctttaaccttaaagtattttgtattttcctaatcaaattgtatctttggatactgtaaaagtgtatccggtacctaggtatggataccttgcttactttgttgccaaaggttttcctctcacccaagaatttacagaaccctgtcatcccttcacagccccagagccccctgagcctgcagatggggaggcattagtctaggggtacagttcctcatgggagtctctgctaactcactggctttgtcctgtcccccttcagactttaccagaatgcaggacatcccggaggagacggagagccgcgacggggaggctgtagcctccgagagctaagggggcccctcccccctgccccgtgccccactgaagaacattactgagggggctaaccttggggactccaatttgccaatgatgagggaacatttgaaagaactgcaaattgtccttgccagctcttgggatccttggatacctggggccatttaagaagctaggggaattaggccacaacaccccctgggacatccgaaagctacaccacagatgccagtggttcatgccttcttcccgcaactttaggaaaatttatttatttattgtttattagttatggggggagaggggagatttaaaggaccagggacatgggaaccaagccatagggatcagagggccttgtccttgaacactactggggtatattcaggctcatccacgcagctgctgggttcttgccctaacggccctcccctgcaacatccgtcttggaggagaggctgcagccacagcaccctactgccctttaaataaaggagggctgtgggcagggccatgtccctttctcctctcccctcaacctcttactgctgttctccctttctccgtccttcatggaagccctgggagataacctggcttcctggagttgatggaataaaggttggggtggccataatggtttgttgggggtgagggaaaaaacccacagggaccagaatgttttgttgttcttttgttttcttttttgtaccaaagtcaactgcacgtgttttatatttttaagagatcgtaggcaattagagatcgaagcctcctatctccacatctctgaagaagttgaggggtgggggagagaatgacttctgccttcatctgcagtaacggggggacctatactgacctcttccccagccatttagaaacaagttctagggtgggttggaaaatctccaagagccctgacctcatcttccacctcagcaaccatgacctgaaacctcagcgtgaatttgggggatttttcagtggaacccttgcccccaaatgtcgaccagcccccaaatgtcgaagaattttcttcttgccaattttgttgtttaaaaaaaaaattcagggaaaattaaaaacctggaactccataaggtactgtcttccataatgtctgccaattctgaggaggatggtagtagagagccgggcagtgacctaagttcctctgaaaggggccttttcctctcaccgcaaggacagcctctgcctcactgaagagagggggcactaacaaaagtaaccactgcaaatcttttttttgtttttttaattcacaaatacaaggataaaaacaaaggggcacacaggttccaatgttgggaattccggtatcaggaaaagtgtgttcatcgtatttgtatgccatgctcagcaatcacctccacctattgcccccatccccagtgtcattcattgtcagatccatcccccactaggcccttgttgatctccatgatgtcgggccctggggttacccgtcacaggagctgctcatttactgtccctctttgagaggcagtgagagatgagctggtttcagttcttggttttagttggttttacttcctgttcccagttggtacttactttggggctgtgggggaggggaggaggtgagagtctagggttgtataaatgctggtatgaattcacatccctgttggagcctgtggggtcagatcaggagaagggggctcaggccctcagctagaaagaggaattgaagtcacatggggagcaggctgggggagcagccagcaccctccccttctgtaactctcatccaccagcatcaagcctttacaaggtgctttctcagccattacggggatcctgagaatggggaattgttctcattttatgggccgggaaacctaggtgcacgaagcttgccaggccaggagggggccggccttcttagttccagtccaccacttttctctcttggctactctgcctaaaaataccagggctggctgggtgcagtggctcacgcctataatcccagcactttgggaagctgagttgggtggatcacttgaggccaggagttcgagaccagcctggccaacatggtgaaaccccatctctactaaaaatacaaaaattagccgggcgtgatggcgggcacctgtattcccagctacctgggaggctgaggtgggagaattgcttgaacccgggaggcagaggttgcagtgagccgagattgtgccactgcactccagcactccagcctgggtgacagagcaagaccctgcctggagaaaagaaaaaaaaaaaaacaccagggcttcacatttcacacacagggacacagggctcagcagctgtcttccaggtcagctggaagtatctccgacccagagctgtgagggtggcacctttaggtggggaaggaaggtaggtgggggtagggtgaggatattagacagcatgcagagaccaccaagaaaggggaatgcaggctctcccagaatgccccacagatccaatgagagatgctggtcagcagagaacatggaaacctggagacacagcccagagtgggtgtgaagtcccccgctgctttctttgaagcagtgctgtcccttctgccaccccgtaccaaccccctccacacacacacacacacacacacacacacacacacaccttcagccccagaacatggggcacaagcatttgtctgatgtgtctactcctgagagctaggcctcttcctcacatctttcaccgttgtgtcccctgtcccctccctaacccacttttgggaacccacagtcttaacctctgtccctcctgctgaagtttcaaagccatttggcttggtgttccagggagccagggcccaggttctcaccaaaacattgccttccctccgttccaaggggagctccaggccgcctgctctgcccagccctcccttctccatcctccactgcaccctcctcgttccactcccccacaagagtaggtctttgtgcatgcagttcatctctaacttggacctgtgtacactttgtcaatatttacctctggggcccataaagcagagatgcccccagaggagccaatatccggagcccagcaaagccatcagagggagctgctggggtgggaagatgggtgcttaggtggtgagggattttccattgcctgcatgggctaggaatagacgtggagttttggaactagtttaaacatcatcaaaaagaggaaattaaacaagaggctaattaagttcctttcacattgcttaatctgttgtgaattgggtgcctctttggagcctcctctgcccagcaattaaaggaactgggacagggggcacctggaggcactgtggcctcccccttcacagggcgctctgcacttaataaggcggcactgctcccagctgctgccccaggagcctgagcagcctgcgtcctcataggttacaagtcatgccagagagcttggggcggggggcggtgggggggcggtggaagtgggagctctacctcatcttccctctgcctccctcctttctaggggctgcctcctagaaaatccttctgatggctaacctttatcattgatgcatctcaatacaggaaccaaagaggaacccctgtcctggagaacacaccttcaagaggggcttaggggccaacctctgagttctttatgtgagactttcattataccccacttcagagcatatacaaccattccagctgagacatggttccccatccccatctcccagctgcacgcttatttcctcccatctctctgtctccattttacacagggtgtaagaataatagctcgaccgggtgcggtggctcacgcctgtaactccagcactttgggaggccgaggtgggcagatcactagaggtcaggagtttgagaccagcctggccaatatggtgaaactctgtctctattaaaaattacaaaaaattggccaggcatggtagcgggagcctgtagtcccagctactcgggaggctgaggcaggagaatcgcttgaacccgggaagcggaggttgcagtgagctgagatcacaccactgcactccagcctgggcgacagaacgagactctgtctcaaacaaacaaacaaacaaacaagaataatagctaacagtatatttcactgttaaatctttagtagcccattttacagttgagaacagtgaggtacaaagaggtaaagtaatttgctggaggtaaagctgtgaatccaggtgctctgacactcaaattgatactctgggctttgcatttggggcagggaggactagcaccactttctgaggtctctgcttttctggctctacctgcagcctgttctcccagccccctcccctctttaatcgctcacctcccttcaccccacccatgtctttgacttgtcattatcttcacttctttcaaatcctgatttaaagggagacacacaggcactcccgtcagcaccagggttttacacccagggcctggcaggtgctggaaattccagcaataccccacacctggcatcccttcaagggaactacagcttttgcagctgaggcctctgcaggcagcaagtttcagtggtcaccactgagatggtaaggtgaggacaggggaagctggcatttttggccttgataccggagaaagacaagggataccctgttttgaggtggggggtgggtacagagagagatgggcactgacctctgattcattagcctagaacccttagggaagttttcctaggtattcttgcagaaagcagaaatggagcaacgaatccttttgttccatactgaactggaggtggaactgggataaaaggtcaagacaatttgtggataatccagaggtttattctcagatcctcttctttcccatctccaaataaagacttaagctttgtcacatccagctctgatctgagcccccgcctcccccattcaccacacccagagttggggatcaaagatcagacttttccctgagggcactgcagcctggcagagagggcagcttctccccaggactcaaggatcctacacttggtggatctcagaaagaggagtgtgttcagcttgcgcccttcacccgggtgtccctctgtccaggttggtgagcagggtagaagggcggctctcccgggggttgcttgcgacccaccgcctgcctacctgctttagggccacctgttgcacccagcctccgccctggggccacagcctcgaccgcagatccctgaaggtgcctgccagagcctgccggggctcccgcctcaggagacagtacagcacagggttgaggcagctattgctgtgtgccaagcaagtagtgacagggaagacatacgtctggatagtatagaaagtactgttccagggcaccaggtcaaacttcaccaggacaccccagagagtgaccacatggttgggaaaccagcagaggaagaaggaagccaccaggatgcggacagagcgggccacgaccctgctgtcctgccgccgccgttgccgccgctgcaggaaggccagcagcagcaggtagctggtggtgatgacgcccaagggcaccatgaaagccagcaccaccctctgcagctggtaggcccccagccagtacctgctggggaaacgcagcaggcaaaggcgcacaccacacacctcaccctccaccccgaagacagctgtgggcaccgtcaccagggcagccgccgcccacactgccagggtggctattcgggcccagaagagtgagaggtgggtgcctggccccgcagccatggccaccacccagtagcgagcaacgctcagcgctgtgatgaggaagatgctggcatagacgttgaggacagtggccgtcagaaccatcttgcagagggcacctccgaagggccagtgaaagtccagtgccgactcggctgcccaaaaggggagagtgagtgccagtcccaggtccgccagagccaggttgaagacgaaggtgtctgaaggtgggccaggggctctccgggcacagttactcagtacccacagcaccgccaaatttcccagcaagccaatggcccccacaagcccataggccagggcaaccatgagcctcagggctaggaatttgacaggcatcggagcatcatcagcactcagcacactgcctccggaggcattggcccagaagaatgtgggtggagaggcagaagtattgagtgtgggcatcgcagggcatcagagattggtggtgctgagaagagaggtctgcaagtgtctgccagactggcagaggccactgaaggctctaggaaggaggctgtagaattaagtgcttctctggggcctctggtgagccctggcccacgcccacacctcagagggaggggtgtggaaaggacaacccaccaccttcctgttggtcaagattggtggtaggtggggcagggcgaggcacagcctgaatgccagggtatatgtgcatgcgcccgcctgtaagaggggctctaaatggcagagagggaggggagaagggagagttaccccgctatggagggcagccccaagcctccaccccagggagagagctggaggttccctgtcccagagatgacaggaaccaaactagagctgcctctgttcctaacagtgcagaggcctccctcctctgcagaaagtgttcccttggggcccaaagcaaggggcctgggaggtggcatagaggcagggaatcagcatgggtgtccaagagaggaaagagcggaggctgcggagtcccagacctgctgctcactagccgtgtgactgggagagttactttactcccctaagcctgttttcttgcttaaaattttcaggtaagtctgcttcacaggagtggcatgatgcaatgagagaatacatgtgaaatagcaatttgtatgaatattatttcaaaggagaagtttggggtgtttgtggcagaagggtactgagaggctattaccatgcccagggaacagtgccaactaaaacaggttggaattcatctcagcagcagtgaccttgaggctaagagcagggagggaaaagagagaggaagtcacagcttcctgtttcctccccactgggaacactgggcctatgagggcctgtgtggacctgggcatgccctcagttctgttcctgctcctgataattaaacattcctgctaacctctatcgccgcctttcccccctttcctgctctagtctgtggacagagctcagcggtccccctactctctcctgcaaaccccatgtcagagctaaggatcctgagatacgccctcaccacacctcatcctgtctccccatgatctcaatcataactggaaaaaaaaaatgcttcattgggccctcccctttcattgcctacatctctacctactgcagaaggagctgaggtggggacaaagagaaggcaggaggtggataggtaaaagagtaaggctttctcaaggattccaatatattcagccccttcttgccctctgccagctaattaagataacgttcgatgttcagttcctttggagtgctgagggaagagaggggccctttgcgacaataaatcagcagtgggcttgtgaacacataggagaaacccagaggtgagagtgatacaggctgggtgccaacatgttggggctttcgaaccagggatgagtataaagggggtggcagaaggggagtgcccagcccaaggtcaggtgagccccacaggctaccttctggcctcatggctgctcctgtgtgactgtgtcatcactgtctctcggggccatgtctactcctctgcccacccagaatcaccctgctaatctggcaattaagataactgcttggccagacgaggtggctcatgcctgtaatcccagcactttgggaggccgaggtgagcgaatcacctgaggtcgggagttcaagaccagcctgaccaacatggggaaagcccgtctctactaaaaatacaaaattagtggcgcgtggtggcgagtgcctgtaatcacagctactcgggaggctgaggcaggagaatcacttgaacccgggaggcagagattttggtgagctgagatcacaccactgcactccagcctgggcgacagagcgagactccatctcaaaaaaaaaaaaaaattttttttctttttttcttttttttttggttgagaagaggtctcactctgtcacccaggctggagtgcagtggcacaatcttggctcagtgcctcgacctccccaggctcaggtgatcctcctacctcagccacaggaatgtgctaccacacaggctaatttttgtatttttaggagagatggggtatccctatgttgcccaggattgtcttgaactcctgggctcaagcaaccctctcacctcaccctcccaaagtgctgggattacagccataagccaccacgcctagcatcaaaaatattcttgaaatgacctcaggtgatcctcctgccttggcctcccaaagtgctgggattacaggcatgtcaggagatcgagaccatcctggctaacatggtgaaaccccatctctaaaaaaaaaaaatacaaaaattagccgggtgtggtggcaggtgcctgtagtcccagctactcgggaggctgaggcaggagaatggtatgaacccgggaggtggagcttgcagtgagccgagatcgtgccactgcactccagcctgggcgacagagtgagactccgtctcaaaaaaaaaaaaaaaaaaaaatcagctggtcatggtgacactttgggaggctgaggcgaatggattgcttgagcccagtaattcaagaccagtctgggcaacatggcaaaaccccatctctacaaaagataacaaaaaattagccaggcatggtggttcatgcctgtggttccagctacttggttccagctactctactaaaaatacaaaacaacaacaacaaaaaattagctgggcgtggtggcgggcacctgtgatgtgggaggatcacctgagactgggaggtcaaagctggagtgagctgtgatcatgccaccgcactccagcctgggtgacagagtgagacccccgtctcaaaaaaaaaaaaaaacccacaaaaaacaaaaaaacactgggtaacctcatggcaatccaagcacatggcacaaagtatagccaggcctcataggggctagaaatggggctatacactctaattctttttgaatagctgctccattattctttttgaatagctgctccattattctttttgatagatttccccttgtaagaaagtggaaaaatatttctaaaactatttttagaggtgacatcagaatccctcacaggaaatctccttgtttggaaaaattattcaataaatgcttgaggtagtacccctggggtgatgtggtgaatactggagacactgagaaagcccaccctccatcttttctttttttcccatcacaactcctactgctgtgggaaagaatattaggccaaaagagcatgacccagtttggcattttccaaggttgggctgatctaaatgagtttgagggagatactctggagacaggtatgggaatgtagcaccaccatctggagaaaaggggactgaatcttagctagaaagtgccactgaaacacagggggagtagcaaggagaggagactgacagagaggttatgggacctagctctatggattttatgtgctctccatggtgtcactgctttagagttggtagtaaatgacctaataatacctaaatgaccactaggaaagaataattgattcatatgtcaattttttgaccatgcacccaacagaaaggaaaaatgacctcagcctaacgtatctcactttagagagagtttttcaattaacagtagaacaaagtgctattgaattgagtttagaaaatcagattccgttgtatcaatagagaaatgttttattattttatgtttctttgctctgtcacccaggctggagtgcagtggtgtgatcatgtctcactgtagcctcaaccttctcgattcaagtgattctgccacctctgcctcctgagtagctgagactacagaagtgccaccacactggctaatttttattttttgtggagatggggtctcactctgttgccctggcctcaagtgatccaccagcctcggaatcccaaagtgctgggattataggcatgagtcacctcacttggccatcaaaagagaaatgttattggtgaaattaagacttttatgagaattataaggctgggcacggggctcacacctggaatcccaacactttgggaggccgaagcaggaggatcacttgaggtcagaaattcacgaccaccctggtcaacatggtgaaactccatctctattaacaatacagaaattagccaggcatggtggcagacacctgtaatcccagctactcaggaagctgaggcaggagaatcacttgaacctgggaggtgaaggttgcagagagctgagatagcaccattgcactcgagcctgggcaacaagagtgaaactccatctcaaaaaaaaaaaaaaagaattataaataagtgaactaaacatttaacttaagaaaataaggggggccgggcgcagtggctcatgcctgtattcccagcactttgggaggctgaggcaggcggatcatgaagtcaggagatcgagaccatcctggctaacacagtgaaaccctgtctctactaaaaatacaaaaaattagccgggcgtggtggcaggcacctgtatgtagtcccagctacttgggaggctgaggcaggagaatggcgtgaacccaggaggcggagcttgcagtgtgccgagatcgcgccactgcactccagcctgggcaacagagtgagactcaaaaaaaaaaaaaaaaaaaaaaaaaagtaagggaggaaaacaatataaattttcccaaaaggaaggctgggtgtggtggctcacgcctgtaatcccagcactttgggaggccaaggccgacaaatcatctgaagtcaggagttggagaccagcctggtcaacatggtgaaaccccatctctactaaaaatacaaataattagttgggtgtggtggcgcgcacctgtaatcccagctactcaggtggctgaggcaggagaatcacttgaacccgggaggtggaggttgcagtgagacaagatcacgccactgcactccagcctgggcaacaagagtgaaacttcatctcaaaaa

SEQ ID NO: 687 - DNA, 3676 bp, Homo sapiens
ctgggcagtgcccatgctgggatgtgctgctgctgtggctgctgcccgctgctggcccacctagagcaggggtcacttcgagagaggacccgggaaaaggagaagatgaaggaagccaaggatgcccgctataccaatgggcacctcttcaccaccatttcagtttcaggcatgaccatgtgctatgcctgtaacaagagcatcacagccaaggaagccctcatctgcccaacctgcaatgtgactatccacaaccgctgtaaagacaccctcgccaactgtaccaaggtcaagcagaagcaacagaaagcggccctgctgaagaacaacaccgccttgcagtccgtttctcttcgaagtaagacaaccatccgggagcggccaagctcggccatctacccctccgacagcttccggcagtccctcctgggctcccgccgtggccgctcctccttgtctttagccaagagtgtttctaccaccaacattgctggacatttcaatgatgagtctcccctggggctgcgccggatcctctcacagtccacagactccctcaacatgcggaaccgaaccctatccgtggaatccctcattgacgaagcagaggtaatctacagtgagctgatgagtgactttgagatggatgagaaggactttgcagctgactcttggagtcttgctgtggacagcagcttcctgcagcagcataaaaaggaggtgatgaagcagcaagatgtcatctatgagctaatccagacagagctgcaccatgtgaggacactgaagatcatgacccgcctcttccgcacggggatgctggaagagctacacttggagccaggagtggtccagggcctgttcccctgcgtggacgagctcagtgacatccatacacgcttcctcagccagctattagaacgccgacgccaggccctgtgccctggcagcacccggaactttgtcatccatcgcttgggtgatctgctcatcagccagttctcaggtcctagtgcggagcagatgtgtaagacctactcggagttctgcagccgccacagcaaggccttaaagctctataaggagctgtacgcccgagacaaacgcttccagcaattcatccggaaagtgacccgccccgccgtgctcaagcggcacggggtacaggagtgcatcctgctggtgactcagcgcatcaccaagtacccgttactcatcagccgcatcctgcagcattcccacgggatcgaggaggagcgccaggacctgaccacagcactggggctagtgaaggagctgctgtccaatgtggacgagggtatttatcagctggagaaaggggcccgtctgcaggagatctacaaccgcatggaccctcgggcccaaaccccagtgcctggcaagggcccctttggccgagaggaacttctgaggcgcaaactcatccacgatggctgcctgctctggaagacagcgacggggcgcttcaaagatgtgctagtgctgctgatgacagatgtactggtgtttctccaggaaaaggaccagaagtacatctttcctaccctggacaagccttcagtggtatcgctgcagaatctaatcgtacgagacattgccaaccaggagaaagggatgtttctgatcagcgcagccccacctgagatgtacgaggtgcacacagcatcccgggatgaccggagcacctggatccgggtcattcagcagagcgtgcgcacatgcccatccagggaggacttccccctgattgagacagaggatgaggcttacctgcggcgaattaagatggagttgcagcagaaggaccgggcactggtggagctgctgcgagagaaggtcgggctgtttgctgagatgacccatttccaggccgaagaggatggtggcagtgggatggccctgcccaccctgcccaggggccttttccgctctgagtcccttgagtcccctcgtggcgagcggctgctgcaggatgccatccgtgaggtggagggtctgaaagacctgctggtggggccaggagtggaactgctcttgacaccccgagagccagccctgcccttggaaccagacagcggtggtaacacgagtcctggggtcactgccaatggtgaggccagaaccttcaatggctccattgaactctgcagagctgactcagactctagccagagggatcgaaatggaaatcagctgagatcaccgcaagaggaggcgttacagcgattggtcaatctctatggacttctacatggcctacaggtcactgtggcccagcaggacactctgatggaagcccggttccctgagggccctgagcggcgggagaagctgtgccgagccaactctcgggatggggaggctggcagggctggggctgcccctgtggcccctgaaaagcaggccacggaactggcattactgcagcggcaacatgcgctgctgcaggaggagctacggcgctgccggcggctaggtgaagaacgggcaaccgaagctggcagcctggaggcccggctccgggagagtgagcaggcccgggcactgctggagcgtgaggccgaagaggctcgaaggcagctggccgccctgggccagaccgagccactcccagctgaggccccctgggcccgcagacctgtggatcctcggcggcgcagcctccccgcaggcgatgccctgtacttgagtttcaaccccccacagcccagccgaggcactgaccgcctggatctacctgtcactactcgctctgtccatcgaaactttgaggaccgagagaggcaggaactggggagccccgaagagcggctgcaagacagcagtgaccctgacactggcagcgaggaggaaggtagcagccgtctgtctccgccccacagtccacgagactttaccagaatgcaggacatcccggaggagacggagagccgcgacggggaggctgtagcctccgagagctaagggggcccctcccccctgccccgtgccccactgaagaacattactgagggggctaaccttggggactccaatttgccaatgatgagggaacatttgaaagaactgcaaattgtccttgccagctcttgggatccttggatacctggggccatttaagaagctaggggaattaggccacaacaccccctgggacatccgaaagctacaccacagatgccagtggttcatgccttcttcccgcaactttaggaaaatttatttatttattgtttattagttatggggggagaggggagatttaaaggaccagggacatgggaaccaagccatagggatcagagggccttgtccttgaacactactgggcaaccatgacctgaaacctcagcgtgaatttgggggatttttcagtggaacccttgcccccaaatgtcgaccagcccccaaatgtcgaagaattttcttcttgccaattttgttgtttaaaaaaaaaattcagggaaaattaaaaacctggaactccataaggtactgtcttccataatgtctgccaattctgaggaggatggtagtagagagccgggcagtgacctaagttcctctgaaaggggccttttcctctcaccgcaaggacagcctctgcctcactgaagagagggggcactaacaaaagtaaccactgcaaatcttt

SEQ ID NO: 688 - protein, 985 aa, Homo sapiens
MCCCCGCCPLLAHLEQGSLRERTREKEKMKEAKDARYTNGHLFTTISVSGMTMCYACNKSITAKEALICPTCNVTIHNRCKDTLANCTKVKQKQQKAALLKNNTALQSVSLRSKTTIRERPSSAIYPSDSFRQSLLGSRRGRSSLSLAKSVSTTNIAGHFNDESPLGLRRILSQSTDSLNMRNRTLSVESLIDEAEVIYSELMSDFEMDEKDFAADSWSLAVDSSFLQQHKKEVMKQQDVIYELIQTELHHVRTLKIMTRLFRTGMLEELHLEPGVVQGLFPCVDELSDIHTRFLSQLLERRRQALCPGSTRNFVIHRLGDLLISQFSGPSAEQMCKTYSEFCSRHSKALKLYKELYARDKRFQQFIRKVWAVLKRHGVQECILLVTQRITKYPLLISRILQHSHGIEEERQDLTTALGLVKELLSNVDEGIYQLEKGARLQEIYNRMDPRAQTPVPGKGPFGREELLRRKLIHDGCLLWKTATGRFKDVLVLLMTDVLVFLQEKDQKYIFPTLDKPSVVSLQNLIVRDIANQEKGMFLISAAPPEMYEVHTASRDDRSTWIRVIQQSVRTCPSREDFPLIETEDEAYLRRIKMELQQKDRALVELLREKVGLFAEMTHFQAEEDGGSGMALPTLPRGLFRSESLESPRGERLLQDAIREVEGLKDLLVGPGVELLLTPREPALPLEPDSGGNTSPGVTANGEARTFNGSIELCRADSDSSQRDRNGNQLRSPQEEALQRLVNLYGLLHGLQVTVAQQDTLMEARFPEGPERREKLCRANSRDGEAGRAGAAPVAPEKQATELALLQRQHALLQEELRRCRRLGEERATEAGSLEARLRESEQARALLEREAEEARRQLAALGQTEPLPAEAPWARRPVDPRRRSLPAGDALYLSFNPPQPSRGTDRLDLPVTTRSVHRNFEDRERQELGSPEERLQDSSDPDTGSEEEGSSRLSPPHSPRDFTRMQDIPEETESRDGEAVASES

SEQ ID NO: 689 - DNA, 4257 bp, Homo sapiens
acgcgacggtgctgggatcccgggagggagcggagcggacctgggcttggtcgcctccaagccggcgggaccgagtgctttaggccgctcgaaagaaagttgctccgacccgggaaaaggagaagatgaaggaagccaaggatgcccgctataccaatgggcacctcttcaccaccatttcagtttcaggcatgaccatgtgctatgcctgtaacaagagcatcacagccaaggaagccctcatctgcccaacctgcaatgtgactatccacaaccgctgtaaagacaccctcgccaactgtaccaaggtcaagcagaagcaacagaaagcggccctgctgaagaacaacaccgccttgcagtccgtttctcttcgaagtaagacaaccatccgggagcggccaagctcggccatctacccctccgacagcttccggcagtccctcctgggctcccgccgtggccgctcctccttgtctttagccaagagtgtttctaccaccaacattgctggacatttcaatgatgagtctcccctggggctgcgccggatcctctcacagtccacagactccctcaacatgcggaaccgaaccctatccgtggaatccctcattgacgaagaggtaatctacagtgagctgatgagtgactttgagatggatgagaaggactttgcagctgactcttggagtcttgctgtggacagcagcttcctgcagcagcataaaaaggaggtgatgaagcagcaagatgtcatctatgagctaatccagacagagctgcaccatgtgaggacactgaagatcatgacccgcctcttccgcacggggatgctggaagagctacacttggagccaggagtggtccagggcctgttcccctgcgtggacgagctcagtgacatccatacacgcttcctcagccagctattagaacgccgacgccaggccctgtgccctggcagcacccggaactttgtcatccatcgcttgggtgatctgctcatcagccagttctcaggtcctagtgcggagcagatgtgtaagacctactcggagttctgcagccgccacagcaaggccttaaagctctataaggagctgtacgcccgagacaaacgcttccagcaattcatccggaaagtgacccgccccgccgtgctcaagcggcacggggtacaggagtgcatcctgctggtgactcagcgcatcaccaagtacccgttactcatcagccgcatcctgcagcattcccacgggatcgaggaggagcgccaggacctgaccacagcactggggctagtgaaggagctgctgtccaatgtggacgagggtatttatcagctggagaaaggggcccgtctgcaggagatctacaaccgcatggaccctcgggcccaaaccccagtgcctggcaagggcccctttggccgagaggaacttctgaggcgcaaactcatccacgatggctgcctgctctggaagacagcgacggggcgcttcaaagatgtgctagtgctgctgatgacagatgtactggtgtttctccaggaaaaggaccagaagtacatctttcctaccctggacaagccttcagtggtatcgctgcagaatctaatcgtacgagacattgccaaccaggagaaagggatgtttctgatcagcgcagccccacctgagatgtacgaggtgcacacagcatcccgggatgaccggagcacctggatccgggtcattcagcagagcgtgcgcacatgcccatccagggaggacttccccctgattgagacagaggatgaggcttacctgcggcgaattaagatggagttgcagcagaaggaccgggcactggtggagctgctgcgagagaaggtcgggctgtttgctgagatgacccatttccaggccgaagaggatggtggcagtgggatggccctgcccaccctgcccaggggccttttccgctctgagtcccttgagtcccctcgtggcgagcggctgctgcaggatgccatccgtgaggtggagggtctgaaagacctgctggtggggccaggagtggaactgctcttgacaccccgagagccagccctgcccttggaaccagacagcggtggtaacacgagtcctggggtcactgccaatggtgaggccagaaccttcaatggctccattgaactctgcagagctgactcagactctagccagagggatcgaaatggaaatcagctgagatcaccgcaagaggaggcgttacagcgattggtcaatctctatggacttctacatggcctacaggcagctgtggcccagcaggacactctgatggaagcccggttccctgagggccctgagcggcgggagaagctgtgccgagccaactctcgggatggggaggctggcagggctggggctgcccctgtggcccctgaaaagcaggccacggaactggcattactgcagcggcaacatgcgctgctgcaggaggagctacggcgctgccggcggctaggtgaagaacgggcaaccgaagctggcagcctggaggcccggctccgggagagtgagcaggcccgggcactgctggagcgtgaggccgaagaggctcgaaggcagctggccgccctgggccagaccgagccactcccagctgaggccccctgggcccgcagacctgtggatcctcggcggcgcagcctccccgcaggcgatgccctgtacttgagtttcaaccccccacagcccagccgaggcactgaccgcctggatctacctgtcactactcgctctgtccatcgaaactttgaggaccgagagaggcaggaactggggagccccgaagagcggctgcaagacagcagtgaccctgacactggcagcgaggaggaaggtagcagccgtctgtctccgccccacagtccacgagactttaccagaatgcaggacatcccggaggagacggagagccgcgacggggaggctgtagcctccgagagctaagggggcccctcccccctgccccgtgccccactgaagaacattactgagggggctaaccttggggactccaatttgccaatgatgagggaacatttgaaagaactgcaaattgtccttgccagctcttgggatccttggatacctggggccatttaagaagctaggggaattaggccacaacaccccctgggacatccgaaagctacaccacagatgccagtggttcatgccttcttcccgcaactttaggaaaatttatttatttattgtttattagttatggggggagaggggagatttaaaggaccagggacatgggaaccaagccatagggatcagagggccttgtccttgaacactactggggtatattcaggctcatccacgcagctgctgggttcttgccctaacggccctcccctgcaacatccgtcttggaggagaggctgcagccacagcaccctactgccctttaaataaaggagggctgtgggcagggccatgtccctttctcctctcccctcaacctcttactgctgttctccctttctccgtccttcatggaagccctgggagataacctggcttcctggagttgatggaataaaggttggggtggccataatggtttgttgggggtgagggaaaaaacccacagggaccagaatgttttgttgttcttttgttttcttttttgtaccaaagtcaactgcacgtgttttatatttttaagagatcgtaggcaattagagatcgaagcctcctatctccacatctctgaagaagttgaggggtgggggagagaatgacttctgccttcatctgcagtaacggggggacctatactgacctcttccccagccatttagaaacaagttctagggtgggttggaaaatctccaagagccctgacctcatcttccacctcagcaaccatgacctgaaacctcagcgtgaatttgggggatttttcagtggaacccttgcccccaaatgtcgaccagcccccaaatgtcgaagaattttcttcttgccaattttgttgtttaaaaaaaaaattcagggaaaattaaaaacctggaactccataaggtactgtcttccataatgtctgccaattctgaggaggatggtagtagagagccgggcagtgacctaagttcctctgaaaggggccttttcctctcaccgcaaggacagcctctgcctcactgaagagagggggcactaacaaaagtaaccactgcaaatcttt

SEQ ID NO: 690 - protein, 956 aa, Homo sapiens
MKEAKDARYTNGHLFTTISVSGMTMCYACNKSITAKEALICPTCNVTIHNRCKDTLANCTKVKQKQQKAALLKNNTALQSVSLRSKTTIRERPSSAIYPSDSFRQSLLGSRRGRSSLSLAKSVSTTNIAGHFNDESPLGLRRILSQSTDSLNMRNRTLSVESLIDEEVIYSELMSDFEMDEKDFAADSWSLAVDSSFLQQHKKEVMKQQDVIYELIQTELHHVRTLKIMTRLFRTGMLEELHLEPGVVQGLFPCVDELSDIHTRFLSQLLERRRQALCPGSTRNFVIHRLGDLLISQFSGPSAEQMCKTYSEFCSRHSKALKLYKELYARDKRFQQFIRKVWAVLKRHGVQECILLVTQRITKYPLLISRILQHSHGIEEERQDLTTALGLVKELLSNVDEGIYQLEKGARLQEIYNRMDPRAQTPVPGKGPFGREELLRRKLIHDGCLLWKTATGRFKDVLVLLMTDVLVFLQEKDQKYIFPTLDKPSVVSLQNLIVRDIANQEKGMFLISAAPPEMYEVHTASRDDRSTWIRVIQQSVRTCPSREDFPLIETEDEAYLRRIKMELQQKDRALVELLREKVGLFAEMTHFQAEEDGGSGMALPTLPRGLFRSESLESPRGERLLQDAIREVEGLKDLLVGPGVELLLTPREPALPLEPDSGGNTSPGVTANGEARTFNGSIELCRADSDSSQRDRNGNQLRSPQEEALQRLVNLYGLLHGLQAAVAQQDTLMEARFPEGPERREKLCRANSRDGEAGRAGAAPVAPEKQATELALLQRQHALLQEELRRCRRLGEERATEAGSLEARLRESEQARALLEREAEEARRQLAALGQTEPLPAEAPWARRPVDPRRRSLPAGDALYLSFNPPQPSRGTDRLDLPVTTRSVHRNFEDRERQELGSPEERLQDSSDPDTGSEEEGSSRLSPPHSPRDFTRMQDIPEETESRDGEAVASES

SEQ ID NO: 691 - DNA, 4185 bp, Homo sapiens
ctttagcccagcaatcagagcctccaggcccaggaggatgaaaagaacatggagacgagaggctccaaatggagtagccctctgccagctcacatccctctttcaggggctgcagcttggacatcccaagactggccaggttacagcccacaggaggcgaggagtgctcccctttacctcaggaagtccgatgtccgccccagctgtcttctgccccagggaaagcagtgaaggaggagactgcaagcatcgggatgcccaggccccaaggaggccctcttcctgcagatccgagaaggactggacacctttctgggactgcagcaccagggtggctacgcctcccggctggatcaggattcctgtcatccatctgctggccctttggaccactcggccactggcatgctttccaagtctgtacccgtgagtggcatcaactgtctcttggaccgttcggatacagatgggaatgtatcccagtcctctgccattgacctcaggaaacgctgcagccagctggaaggacattcaggtacccgggtaggctcctccctgcgacagaccttcagcttcctctcgggcatgaccggaaaggccaagacccgggaaaaggagaagatgaaggaagccaaggatgcccgctataccaatgggcacctcttcaccaccatttcagtttcaggcatgaccatgtgctatgcctgtaacaagagcatcacagccaaggaagccctcatctgcccaacctgcaatgtgactatccacaaccgctgtaaagacaccctcgccaactgtaccaaggtcaagcagaagcaacagaaagcggccctgctgaagaacaacaccgccttgcagtccgtttctcttcgaagtaagacaaccatccgggagcggccaagctcggccatctacccctccgacagcttccggcagtccctcctgggctcccgccgtggccgctcctccttgtctttagccaagagtgtttctaccaccaacattgctggacatttcaatgatgagtctcccctggggctgcgccggatcctctcacagtccacagactccctcaacatgcggaaccgaaccctatccgtggaatccctcattgacgaagaggtaatctacagtgagctgatgagtgactttgagatggatgagaaggactttgcagctgactcttggagtcttgctgtggacagcagcttcctgcagcagcataaaaaggaggtgatgaagcagcaagatgtcatctatgagctaatccagacagagctgcaccatgtgaggacactgaagatcatgacccgcctcttccgcacggggatgctggaagagctacacttggagccaggagtggtccagggcctgttcccctgcgtggacgagctcagtgacatccatacacgcttcctcagccagctattagaacgccgacgccaggccctgtgccctggcagcacccggaactttgtcatccatcgcttgggtgatctgctcatcagccagttctcaggtcctagtgcggagcagatgtgtaagacctactcggagttctgcagccgccacagcaaggccttaaagctctataaggagctgtacgcccgagacaaacgcttccagcaattcatccggaaagtgacccgccccgccgtgctcaagcggcacggggtacaggagtgcatcctgctggtgactcagcgcatcaccaagtacccgttactcatcagccgcatcctgcagcattcccacagggatcgaggaggagcgccaggacctgaccacagcactggggctagtgaaggagctgctgtccaatgtggacgagggtatttatcagctggagaaaggggcccgtctgcaggagatctacaaccgcatggaccctcgggcccaaaccccagtgcctggcaagggcccctttggccgagaggaacttctgaggcgcaaactcatccacgatggctgcctgctctggaagacagcgacggggcgcttcaaagatgtgctagtgctgctgatgacagatgtactggtgtttctccaggaaaaggaccagaagtacatctttcctaccctggacaagccttcagtggtatcgctgcagaatctaatcgtacgagacattgccaaccaggagaaagggatgtttctgatcagcgcagccccacctgagatgtacgaggtgcacacagcatcccgggatgaccggagcacctggatccgggtcattcagcagagcgtgcgcacatgcccatccagggaggacttccccctgattgagacagaggatgaggcttacctgcggcgaattaagatggagttgcagcagaaggaccgggcactggtggagctgctgcgagagaaggtcgggctgtttgctgagatgacccatttccaggccgaagaggatggtggcagtgggatggccctgcccaccctgcccaggggccttttccgctctgagtcccttgagtcccctcgtggcgagcggctgctgcaggatgccatccgtgaggtggagggtctgaaagacctgctggtggggccaggagtggaactgctcttgacaccccgagagccagccctgcccttggaaccagacagcggtggtaacacgagtcctggggtcactgccaatggtgaggccagaaccttcaatggctccattgaactctgcagagctgactcagactctagccagagggatcgaaatggaaatcagctgagatcaccgcaagaggaggcgttacagcgattggtcaatctctatggacttctacatggcctacaggcagctgtggcccagcaggacactctgatggaagcccggttccctgagggccctgagcggcgggagaagctgtgccgagccaactctcgggatggggaggctggcagggctggggctgcccctgtggcccctgaaaagcaggccacggaactggcattactgcagcggcaacatgcgctgctgcaggaggagctacggcgctgccggcggctaggtgaagaacgggcaaccgaagctggcagcctggaggcccggctccgggagagtgagcaggcccgggcactgctggagcgtgaggccgaagaggctcgaaggcagctggccgccctgggccagaccgagccactcccagctgaggccccctgggcccgcagacctgtggatcctcggcggcgcagcctccccgcaggcgatgccctgtacttgagtttcaaccccccacaggtaaggcactgaccgcctggatctacctgtcactactcgctctgtccatcgaaactttgaggaccgagagaggcaggaactggggagccccgaagagcggctgcaagacagcagtgaccctgacactggcagcgaggaggaaggtagcagccgtctgtctccgccccacagtccacgagactttaccagaatgcaggacatcccggaggagacggagagccgcgacggggaggctgtagcctccgagagctaagggggcccctcccccctgccccgtgccccactgaagaacattactgagggggctaaccttggggactccaatttgccaatgatgagggaacatttgaaagaactgcaaattgtccttgccagctcttgggatccttggatacctggggccatttaagaagctaggggaattaggccacaacaccccctgggacatccgaaagctacaccacagatgccagtggttcatgccttcttcccgcaactttaggaaaatttatttatttattgtttattagttatggggggagaggggagatttaaaggaccagggacatgggaaccaagccatagggatcagagggccttgtccttgaacactactgggcaaccatgacctgaaacctcagcgtgaatttgggggatttttcagtggaacccttgcccccaaatgtcgaccagcccccaaatgtcgaagaattttcttcttgccaattttgttgtttaaaaaaaaaattcagggaaaattaaaaacctggaactccataaggtactgtcttccataatgtctgccaattctgaggaggatggtagtagagagccgggcagtgacctaagttcctctgaaaggggccttttcctctcaccgcaaggacagcctctgcctcactgaagagagggggcactaacaaaagtaaccactgcaaatcttt

SEQ ID NO: 692 - protein, 588 aa, Homo sapiens
MLSKSVPVSGINCLLDRSDTDGNVSQSSAIDLRKRCSQLEGHSGTRVGSSLRQTFSFLSGMTGKAKTREKEKMKEAKDARYTNGHLFTTISVSGMTMCYACNKSITAKEALICPTCNVTIHNRCKDTLANCTKVKQKQQKAALLKNNTALQSVSLRSKTTIRERPSSAIYPSDSFRQSLLGSRRGRSSLSLAKSVSTTNIAGHFNDESPLGLRRILSQSTDSLNMRNRTLSVESLIDEEVIYSELMSDFEMDEKDFAADSWSLAVDSSFLQQHKKEVMKQQDVIYELIQTELHHVRTLKIMTRLFRTGMLEELHLEPGVVQGLFPCVDELSDIHTRFLSQLLERRRQALCPGSTRNFVIHRLGDLLISQFSGPSAEQMCKTYSEFCSRHSKALKLYKELYARDKRFQQFIRKVWAVLKRHGVQECILLVTQRITKYPLLISRILQHSHRDRGGAPGPDHSTGASEGAAVQCGRGYLSAGERGPSAGDLQPHGPSGPNPSAWQGPLWPRGTSEAQTHPRWLPALEDSDGALQRCASAADDRCTGVSPGKGPEVHLSYPGQAFSGIAAESNRTRHCQPGERDVSDQRSPT

SEQ ID NO: 693 - DNA, 3780 bp, Homo sapiens
ccgggcgaggggagtcagacttcctgtccccgagaccaacgcgtgcgggccgaacccctccccccgccttcccccaacaatacaggacgccggggtccgcgccgcgtcctccctggtccccccgtccgattatgtctcggatcgaatccctcacgcgggcgcggatcgaccggagcagagagctggcgagcaagacccgggaaaaggagaagatgaaggaagccaaggatgcccgctataccaatgggcacctcttcaccaccatttcagtttcaggcatgaccatgtgctatgcctgtaacaagagcatcacagccaaggaagccctcatctgcccaacctgcaatgtgactatccacaaccgctgtaaagacaccctcgccaactgtaccaaggtcaagcagaagcaacagaaagcggccctgctgaagaacaacaccgccttgcagtccgtttctcttcgaagtaagacaaccatccgggagcggccaagctcggccatctacccctccgacagcttccggcagtccctcctgggctcccgccgtggccgctcctccttgtctttagccaagagtgtttctaccaccaacattgctggacatttcaatgatgagtctcccctggggctgcgccggatcctctcacagtccacagactccctcaacatgcggaaccgaaccctatccgtggaatccctcattgacgaagaggtaatctacagtgagctgatgagtgactttgagatggatgagaaggactttgcagctgactcttggagtcttgctgtggacagcagcttcctgcagcagcataaaaaggaggtgatgaagcagcaagatgtcatctatgagctaatccagacagagctgcaccatgtgaggacactgaagatcatgacccgcctcttccgcacggggatgctggaagagctacacttggagccaggagtggtccagggcctgttcccctgcgtggacgagctcagtgacatccatacacgcttcctcagccagctattagaacgccgacgccaggccctgtgccctggcagcacccggaactttgtcatccatcgcttgggtgatctgctcatcagccagttctcaggtcctagtgcggagcagatgtgtaagacctactcggagttctgcagccgccacagcaaggccttaaagctctataaggagctgtacgcccgagacaaacgcttccagcaattcatccggaaagtgacccgccccgccgtgctcaagcggcacggggtacaggagtgcatcctgctggtgactcagcgcatcaccaagtacccgttactcatcagccgcatcctgcagcattcccacgggatcgaggaggagcgccaggacctgaccacagcactggggctagtgaaggagctgctgtccaatgtggacgagggtatttatcagctggagaaaggggcccgtctgcaggagatctacaaccgcatggaccctcgggcccaaaccccagtgcctggcaagggcccctttggccgagaggaacttctgaggcgcaaactcatccacgatggctgcctgctctggaagacagcgacggggcgcttcaaagatgtgctagtgctgctgatgacagatgtactggtgtttctccaggaaaaggaccagaagtacatctttcctaccctggacaagccttcagtggtatcgctgcagaatctaatcgtacgagacattgccaaccaggagaaagggatgtttctgatcagcgcagccccacctgagatgtacgaggtgcacacagcatcccgggatgaccggagcacctggatccgggtcattcagcagagcgtgcgcacatgcccatccagggaggacttccccctgattgagacagaggatgaggcttacctgcggcgaattaagatggagttgcagcagaaggaccgggcactggtggagctgctgcgagagaaggtcgggctgtttgctgagatgacccatttccaggccgaagaggatggtggcagtgggatggccctgcccaccctgcccaggggccttttccgctctgagtcccttgagtcccctcgtggcgagcggctgctgcaggatgccatccgtgaggtggagggtctgaaagacctgctggtggggccaggagtggaactgctcttgacaccccgagagccagccctgcccttggaaccagacagcggtggtaacacgagtcctggggtcactgccaatggtgaggccagaaccttcaatggctccattgaactctgcagagctgactcagactctagccagagggatcgaaatggaaatcagctgagatcaccgcaagaggaggcgttacagcgattggtcaatctctatggacttctacatggcctacaggtcactgtggcccagcaggacactctgatggaagcccggttccctgagggccctgagcggcgggagaagctgtgccgagccaactctcgggatggggaggctggcagggctggggctgcccctgtggcccctgaaaagcaggccacggaactggcattactgcagcggcaacatgcgctgctgcaggaggagctacggcgctgccggcggctaggtgaagaacgggcaaccgaagctggcagcctggaggcccggctccgggagagtgagcaggcccgggcactgctggagcgtgaggccgaagaggctcgaaggcagctggccgccctgggccagaccgagccactcccagctgaggccccctgggcccgcagacctgtggatcctcggcggcgcagcctccccgcaggcgatgccctgtacttgagtttcaaccccccacagcccagccgaggcactgaccgcctggatctacctgtcactactcgctctgtccatcgaaactttgaggaccgagagaggcaggaactggggagccccgaagagcggctgcaagacagcagtgaccctgacactggcagcgaggaggaaggtagcagccgtctgtctccgccccacagtccacgagactttaccagaatgcaggacatcccggaggagacggagagccgcgacggggaggctgtagcctccgagagctaagggggcccctcccccctgccccgtgccccactgaagaacattactgagggggctaaccttggggactccaatttgccaatgatgagggaacatttgaaagaactgcaaattgtccttgccagctcttgggatccttggatacctggggccatttaagaagctaggggaattaggccacaacaccccctgggacatccgaaagctacaccacagatgccagtggttcatgccttcttcccgcaactttaggaaaatttatttatttattgtttattagttatggggggagaggggagatttaaaggaccagggacatgggaaccaagccatagggatcagagggccttgtccttgaacactactgggcaaccatgacctgaaacctcagcgtgaatttgggggatttttcagtggaacccttgcccccaaatgtcgaccagcccccaaatgtcgaagaattttcttcttgccaattttgttgtttaaaaaaaaaattcagggaaaattaaaaacctggaactccataaggtactgtcttccataatgtctgccaattctgaggaggatggtagtagagagccgggcagtgacctaagttcctctgaaaggggccttttcctctcaccgcaaggacagcctctgcctcactgaagagagggggcactaacaaaagtaaccactgcaaatcttt

SEQ ID NO: 694 - protein, 983 aa, Homo sapiens
MSRIESLTRARIDRSRELASKTREKEKMKEAKDARYTNGHLFTTISVSGMTMCYACNKSITAKEALICPTCNVTIHNRCKDTLANCTKVKQKQQKAALLKNNTALQSVSLRSKTTIRERPSSAIYPSDSFRQSLLGSRRGRSSLSLAKSVSTTNIAGHFNDESPLGLRRILSQSTDSLNMRNRTLSVESLIDEEVIYSELMSDFEMDEKDFAADSWSLAVDSSFLQQHKKEVMKQQDVIYELIQTELHHVRTLKIMTRLFRTGMLEELHLEPGVVQGLFPCVDELSDIHTRFLSQLLERRRQALCPGSTRNFVIHRLGDLLISQFSGPSAEQMCKTYSEFCSRHSKALKLYKELYARDKRFQQFIRKVWAVLKRHGVQECILLVTQRITKYPLLISRILQHSHGIEEERQDLTTALGLVKELLSNVDEGIYQLEKGARLQEIYNRMDPRAQTPVPGKGPFGREELLRRKLIHDGCLLWKTATGRFKDVLVLLMTDVLVFLQEKDQKYIFPTLDKPSVVSLQNLIVRDIANQEKGMFLISAAPPEMYEVHTASRDDRSTWIRVIQQSVRTCPSREDFPLIETEDEAYLRRIKMELQQKDRALVELLREKVGLFAEMTHFQAEEDGGSGMALPTLPRGLFRSESLESPRGERLLQDAIREVEGLKDLLVGPGVELLLTPREPALPLEPDSGGNTSPGVTANGEARTFNGSIELCRADSDSSQRDRNGNQLRSPQEEALQRLVNLYGLLHGLQVTVAQQDTLMEARFPEGPERREKLCRANSRDGEAGRAGAAPVAPEKQATELALLQRQHALLQEELRRCRRLGEERATEAGSLEARLRESEQARALLEREAEEARRQLAALGQTEPLPAEAPWARRPVDPRRRSLPAGDALYLSFNPPQPSRGTDRLDLPVTTRSVHRNFEDRERQELGSPEERLQDSSDPDTGSEEEGSSRLSPPHSPRDFTRMQDIPEETESRDGEAVASES

SEQ ID NO: 695 - DNA, 4344 bp, Homo sapiens
ccgggcgaggggagtcagacttcctgtccccgagaccaacgcgtgcgggccgaacccctccccccgccttcccccaacaatacaggacgccggggtccgcgccgcgtcctccctggtccccccgtccgattatgtctcggatcgaatccctcacgcgggcgcggatcgaccggagcagagagctggcgagcaagacccgggaaaaggagaagatgaaggaagccaaggatgcccgctataccaatgggcacctcttcaccaccatttcagtttcaggcatgaccatgtgctatgcctgtaacaagagcatcacagccaaggaagccctcatctgcccaacctgcaatgtgactatccacaaccgctgtaaagacaccctcgccaactgtaccaaggtcaagcagaagcaacagaaagcggccctgctgaagaacaacaccgccttgcagtccgtttctcttcgaagtaagacaaccatccgggagcggccaagctcggccatctacccctccgacagcttccggcagtccctcctgggctcccgccgtggccgctcctccttgtctttagccaagagtgtttctaccaccaacattgctggacatttcaatgatgagtctcccctggggctgcgccggatcctctcacagtccacagactccctcaacatgcggaaccgaaccctatccgtggaatccctcattgacgaagaggtaatctacagtgagctgatgagtgactttgagatggatgagaaggactttgcagctgactcttggagtcttgctgtggacagcagcttcctgcagcagcataaaaaggaggtgatgaagcagcaagatgtcatctatgagctaatccagacagagctgcaccatgtgaggacactgaagatcatgacccgcctcttccgcacggggatgctggaagagctacacttggagccaggagtggtccagggcctgttcccctgcgtggacgagctcagtgacatccatacacgcttcctcagccagctattagaacgccgacgccaggccctgtgccctggcagcacccggaactttgtcatccatcgcttgggtgatctgctcatcagccagttctcaggtcctagtgcggagcagatgtgtaagacctactcggagttctgcagccgccacagcaaggccttaaagctctataaggagctgtacgcccgagacaaacgcttccagcaattcatccggaaagtgacccgccccgccgtgctcaagcggcacggggtacaggagtgcatcctgctggtgactcagcgcatcaccaagtacccgttactcatcagccgcatcctgcagcattcccacgggatcgaggaggagcgccaggacctgaccacagcactggggctagtgaaggagctgctgtccaatgtggacgagggtatttatcagctggagaaaggggcccgtctgcaggagatctacaaccgcatggaccctcgggcccaaaccccagtgcctggcaagggcccctttggccgagaggaacttctgaggcgcaaactcatccacgatggctgcctgctctggaagacagcgacggggcgcttcaaagatgtgctagtgctgctgatgacagatgtactggtgtttctccaggaaaaggaccagaagtacatctttcctaccctggacaagccttcagtggtatcgctgcagaatctaatcgtacgagacattgccaaccaggagaaagggatgtttctgatcagcgcagccccacctgagatgtacgaggtgcacacagcatcccgggatgaccggagcacctggatccgggtcattcagcagagcgtgcgcacatgcccatccagggaggacttccccctgattgagacagaggatgaggcttacctgcggcgaattaagatggagttgcagcagaaggaccgggcactggtggagctgctgcgagagaaggtcgggctgtttgctgagatgacccatttccaggccgaagaggatggtggcagtgggatggccctgcccaccctgcccaggggccttttccgctctgagtcccttgagtcccctcgtggcgagcggctgctgcaggatgccatccgtgaggtggagggtctgaaagacctgctggtggggccaggagtggaactgctcttgacaccccgagagccagccctgcccttggaaccagacagcggtggtaacacgagtcctggggtcactgccaatggtgaggccagaaccttcaatggctccattgaactctgcagagctgactcagactctagccagagggatcgaaatggaaatcagctgagatcaccgcaagaggaggcgttacagcgattggtcaatctctatggacttctacatggcctacaggcagctgtggcccagcaggacactctgatggaagcccggttccctgagggccctgagcggcgggagaagctgtgccgagccaactctcgggatggggaggctggcagggctggggctgcccctgtggcccctgaaaagcaggccacggaactggcattactgcagcggcaacatgcgctgctgcaggaggagctacggcgctgccggcggctaggtgaagaacgggcaaccgaagctggcagcctggaggcccggctccgggagagtgagcaggcccgggcactgctggagcgtgaggccgaagaggctcgaaggcagctggccgccctgggccagaccgagccactcccagctgaggccccctgggcccgcagacctgtggatcctcggcggcgcagcctccccgcaggcgatgccctgtacttgagtttcaaccccccacagcccagccgaggcactgaccgcctggatctacctgtcactactcgctctgtccatcgaaactttgaggaccgagagaggcaggaactggggagccccgaagagcggctgcaagacagcagtgaccctgacactggcagcgaggaggaaggtagcagccgtctgtctccgccccacagtccacgagactttaccagaatgcaggacatcccggaggagacggagagccgcgacggggaggctgtagcctccgagagctaagggggcccctcccccctgccccgtgccccactgaagaacattactgagggggctaaccttggggactccaatttgccaatgatgagggaacatttgaaagaactgcaaattgtccttgccagctcttgggatccttggatacctggggccatttaagaagctaggggaattaggccacaacaccccctgggacatccgaaagctacaccacagatgccagtggttcatgccttcttcccgcaactttaggaaaatttatttatttattgtttattagttatggggggagaggggagatttaaaggaccagggacatgggaaccaagccatagggatcagagggccttgtccttgaacactactggggtatattcaggctcatccacgcagctgctgggttcttgccctaacggccctcccctgcaacatccgtcttggaggagaggctgcagccacagcaccctactgccctttaaataaaggagggctgtgggcagggccatgtccctttctcctctcccctcaacctcttactgctgttctccctttctccgtccttcatggaagccctgggagataacctggcttcctggagttgatggaataaaggttggggtggccataatggtttgttgggggtgagggaaaaaacccacagggaccagaatgttttgttgttcttttgttttcttttttgtaccaaagtcaactgcacgtgttttatatttttaagagatcgtaggcaattagagatcgaagcctcctatctccacatctctgaagaagttgaggggtgggggagagaatgacttctgccttcatctgcagtaacggggggacctatactgacctcttccccagccatttagaaacaagttctagggtgggttggaaaatctccaagagccctgacctcatcttccacctcagcaaccatgacctgaaacctcagcgtgaatttgggggatttttcagtggaacccttgcccccaaatgtcgaccagcccccaaatgtcgaagaattttcttcttgccaattttgttgtttaaaaaaaaaattcagggaaaattaaaaacctggaactccataaggtactgtcttccataatgtctgccaattctgaggaggatggtagtagagagccgggcagtgacctaagttcctctgaaaggggccttttcctctcaccgcaaggacagcctctgcctcactgaagagagggggcactaacaaaagtaaccactgcaaatcttt

SEQ ID NO: 696 - protein, 983 aa, Homo sapiens
MSRIESLTRARIDRSRELASKTREKEKMKEAKDARYTNGHLFTTISVSGMTMCYACNKSITAKEALICPTCNVTIHNRCKDTLANCTKVKQKQQKAALLKNNTALQSVSLRSKTTIRERPSSAIYPSDSFRQSLLGSRRGRSSLSLAKSVSTTNIAGHFNDESPLGLRRILSQSTDSLNMRNRTLSVESLIDEEVIYSELMSDFEMDEKDFAADSWSLAVDSSFLQQHKKEVMKQQDVIYELIQTELHHVRTLKIMTRLFRTGMLEELHLEPGVVQGLFPCVDELSDIHTRFLSQLLERRRQALCPGSTRNFVIHRLGDLLISQFSGPSAEQMCKTYSEFCSRHSKALKLYKELYARDKRFQQFIRKVWAVLKRHGVQECILLVTQRITKYPLLISRILQHSHGIEEERQDLTTALGLVKELLSNVDEGIYQLEKGARLQEIYNRMDPRAQTPVPGKGPFGREELLRRKLIHDGCLLWKTATGRFKDVLVLLMTDVLVFLQEKDQKYIFPTLDKPSVVSLQNLIVRDIANQEKGMFLISAAPPEMYEVHTASRDDRSTWIRVIQQSVRTCPSREDFPLIETEDEAYLRRIKMELQQKDRALVELLREKVGLFAEMTHFQAEEDGGSGMALPTLPRGLFRSESLESPRGERLLQDAIREVEGLKDLLVGPGVELLLTPREPALPLEPDSGGNTSPGVTANGEARTFNGSIELCRADSDSSQRDRNGNQLRSPQEEALQRLVNLYGLLHGLQAAVAQQDTLMEARFPEGPERREKLCRANSRDGEAGRAGAAPVAPEKQATELALLQRQHALLQEELRRCRRLGEERATEAGSLEARLRESEQARALLEREAEEARRQLAALGQTEPLPAEAPWARRPVDPRRRSLPAGDALYLSFNPPQPSRGTDRLDLPVTTRSVHRNFEDRERQELGSPEERLQDSSDPDTGSEEEGSSRLSPPHSPRDFTRMQDIPEETESRDGEAVASES

SEQ ID NO: 697 - DNA, 145962 bp, Mus musculus
  misc_feature (1)...(145962): n = A,T,C or G
caggaattaccacctaggtatgtggtttccactattcagaagattcttgtgactaccagtgctggaagcatcaagggctggttccttccgagtagcatattaaatgattttgcaatctggtccttgcctcatttccagcctcacctgcactttcctggttcaaccttggaaagctatgtcgaggccaagcatcagagcctgcttgctaaggccctagcattcagagtagggacaaggcagaggaggcagatagacacctggagagcaacttcataacactgggaagggaagcgctgactccagttaagaccaactcagcctacatttgaatgatacaacagggaaagatcccatgtggacccccgttgtcggattctcaagatctaaacgtaaggctaagtttacagtgtttgctgttgcagaaatctaggggaagctgtgatgttgccccggaggtgggtactgcaggactcaggatgcatcctgcagacagagctagcgagtcataggaagtaactggctgtgggggacaaatggaagaagctcttagcttggagttgtcttgagttaacctgatgaataaactattcacagagttggagaattcagaggagagaagagagtcatggagggtaggcggtgtcccggggcagtccaaatgttaggagagggttgagtctggagtctcatcagacttttctctgtggatatgccaggtgggaggcagttggtgatagttatgatagtgatgctctcagaggatggcagacacagtgcagtgaaagagtgcctggcttttcacagtgacagagttttgagtttaaaacccagtaaagacacatctaagtaaagacaaaaacctaagacagacaggcagacagacagacagacagacacacacacacacatacacaaatttcaagaactaaaatcatattgagaggcataccatggagggcaagggtaaagcaaagtccccaaggatgtcatgagtaggtacactattgatgactatcaggaaaggtttcattaaacaaacccgatgcatggcacataggaactatgtctacaacagcagaatgccttgcttctctcatgaggagatggaagtgtaggactggtgtccttctgggaacccagggcacatggtatgcactgtagcacttcccaaaccaagccttgaaggagcccaggaggttgagtcagcaggcttcttatgtcaacccatggcttctgtaagttgtcttaaaatatgtatatattttttggttatttttagttgtgtgagtatgtgcatgtgagtgccagcacccacagaagccagacgcattggatcttccttgaactggagttacaactgtgggctaccagatgtaggatgtgggcactgagctctggtcctctgcaagagcactgtgtgctcttaactgctgagccacctcctcagccctgaaaagtttttttttttttttttttttgggtgtgtgtgtgagattaattaattaattaattaattaatagactttctggtcatttctggctagttttccgaaatcgatttctcatacatcccataatacttttgctagtgaactattttaatagggtaattcttatttattctattttttaatatttgacttttactaaaaattagtcaatgttcagatgctgggtgtggtgacgtgaagcccgaatcccagcacttcggagacagaggcaggcagatctctgagttcaaggcgacttcctccttgctctttctttccaccttccacacttcttctccgaccagcacattacagcgtttcatacacctgcctaactcctgttttgcctccaggtctcctgtgcagattctgagggaactctttgcgcacactttagtactgctttgtctcatcaaagcttcctactgctctgtccttacttcaccttatcccatctcttgatagggagttcaattgcctgtccacagccatcccccagaatgtaaattcttaaagaccaggagctccgatttcttctccagtgcgttcccagcacctagcacaggactagacaatagaagggcataagtatttgctgactgaatgcaaaaatatgaaagaaagaacattgctgctgtcccaaataaaacagaaaagaatgtgcaatatgctttagaataagtagaaattgttttgcttgtgtgtaaattttatcacttaacatggttattaacaactgtgagtaatagtttctctgtgtagctctagctgtcctggaattccctctgtagatgaggctagccttgaactcacaaaggtccacctgcctctgcgtgggtgttgggactaaagacatgcactaccacctcctggcgttagtttacatataatttgaagaataagcttgcttgcgaaagtttgctcaaattgaagatataaaattgctttttccatccatgagaatagatacaattaaatgtattgtcaatgataaatcaacaatcagaaatctgttcagttaataataatgtaattttttgttgttgttgttggaggaataggtctcctgttagtttcctggcaatatcatttctcttggagtttccacatagtaatgattatggtaccagaaaatacagtgttacaaatgtgtgtgaagggtcaccagaggaactgaaggagacaggatgcgagtcccaggcttctggaacaggatgattggaagaaagtgagtcagaaaagggaaatttaggcaagtaccgaggatgtctgaatgaggctcttagcctggatcatcccctacaggaagatgctatggccagaaacagtaaggaacgaaagctttgtaaccccaggaacacttggatccatcaccaggggataaaaagaacttctctgcaagtgtatttcacacgtcatgatcttgagagggaacaaagtaaccgaatctacacccaaatagatttaatcataggaggcttgtggagactagattttaaaagtaggtttgtatttcttggtctttaacagtattaattgttgttggtatgatatagcaatacaatgtaacatcttatttagttctgttattactatgaattagaaattattataaagccctgtctaatagcagagaatatatgtccaaaacaaagcacacactggctatcaagatatgcctggaattcaggtttctgtcataaacagagtttccccacttttttatgtacccagaagactcacatttaagttacacacttttaaattcatttttcatatgtttgttgagtggctactttgaatccatttcctcttctttaaaattgcagaaatcaccatattggtttcataggcaggtgggaagaaacccgagggttacatgattctgatcgctttcctcaactttttgttttgttttcttgaaactgggtctcaggtcatccagactggcctggaagtcactctgtaggtgaagatgaccttgcactctggatccttttgaatttactctgagttctgggattacagttgcagaactgtgcctagcttttgattctttgattattattattcctggtagaaatatgttaagtatattagagacatattaaataatcgtttgggagtgagatttaaattatagcacacagctccttggtgatgtttcccagtgtggtgacaaggggtggttatgtttggttgaggagttatttggggaatattatattacatagtgtactggctagttttgtgtcaacttgacacagctggagttatcacagagaaaggagcttcggttgaggaaatgcctccatgagatacaactgtaaggcattttctcaattagtgatcaagggggaaaggccccttgtgggtggaaccatctctgggctggcagtcttgggttctataagacagcaggctgagcaagccaggggaagcaagccagtaaagaacatccgtccatggcctctgcattagctcctgcttcctgacttgtttgagttccagtcctaacttccttggtgatgaacagcagtatggaagtgtaagccgaataaaccctttcctccccaactgcttcttggtcatgatgtttgtgcaggaatagaaaccctgactaacacacatatttaagagaaaaattgctttgaaatacttgttttttcattagttcatgaatttatttagagtagcctgggctggttatcactatgtagatgaggttggttttgaatgccacaaaatcctagagccttggactcctaagtgctgggcttgtaggcatgatctacgacatctggcttcgtttttatacttcttctgtgatgagagtatgaatgacaaataattataggtagatacattctataaaacacgaaaactgcattaagttgttgggttacttgagaatgtgaactagccaataattagaacactactcaatgtattcacctgaccatgaagcacccttttcagaagggcaccatttcttattggttacattagtcaatgagaagaccactgttaaaagtaatgttgattaaactagctctttgtgtgtgtgtgtgtgtgccagtgctaatttgtacatgtaaaggaagctcagaggacaacatgtgggaatccattctcttcctctaacatgtgaattctgagaatccaactcatgtcattggatttgaaggtgattatcatttgatttttgttttttgaggcagtgtctcctgtagccatagatgggcttgcctttctgtccttcctggataaatgctgtctataggtgtaaaccaccatgcctggctaattatagtttttcctcttaatcataaaagtcagacagtggagatttaatcaatgttgctacattgggaagtaaaaatataggaggttcagtgacccccaacttcatcttggggttactgaaagagctttaggtttaataaagggagaattggggcaggggacaaaaggtgtgtgtgtgtgtgtgtgtgtgtgtgtgtgtgtgtatgtatgtgtttggtctgtgtgtgtgtagcaacgtttctcaagtgtgttgttttgaccattaccctggcttccatgctgtgaggtgatttgaagtggtctgtatgacttaagaggagccatgctgcaccatctatcatggaagcccttagcattcctccaccatcctgcatctcatttccaggatctgggatctgcttcgtaatttgtgtttgaaaatggaactgactaatcttccacattccttctggttctttggttccagtttggaactcttaaacaggcagtattgtgatgcagagcatggctgagcccgactaacatcttaaggtcggttgtgggcaagtaatttttaaaaaagatttattttacttttaagtgtgtgtgtgtgtgtgtgagggagagggagagggagaggaagagggagagagagatagagatagagagatagagagatagagagagagatcctttgggcctgagttacagataatggctgcaagcctctgacatgggtgttaggagccagactcagggtctctggaagagcagtgaatgctcttaatctctgagccacctttgcaatatgccacatgggcagatattttatgagccacactatctatacattttcagcatttcagtcctgtgataacaatatttttctctgtattttatttttatttatgtagttatcttttgggttctagggactgaagttgaggccttcaaaatgctgggcaagtgctctgcagggacacgctccaccttgcttatgtattttgccaaaaggtgctttaagttggttttctaatcataccggggatgatcaaaccagtcgatttcaattatatcgaattgaaactaaattcccaggccttgtttcataatctaaaagtaatttgtaagaaacagccatcatatagtctatatttcttctgccttcttagataatatcactactgacagaacaagtatgttttcatgaaatattctaatggtagcaattaaaacacagattatgcaaatgtcccagccttcaagtctttgactactgtgacttcatttttccttgacctcttccaacaaaaagaatatttccctttttatttgacctttaaatggtaaaactgggttcttttaatggcttccattgctcttgttcccacccaagtctttcatcacgtacaaataaatgtgtcctccttgtccccacacataactagtcataccagctcagaactggcctgcgttccattctgggacacaatttataagaaattgggcaaattgaagattgggtcagaaaggatggaggctagacggatggagcagaaggaaagcctgatgacgatgaggggtttcatctgtgaaactctaggacgcaatccaagagctgctttgtaaagagctttttttttttggaagagctgttgtgtgtaaagagtgactgtcttgcttggacaggaagttgttggcatgacttgaagttgcttccagcagtctcttctctaggtctgcatgcatgcaccctgcatggaatgcaagacagcccaagaagtatgcaagttagggatgcagaggtaaacatttgtttacactctcccttcctgttcttactggctaaatccacaagcactttccttttctacagcgaggtgacattgtaaatcccatagtagtttcatgtataatatgccattctttactgctggttcaagtaaaagtcagtttcttccgtttgtactaagttgggtgattgggatgaaatgtccggttttgccttccccctgggttgtaagagcatgtctttattgtgaggctacaacagtaggaactttggcccatgataactgaggcaataatgtgttttatgatgtcgttcggatcttggtgtgtatgtgccatgtgtacaatgctgtatatttttcttgcagagtttttaatagcatgacttagagaggtcctagtttactaatattactcacagcacagtattaaagaattttatcctctgtatggaagtggcacacatctttaatccctgtactcagtaggcagaggcaggcagatcctctgtgagttccaggccagcctggtcaacagagagagttcaagaccagccagggcgacagggaaaccctgtctcaaaaaccaaaaactacagaagaaagaattattatcaaaaatatatagtaaatatggtaaggaaaaataattttcctttaaattttggcttgagacagcatcttatctcacactaatccagttggacctccaactcatgaagcactctcatgctgggaccataggcatgggccacaaactcagggccatttttacttatttttactttagtcttatgtgtgtctacatgagaatgtaccacatgggtatgggtgctattttgtccagtagagtgttggatgctctggggctgtagttaatggcaattgtgagcctctcaacacgggtgcttgaagtggagcttaatttgggtcgtctggaagatcaggaagccgccttaactgctgtgtcatctccccagcccccattttcatctcttttaaagagttttgttaggtcacacttcattcctcatgtctaaaacctctaaggagaattctatgaaaggcaatgtagaaccctttttgggaatagaatagacccctgttgttacaggagctattcaatgaaatctgcccccctgaaagtgttttatggatctctctcctgagactacttatgaacgtacagtcatgtgatggccaggcagagtgacacaggcctgggttcctggaaggaggatcaggagtttattgtcatccttctttacgtatggagttccaggccagcctggggttataccagacctacctcaaaaaacccaaaaacagccgcattagcccgtgagatggctcagtgggtaaagatgcaggccaccaaacctgagagcctgtgttgtagcccctacactgtgggaggagcaaatgactatggccactctaaatcagcgcaagccaccacctctggctccaactttttactgcagttgatagtcagatgaaaaactataagacttgtaaagcggcagctttagaaatgggttgagtgggctttactgttagctttatagacaaaggggcgaagcctactgagactgacatgctatgcttttctacatatttcattaaaaaaaatctcaattacgtttattccaacaaaattgaaattgttcaacgtattaaaaccaggatttgggagaataaaggtaacattcaagttttgagagggtctttgttctttttccttcttttttttattttttagttttcaagacagggtttctcttcatagccctgtctgccctggaactcactatgtagaccaggctggccttgaactcatagattcacctgcctctgcctcccaggtgctgtaattaaagatatatgccaccaacccctggctattttaaagtgtactccccctcctccttctccctttttctttttgggaggtctttgctttcaggactcttagaatatgtaatacacttcaaaagggttcaaggctcattacaactttcaggacttttacagttgtaaagtctgtttctttttcggggttaacttttgaatgtaaggagagggtgtctttttaactcccttaccaaggatgtgtttggctagaattaccgagatgctctgaataactttccagtatatcaaagtagtatccacttagttttgtgcttgtttagctttatggaaagccggcagagcagaagaatggcctaagaattgcctccctggagtcagtgttccaagttgcttcagccggcactttgctcgagcgccccctctctccctagaggtcaacacgcaactgcgagctttcaaaggcttgcacaaatccccgtttcaaggagaaaccactcagagcgcatgctctggtgatagtggttcagtagcgccattttcgtaagggaagggctggccactagttccgtccctagggctcccagcattaaagttctccaaactggatcaaaacgttgccgaacaagtccggggcctcctggagaggagcctttgtactcctttgcaacgctccagccaagactacagaaatcttctgttcatttctcttgtggacaagagatccttttccctcttctcccttcgcctaggatagcctacagtccgagactagagccttacacttctggtgtaattttgcgctcacacctgtggccaaaatgaaaggacttggagaactggacgggaatttttttcccccttgagaacaaagcctaggtgagagcagactctagtacttacagggcatcagtccgtgtactcaggagctaggaggtatcgcttcttttgaaaattggttataaagacacagatccgatagtggtgagaataggggttggtggaaagatagctagcggtacgacccgacatggagaaggtctgaggtttttcaatgtgtgtgtctgcgcgcgcgtgcgtgtgtgtctctgtgtgtgtgtgtgtgtgtgtgcgcgcgcgcgagtttataagaaactgagtgaagcaggaaagagcttgagagacaaaaaaaaatctggtgtggaagaagagctagccggtgcagacgtggagacagcatctcagcccgccaggcagtcgcagcttcctgggaggcattcactcctctctacccatcctttttcattcataagtttgtggctccgcctgacatccaccccacccccaccccacccaggcagagggccaagtttcctgtgtagcaattggtgaaaggcaacaaagccttagcaactggctcctagtgacccgcggggcgcctggtaactggggcccgaggccggctcagagaaaggagccgagctgtccctttaagggatggccgcggagtggtgaaagtggagggggacgagggagggcggggaggcaggtctgggggcggacctaagaggaggaggaggaggagagggaggaagagttgctgctgaaaggaggtggcgaaggaggagtctgagcagctgctactagccccgcggacacctccggagtcctgcccgctgccgcacgagtggccacgggcgcgatccgggccaaacgtcttgtcctccatgatcactttgggagccggggaaagactttgcccggccttgggagctggtgtgcgccgtccaggtttggtggagacggtgcagcgcgagaaggaggagctgcagctcgagaagcagcagcagccgccgccgccgcagagtccggatcacagcggttacagcccggggcgtgtgcgtcccgcgcccagcgggttcggttccccacggaatgtccccggggcgccccacgcgctgaccctgcagctgcctccgccttgggcgactgcctcctccctcaggcaggctcggtgattgggaccgcgagctcccagctcttgggcagtggggaagcccccgggggcgggtgacctcagctggccacgacccagccctcccccgtgcggatctcgcttaagatggcagcggagtctggggaactaatcggggcttgcgagttcatgaaaggtgaggagcagccacccggcatcctccggcccttccacgccactccccccccccaactcctcacggctcacccctttgtcccaagcctctatgctgggtttcttttcgggccctgtgtccctcagtactgcggctcggcgctcgggccccttctcgctactcaactcccggaggaccccctgcttccggcttcttttttcgcgttctcactccctctgcagcttcctcgtacccggacagtgcaggcttctctgcttgggatcctcctgcaaacctatcttggtggggagcctgctggttttaatcctccatccgctaactctctacttcctcggtggctggcccgtgtttttgggacaccccctacccccaaccacacccccctatctttccttccttcctcttgaagtctgctaagctgcagcggcagaagctcgcctcttttcccattccaccgcagctgaggtctgaaggtttccgaaccaaacttgtgtctccagttttgcgggtacccacagctcctgtctgcacccgcccgcacgcaaccagggggtgagggaactcagaagatgctctgccccctgctgggtcttctagcctcttagcaagatgtgcttttggggctctgtagctttctggaagatcctgtttctccaagaatcccacgtgttaaaggtctttaaacgatgtgtagcagttattaatcctttgtgcatgatctgcactctcagtctcgcgtccctgcttctcatgttctgtcttttaaacttgtctttcagatcgattatattttgctactttaaggaatagaccaaaaagcacaataaatatccactatttctccatcgacgaggagctggtctatgaaaagtaagtcccccccctacttttttttttagcaccccctgaactagttagtttgttggttctttgataatcgggttccttcacttttcccaaagagttccgaaggtattactagctttctatagcttggggagggatgcacactgtacgtagtttggtcctgttaacactgcagtccttttagaacttcacgatattaattcttcctcctcccacagcacgtctgggttcctcacactccccagagtagcaccaggccgtcatacctggtgtcatcaccagacctgtaattggcctgtgaatcagtcactaggtatttgtgggagcacccacagggtagagggcagtcagtgtgtgtgtgtgtgtatactacaggtgccgaagcttcacagtgcacaaggcttctgttgtttggaaggatgtttttgtttgtgtagccagttttctggaaagtgggacgcaggactgtggggagctggatccaagttacgtctatgtggaagatttccagtgtgattgagttgaacctgatggcctgatggtattattgtccccccccccccccccccccagggagtgaaaaatcagaaccaggaactgagctctgtgaaaggccatggatgtaaaggaaaaggttatttgaatattttaggcacagtaaaacattaattggagagccatattttctttcgacgaaagcagtagacaggagtagaaaggcgggcttggctgtatccttttcctaaaagagctgctctttcagataagccttgtatactctaatttagacatttcattttattttgtcaccatcctaatcaagtgggcagtcaaatgagcggagtgaaatgaaccgtaacaagttttctagggttcaccctgttagaaagtatattggtacgtcagcctcagaatttatgagtaccactgggccttggaagaggaaaaatatgctggaccttaaaagcctatgttttatctgagagaaaataatccttaattgttacttggtcctaggggggtcttggaactgatgtcttcaggacctttctcctagagctgggaagagggtgcttcctgaatggctaaagagacagtgggcatggcatgaaagagccttttgctgtggttcatgaatgcccagagctgcggatggaggcaaagagaggcccgaatccctggtgtcagatgacagctccactcctagagaatggagttctaagcagccagttccctgaccctgggcacctggatgatgtcaccaccttcagtgtttattgagtggacactctattgttgggcaccgtcttggctttcttgtctgtgagctgagggcctcgggacctttgtgtgcctgagggtagggactgtgtatatacgctattatgttcactctgcagtgactaaagcgccagggtttattaatatgcatttgaacaggctccagttattgaggtctgaatcacttcccttgagattgctagatagtagacttagccaaactttacagttaatcaacctatcacagtgcacaatggtgtcttagaaataatgaagattttacgtgattttaatatttgtactttagggtacaagttatatgcctttttttttttcaccatgttcctggtgtcttctaaggacagacttgctagagagaccatctggttcactttgtgagtttggatgtgaacttgaaactgtaagaagctgagcagggtgtacatctctttaatgcaagcatgcatggaacaaaggtagaggcagggggatccctgtgagtttgaggggagcctgttctacacagacagtttcagaccagttagaactacatagtggaagcctttcttgggggggggggcatctgggagtggtggcttatacctgtcaatcacctgagagactgaggtagaagagttgcttaattgaagttgagtctgtgttacaaactgacttgcaaacaagcttgagaaaagaagtgagtgagaaaagaaatgataaagactcagcctgaacagagcgttttcctccctggtgtgatgagccggagcgtgtcacagtagtgactctggtcctgattacctgcgcaaactcatcttttcgttatccctgtatagccctggctgtcctggaactcactttgtagaccaggctggccttgaactcagaaatccacctgcctctgcctcctgagtgctgggattaaaggcgtgcaccacgcccagctgtacaagcctttcaaggtttcaaagatccccaaaccaatatgatggatgattaagaggggctgtgattaaagggataagttgccctaggagaagcctcacctgaagtaggaagtactaatggaagggtggagacatgtccaggagaggcgttcattaaaggctccatggaggcattaaggtcggcttgaaggatggacaggtgcccatggatatgggcgtgagaggaaagaaaagtgaggaccaggagggaggctcgggaagtgtgttcggctcatagtaagctgtccgctttgcctggtgtgtatacaggtcacatgggggaggtgtggaatatgacactgagaggccagctggggacagactgaatgccacagcgaggaacctgcagtcaccctggcgtgccttgagcctcttagaagagctccaggacagagatggcgtggctagattcatgctaatggcaaataaaggcagatgtttacagagcattggcctcggtgctggatcctttgctacagcgatgtcgacagggacagtgaggttgggtactttgcccagtgccactgaaataagcaacagagctggaatttgaaaagataccatctagttccagaggaaatacatcctccatccaaaaaaaaaaaaaaaaaaaaaaaaaaaaaaataaggtaaaggcatcatttaagacccattggagaggatataaggaaccacacacacactttgggatgttcagggggaagaataaggtactgaattaacatggtgtcagcgctgatggaaaaaaggcaggatctgacacgtgggggtagttgatgaagacgctggggggaggggagctaagcagttctggggatagtcccttcactgtgggccttagagcatcatgaacccaaacaaggaaataggtagacagttggcttcggtgggaagatcaggcattctgtctgggtcaggatgaatttgagaaatgtaagggatcatttgaagaatgtatactttttttttttttcccaagacaatttctctgtatagccctggctgtcccggagctcactttgtaaaccaggctggccttgaactctcaaagatcctgatggctgcctttgccttctgattgctggggttaaagatgtgtgtcaccatgcccgcctgagagtttacctttaaaatacttcaagttgggagtttcctaaggacaatgaggctgtttctgaggaggaagaaatcaaggtttttcagggtagggggagtaaagaaagatataagtagccagtcagaaggcaaacaattgaaggagggagggaggaaggaaggaaggaaggaaggaaggaaggaaggaaggaaggaaggaaggaaggaaggaaggcaggcaggcaggcaggcaggtaggcaggcaagcaaggaaggctgtggattgtgtctctttgactctctttcttgcagagatagaacgagacggtctgaagagtccctgggaccctttgcagtaacctggattctatctgtggagcatgtcctgagggcagacaccctaatgtgcacgtctccaaagaagggagtgtgtttatatacactgtcacttgggacctcatatagcctggtagctataattatttgctgagtgtcctgatgaaatgtcacctttctgagtaaattatcacctgagaaactattaactgggctctttaaatatgagagcatgtttagtctggatacagctgtgtttgtgcagaaggccgttgagttattaaaggatagtagaactctatgattgaaataatgacctgaaaagcctgtggaacaaatttaactaactggcttcatgaggccaggctataagactgaattttttgttgtttcttttcttttccttcttccttccttccttccttcctttcctccctttcctccctccctccctccctccctcttccttcctttctttctttctttctttctttctttctttctttctttctttctttctttctttctttctttctttctttctttcagagaaagtcttactatggtagctctggctgtcctggaactctttatgtagaccaggctagccacaaactctcagagatccaacctgtctgccaactgagtgctgggatttaaggtgtgtaccactacactcaattgaaactgaaaatttgaaaatttcttctctgtctctgtctctttatctgatctcattatgtatccctagctggcctggaactcaatatttagaccagactggccttgagtgcacagaaaaacctgcctgctctgactcagtctcttgagcactagcattaaaggtttgtaccaccatggctgcactcttacttggttcttaacagagatatctctgtgaaggtcagagatattttaataaatcgtaggcgataagaacttatactttaaagcctttaatcccagcacttggaaggcagaggatagctttctgagtgtgaggccagcttggtctacatagcaagttccagaatagcaggaccacaaaaagaaaggaagaaagaaagagagagagagagagagagagagagagagagagagagagagagagaaaggaaagaaggaaagaaggaaagaaagaaagaaatatattttgggctttgcatgttttcataggccagagttaaaatatttactgtcccaataaaactgccttttttttttttttttcaaaaagtatttttgtaactggagcctgacaaggatttatctgtgttggactgaactaccaacagcagacagtattctcttctctagaatggctaattctttggtgttgaagttggactctgtcatccaaatagacgctaacttttaataacttggctcatattttttggctcaagcgttagcaaaatcaaatgtgttaattgccagaacctttacgcgctcctaatggtcatcttgggcgttggagttggatgccagtggtgtggaaagccagtcggttgagaaggacagtgtgtactatctctgctttcagtcatatactttccaatttcttctgtccttgggattttcagaagaaaggtactaaaatttcatgacagagtactaaataaggatgctgagcctggctggaatttctttggtagatccaagaaatgtcaccaagtactttttacttaagtataaattttttattttttttaaaattctcctgatgtaagtgtcatctccgaggcttactgcgtctatctgctaatctagatagaccttgtcctggaagcgtcagcctcctgtacatttttatctagacctagaatgttttcagctgaataagctcaacctttctagctctttctgagcaatgactggctggttcaactcagctgtcctggctcaaactcctctccagcctcactgattgaatctaacttcttttagcttctcctgaattgctctgcttagcctcatactgactttgacaatatgttctaatcttctggctccttctcattctgtctcattttgtcttcacctgtgtctagcttgttctcttcctgcaccctgtctctgtatcactgtcccaataaaactgcacttaaccccttttcccggtctctcaaatagctcccgtttccttcctcttctcatgagagttgagcatatcctcctctgtcaaatctttctctgattcatcacgttgtctgcccctcaactagacatcacttttacacatgggtgctttcttgtacaaactaactttacccaaactttattgtttgggattgaaggtgtatattaatctccaggttcacagtgtggtcaaataccctgcagcagttaagatggtcaatcttggttggggctgcagctcaatgggagagtattttcttggcgtgtacaaggtgtcctgggcttaatccccagcactgcaatagaagagtaaataatgaccactcttagttggatatggcggctcctacttgggatgctgagagaggtggatccttgagttcaaggctaggttggggtacatagtgagatcctgccttaaaaaacaaaatgggctgaagatgtagctcagtttatagagtgttgcagtactgggttcaatgtctggcattatgtaaacctggcatggtggcacaggttcgtcacctcagtactaggtagtgaggcaggaggagggtcaggagtttgaggtcatcctgggatgtatgagaccctgtctcaaaacaccaactaaccaaccaaccaaccaaccaaccaaccagtcaaccagtcaaccagccaaccagccaaccagccaaccaaccaaccaaccaaccaaccaaccaaccaaccaacccaaaccctcaatatggctcagatattcttttttaaaataatagaatatctttgatgtattctttgacaatttcatacacgtgaacaatgcattctgatcacatgtactctaattcctctcttcgactcttcccagaaacctccatcttttttccattctcttcagtcactcccaacaacctcattttcgtgccttctctgtctgtctgtctgtctgtctgtctgtctgtctgcctgcctgcctgcctgcctgcctctctccctactttaataacctagtaaatctaattagtgctgcctactggaagactgatcttgttgagttcatcttgggtgggtggcccagtgaccacagtgacttctttggtgcagcatccacaccacatcacaaaggcagcattttacatcgctccttcccatcttaccttcttcccaccgccttccatgatgtttcctgaaccttgggttaggggttgatattggcgtgccgtttagggttgagcactcaatagacacacgctctcaatactttgcatagttacaagtctctgcactaaccactgaccacttcagagagaagctcctctgccgaggttgaagggagcactcatctatggcgataagcattaacatttagaaagcagtctgacatcatgctccttaggttctgctctagtgtctgtgacctccggagccatgatcggtttacagtactaggcctgaattcattcctgtggagcaggcctcaagtctaatccaaaagcagctggttaacccatagccttcatgccactcttgcatggcaggcatattttgcccagcagcatttttgctttttacatcttctggcctgaacacatacattgtaggtgtttatttgactatgtatgcacccgtggacacagtgttattctgtggtatgcattatgaggctgtgcacttactgatatacatttacagtcaattctcctcctcttcccttttccttctttcttcctcttcctcttgcagtaccaggaaatcaaacccagaatctcatgcatgttaggtaagaactctaacaccagtctacactcagcccttacagggctccatgctttctttttggttttctgagacaaggtctcactttgtagcccagggtggccttcagctcactatgtagcctaggctagtcttgtattcttggtaatcctcctttgtgagcctctcaggtgcagagattgcagatgtgagtcactatgctcaacatctcaccgcccattcttaaatcacgtgatccacttccacccaattttactttcatatttgtttaaataccttccgctttgacctcttaggctttggcagtgtatagttggactttgatctccatagtgattgttactcatttttttttcagcttacttgagataactggcaaacacacacacttgaactcaagagcccagtagtctccttacagggtttgcttctctcaggcagcatgagagagtgattcaagtgggttgtgggagatgaagctctgtgccaggtcaccccagggcactttcattattttgtttgaactagactcctaagacatcagatgttctcacttgtaagttcataaacacattcccaagcccaaaggaagtggcttagttagccatagctcaaaacaacttagtggggaaataaaaggactggacacatcttttaaaatgaggcgtacaggagaacaacttgaaatttgtaagtggctgaagattgctgtgcaagagaacaccatggggacggagatggagatggagtgagacttagtggcagggcatggggtaagcacaggtaaacacggaagtgcatgagacagaacggaggtcagtgcatgaagacctcgttactgccatggtaattgaaagacttcttcatggagtgatgtttaatgtggcacaggcacagggcattttatgatgtctgagaccagtattgccagttcttggtcactgttctatctcaagacctaacattgtgcttagcataggaatgttgccccagaaacacaagcagaattcatgaggggaaggagggagggtgggagggagggagggagggagagagagagagagagagagagagagagagagagagagagagagagatttattccaggcagagtcttaggaaaaggcgtgtttaggaagagtgagagcctgtttggaggagagcagtcacaggtgaggatggctggtctgtgggatcctggaatccacccactgggcttactgatgaatggaaagaaactggtcagggctctgtgcacaggtgccccatagtttgacaggaggaatgtttgagatacaaatttcattaccttggatgactgggagaaagccacaggttaagtaggtttgtgtgttttaagtctgaaggaggagcaacctatcttgtggttgtggttctgttttgtgttgtttggtgggaaagtggaagtgaaaaagggtttgttgtaatggagtctttgactcttgtggtctccaagcagagaatagataatacctgaccaggatacttagccagttgctgctttaaagtctggggaattgtgtgggataagctcatctcaaattctctggaggtatggtttgagttggactttctacatttaattgtggaatttattgtttagctttttgggctctcttttcaatttaatgaagaaaaaagtcggttttaaaaaaataacccaatacttacagggccaccaaagagttgcttgttggctgggatttttcaagttctagtgttctggctgaactgtgtttagtccttgacaagctggataaatgacatctgattcgtaaccacaaccatttgtggttggtgataggttcctccataagaaatgtttgtgtttgctggaggtgatggctcatgcctataatcctagtgagtctgaggcaggaggattcctgtatgtttgaggctaaactaggctacagagcttgtctcatacaaacatttaaatcgaactgtagttttaaatttagtgtgtgtgtgtgcgtgtgtgtgcgtgcacatatcatggtgcaaacatgaaggtcagaggatctctttccatctcctcgcagattccagggttgcactcaggttgtctaggttttgtaggcagtaccttgacctgatggaccatctctgcagctcctgaactatagttttatagttttataaaagggagcctttctattattcacaacgttggtattttggttttcaacattttcatatcttgttgataaatggtagaatttactagtttggtttacttttgtcatacaatatggttttcttcagagatctagaaaaggtggtttttttgtttttgtttttgttttgttttgtttttttctaaattggtctctttcatcaacatatggaaagaggaccatctaggaagtgagcagttcactaagatacctgatacaaagaattggaaagttccatgtgtgtattttggaggagctagagaccaactcagggcttcatctatgctaggcaagtgctctaccatgaaactacatcctccacctacaaaaatcctatctgaaataccatgtaccattagactttgtgaaaatgaacccgtgtttctgtcttaatgaatggactgatcataattatgtaattataaatacatccgactaagcagttctctgattcagagcagctttctaaagattaaagggcccggtcaggtgagatccggccttgactgagtacgttcttggtcctgcgcatggtggggtcagtgcatttccctctgactaccatttgcatcctgatctgctatgagcccaaacgtgcagtgggagggggccccagaaaacttgttttctgcacgttgagtctgaaacaaggctagactctgtgtgagacgtatgaacacggctaaaaggcatgcatgggctcatagaaagctttaaaaagaaacaatccaactttgttttttttggcttccttacgaatcgggctcacttgggtggcagattggtgagtttctgagttgggatcttagcataagttatttctttctaagacttatgtgtgcatatgagtgttttatgtgcgtacttgttcatgtgtatgcagatgtgtgtgtgtgtgtgtgtgtgtgtgtgtgtgtgttgtgtagtgtgtttgttgtgtggtaggcctactgaatatgaagtatcttcctcagttgctcctctttttatttctgagacagggtctctcactgatttggccagcaaactcctgggattcatctgtctgccttcccagggccgaggttgcaggtgcatgaggctattcctggcttttacagtgatgctggggaaccaaactcaggtcctgatgcttgcacaacaggcactaaactgatggcgccacctccttagagcctgtaactgatttcttaccgtagacacttctttaccttccaaggataaggaattcctatagatagcatttgcgttagttgtgaaaatcaaattattgattctgagcaccaatgtagatctgaaaatattgaaaataccttatttgctggttgtgagattaaagaggggcagataggcctgcttaggaagttgtgtgtggtggctctgtaaagcggtgccttcatggtttcccttctctttccctaatgccagcaccggacttggttcccctgtgcgtatggcacacatgccccacagccctggggaacacaaagtaaatgctctgggacatttaagctaggagaaacctcttagagggaattgaagatgaccttttagaaagggcactgtgatgaatagtggggtgagcgcctgtgggctgaggtgatttatggagcaggccgcatttggagcataccagtaatgaagatggggtggtgggagaaggctgtgatgtgccccacctctcatctaaggaggctgctcagtctcgctgctctccggtccctactctctggttccttcaggcttttgaaaaaaaaaaatcgtttttaagtatgtgaaggtctctgtacatatatgatgtgagtgctgctgcacttggaggctagaaaagagtcagtcaccccgtcatgggtcaccagtgtgggcactgggaaatgaatacaggtcttccgggatattagtgagtgcacctaaccactgagccatctgtcccgccccttaaccttgctgtgtacaaagcttataaagtgtgacctgtcgtcggtcacccctctctagccatacttagcctggaactgtttggaatgtttagaatgaagagtgttgtcttttgctatactttcccaaacgagccagtcctttacttatttactcagccatccctggactaggtgctcaggatgcctagggactgtcgttcagctcagcctggttcagggagcttgtcctgcagtggatttcagacaaaatactagttaaatgttaaaagtagacgattgaagtccgtggaaggaggagagagctgcagcatttttctcttttgacaggcgttgatctatcccaggctagccttgcacttactatgtagctaaaaatgacctgggatttgccgctagaccccattttatgcaattctggggatgaatgccagggccatgtgtgtggctggcaagcgctctaccaaacgaactacgtcccatcctcagcccccgaaagaccttttggtctttgaaggcaagaaacagggcccgtgggatctgcacatttggagagcagccaaagaggtggggatgagaagagacttctctgaggaagggtggttgtgctgagacctaaagcaggagtatgtgctaaccagggctggggaggagggtatgaagaaggtctatgaatgaactcagacattccttgtggcttgagcttgctggtaataaaggtgagaaaatgttgcaaagtaagtccccaaagagagaagaaggtaggagctacagcacgggggtgggggtggggtgggctggaggcaagggggaggtgcggctttgaattccaggggctttgggaggtgaggagatcatagccactgggtttagaggacttttccctttccaggccctgatttcaggaactgcttacaaaaaggtgagagctagccttttatatatcaccgcctctgccggagctacaggaatagactggccgcccagtcctcttgctatccgtggcagctggtgaatataaaagggttaacttacgtggtctgagaatgcttctgtgggagtgagttttaatcttagcagagcattcccgaagaagccacctcttgcttttgttcactggagtcttggaggggactgtcccttcactgactgtgcttcagattggaaggacatgaaatactggatactacatagtcactcattttacagaagcgacagctgaaggcttctacaaccctgccccgtgcctagagctaaagaaagtgctaagtggagaaggtcctttattttatggtgtgtgaggcagctgggatttcctgaaaggatgtgtcagggacaggggttgatcccaaggctgagactgcagcctgggaatgcagcgtgatcagatagataccagagtcctgtgtatccagtggtctttcattctttttcaggctgtcctgtacacaggaaagttggtaggtggtcagccactggcatctgtaactgtggcaaggtgtgctctatctaagggtatgagcaggcactccgactggtgccccagtgtcttaggttagtatgtaccaagcaattaggatcttctggaaatgtgatcgttatgcgttttccgtcaggatctaaaacatcttctgcttggagggaaacatcaatagtaaggcaaacattagctagtatcaacaacgctctttaaacaaaaacaaaccaattaaagatgggccggggagatgggccagcgggcttgtctgataacccgcatttacattgccaaatctcacaggagtgtccagtgctgtagcagcagactctgtaattccagcgcggccctgctgggagatggcaggtggagacaggatactctccagaagctcctgggccagcgagtcaggctcctacagaaacaaagagactttcaaacctggagaggtgagggccaacacccaaaggttggccttggggcctcagatctccacattcataggtggcacacatgcagctacatacacactcagacacacacacacacacacagagacagacagacagacacacacacacacagagacactcacacaggcacacacacacagacacacacagacacacacacacagacacacacacagacacacacacaggcacacagacacatacacacacacaattcatactgtacacatgaaaaacaaagtattggcatgccttatgctcttacaatgtaaggcatcctattttaaaagcaatatttcttttgatttcacaagagctatttgattaatatgtttacgtgtagcatcttgttcagaacgggtggccataagtttcatggcgggactaggcagtgcttggaaagtcgtgtttcttttcattgaggggttgaccagttttgcacagagcttctaatgtgtagagtaaggcatggtggcactttagacaatgatttccttggggacagacacacggagatcacagctcactagaaaaaccaaagacaatcgtaagccctcagcactgtaaatctcgtgagaagagcagggcatgctgggtacactgcgggtcatgtaaatccagggggccctgggaagtgttttctctggtcttgggcttctcttccgtggtcctttgagaaggacacagccttccttctttctccctcctgccaacttccacctgctgactccatatacttcagtcagttctttgaattcctttgctgtcaaatcaaaatggttttggctttttacacttattgaattggataccagatgcctgatgttcaattcttaaacttgttgagatttactgtagctatccagctataatttgacaacattgttggaggaaaagcatgcattggtgaggagatcaacttctttaatcattcatttggagatgaaggagctgtgatataatgaactatgcccagctagcccaatgagactggaatatcaccccccacccggcaccaagacagtgggagcgaggtctttgtttgcctttgagtcgagatattatgctagaatttgacagaatggagatgcactagtcaatgtttggactgtaagttcaagggagtctattttcagatttttttcttaaaaaaataaatcgtgtgtgagtctctttatgtgtattgtttcaggggctagcaatggattctccttctccctttccctctccctccccccacccttccccctctctcatcagggtttctctgtatagccttggttatcctggaactttctctgtagaccaggctagcattgaactcacagaaagtctgtgctggaattaaaagtgtatgctaccactatctggctagggatgcctttttgagtggcttctctcattttttgggggatagtatctgtcactcaaagcactttattggtatctattttttggtgctcagcaatttcttatttgtggtggccagtgttgcttccatggtcttgtcatcttgacaggtgttgtccatcattgctgctcacaggccagttctgcaggctttcccctcatgtggcttttgagtcgttttgatgggaaatgtcttcagttttcagatatgaaaactgaaattctcatttgtcagttttaagtagctagcctacatctattcaccaagttggagaattgcagatcgttgtaatgatgaggcctgtatttggttgacttgattttgtgtgaggagacccacttcacttccttgaaatatatatatatatatatatatatatatatatatatatatatatatatttatagtgtacatagataggtgttttgttcacatgcatgtctgtgtgctatatatgtgcaaaacgcatgaaggcattggatttcctgggactgaacttacagaggttgtgagcccctatgggagtactggggattgaaccctggtcctctggaagagcagcctctaaactgttacctctttagtcctgatttgtactttcttgaagcttgctcagcatgaatttcaaaagctgagataaatgaccaaaattccacatttaatggacaatatgcatgttctaatagaaaagaaagggcgaggtatgtttgtttgttaaaaagcactgtttccaataaatccaagaacaaggaaatctgctataaaaatagtgttgctctaagcaatgtggttaggtatttgttaattaaatacttggtttgttttcatttcctcccctggcgctggacagtgaacccaggccttgtgtatgctaaatgtgtgctgtgccaaccatacacccccagccctcatcttagtggttttcagtgggttcttgtttatatctatagccttgcatcacactgggaactttagatataagttaacatcattctggaaactttagaggtgaataaggaacttttttacttcagttcattagaagtctctttttgggccatcttgtgttatctttttccagaacgctgtgcacaaaagcagccaattttaatgctataatgtaagttctaaaccatacccacccgaaggccagtaggcaatggctgacttgtagttggcgtgacatatgtgatttgggtggcagaaaacaaaaattaaatatcttcctcattaggaggacgttctggagatggatttctttgcaaacttggtggtatttaagacatttgtgctccaggctgagttgaatttagagtactaatgagcatttctccacgatgcttcggtttttgttgcatcgcatctaggacattcttccaaatatgtaaggtctaaataaatagagttcttgatggggaagctcaggatgtagttgatggggcagaatcaacatgtaaaattctccataatatctgttgttctgtgccctttgctgaaagagcactgaaatagtaagttttgaggacttcgagcaaaactcagttagggccccctaatgtgactggaaggactttgtggaggttacattttaaggccatcttgaggacgctgagtgacgggggggggggggggggggacgacgagtactctaggtaggaggcctgatgtgagtggagggttgtatcaggagtggagacgggtttggaggtcaaggggtggatgtgtcttgtggaatggtgatcttgaaggggacctgtcaggaggcaagatcagctgagaggcagagagtgtgtgtgttagttaagctttggttgctggctgggggaagcatccctgagtagtgaggagccgctcagcatcgaaagaagtgagattgatgagatgtaacgttgttgagaaggagactgagcagtccactcgaacatggctagtatgaaggggagcttggcttctccatcgtgggaagggaccagaaagggaaggggtttaatgagattggctgctcatttgataaaagaattggttttgctctactgtgtttgagaggtttcatgctcagtgagtcagaaaagcttagggctaatttgaaggaaaggtggcttgtcagcacactgaggtgttgaaagcctgttggaaaggtaggtccagctgaggggaaagacatactgcttccaagaaacccaagaacaggacagtctctgctgtaaatacagcgttaccctaagcaatgcagttaggtatctgtttatatgtgattctcatttctcccacattgggtcaccgctttgactcatgacagtggataagagagattgcgtacaggttagtgactgtattctggagagtcaggggaatagaagaagggtccaatatgtcttatagtacaggaagttcaagaagaacagacaggaaaaaaaaatcactgcacataagaggattgagggagtttgaggggaagacttggaattagcatagagttcctgagcttgctgatggagttggtgaagaagtagaagcagaagagagtagttccacactagcaactctacactcctcatttccttggctgcttttcaattctttcacctaaatggcacagtaggaaattaaaaggacttaaaactcaaaattgcccaaacagttgtgtgttaagaaattgtttagaagaactgtggagtagaaggagggtggagctgagttccatggcctggcacggaccagatcacttttgtgttgaaccttcctaaaggtgattggaatttgattacagattaggtgaggttaaaagtgaacatctatgttactgaaaactgcgcttgtactaaatgctattttatatatgtatatatctcagtttctatgcagattttggacctctgaacttggcaatggtgtacagatactgctgtaagctaaacaagaaactaaaagtgagtattctagatgtgtttatgtcttgaaatgaaaatgtttaagccagaaaacctgtccggttgggacggtttcgcacacatgtgatttaatcgggttgtttagatctttagaaatttgcgagaggtcacccaggagttgaaatcgatcccctggattataccacaaaggacatgtcaacctcattctttcctcaggacaactgcaatatgagctgaatgaagtcactgcaatcatgatctaagagaggcgcacagcctttcagattccgaacgagtctctatcggattccttcatgggataattttcttaacgccctcacgtctgcttgtagatgctgttatgaggtgatggaggaagggtctcatcaggagtaaaaccaggttttgtttggtcaaaatggaaaagtttgcatatttattaaacatcatctgtgtagagttaatgaccaagtaagacccctgaattatgtgctgtgacagaatgtgggaaggcattcagtattagcctgcagtgtttatgttattacatgagatccttctcattttctgtatgtacgtatggattttgtcatgcgggcttttttccttttaaactttgagtgcataagaaaagtaacatttataatactaggattattaaactttactaaatgaaaaacaatatttatatttttcttccaacttataaatgaacctcttggatgtttcagtttagaaaatgggacaccacaaggtatgtgtgtaagataatcaaggactcgtaagcttggtgtcatgattctctgtgttggatacggtgtggttgttctacagtacagtgtcttacacacatagcggctcagtgattgcctttggattttggttgaacttagatataaatatagtttggcagagtatttcctatagaatatattgtatgctttatacatttacatatttttggcatccacctcagcatggtatatggtcatacaatgacatttcggttaagcattatataacacacacaaaaaaccggtcacacctaactcatttaggaattaaagcatgcactattatctgacttgaaaaatatgtcgtaaattcattcatgtaaacaaggtccaagaagacactatctgtagtttagaaaaatagatatttgtatgattccaaagaaataaatagtctttttaatataaaatgaactttaaatgactgaactaataatgaaaggatcattagtcaatgcttgagtcttatccttggtggtctaggggatctctctctctctctttctgtctctctctcttgtgtgtgtgtgtgtgtgtgtatacatatatgtgtggtatgtgtgtgtgggactagaggaggacactgggtgtcctctatcactctctaccttattccattgagacagaatctctcactgaaccctgagcttaccatttggctagcctgtgtagtcagcaagtttctgggctctacctttctttgtcttctaggtctggggccaccagtctatgtagctagcccacctcccacctttacataggtactgtggatccaagctcaggtccttattacttgtatagtaaatgatcttactcactaagccatctctcaagctcctatttcctggttacagtatcaggtagttggcatgaaccatgtattacaagtaaccatatgtgacccaaaaactatctggagttaacaaagagaaagaaatcattattaggaagttgagactgtgcatctaactcagagttctactatagtaattgtagaagagaagatggtttgaattcttttctaccatattctatacctaacagttttggtaaatgcatatgaaaacttgtttaaatttcctttcatttccaaatcttccttacatcattatgaaagttcattaaggttcagacagtcccttggtttattccagtgatcagtaatcagccatatatgcctggaatgacatttttagctttaataaaatgagtgggcactttgtagctttctgaagaattgacttttcaaaactccaatgttaataagtcttgggctctttcaataaacaatatcaaatggaatctctgtatcaggagacaaaagtttacttgagcaatccaaagccagaattgctttggatttgtggaatccatttttcatcaataaagtaagaattctagccaggcatgatgatgcacacccttaactccagcacttgtgaggcagaggcaggtggatatctgtgagtttgaggtctcttctccacagtcagttccaggacagccaaagccacacacagagagaccttgtctcaaaaaagaaacactaaatttcaaaaattaagctgacatgccaaattaccttcctaaggtcacatctataaattcagatcggaaagctaagtgttcttacagaaggtttttaaatacttgcttcaacctgagcgctgtcatttcctgtggggaagctggccagtgtacttttaggaatctaaatgatagctgtgaagactggaacagatcacagggcgagatggaagcctaggaaatgtgtgacctgctcagagccccaggtgtagtcggggctggtgtcggggctggtgtcactcttacctttgcccggggggaggagggatcacggggccttgggtttaggatccatctgggtttattgtcccagttgtttctgggcctttttacctttccagtggctgtgactgccatcctggctgtgaggaaactcagactctttgctctcctatttggaaattactttctcgttacacatgcgtccttctgccagcagcacctctatacttgcaatctcttcaccctcccagagcactggtccctgactgatgtctctcctttgcaatccgctgttcctcatcttgactggggccagggcacctcgctgccatgcctcctcctgtggatgatttcatgtgctgatttcctgggcacggccgtcctcttgctgtcttgagccttggactcctccttcccccatgatgtatttggtttgtcaccacagccttttggattgatctggctacagtctttgttgtgtgttctcacgtatgcgtgtgcgtgcgtgcgtgtgtgtgtgtgtgtgtgtgtgtgtgtgtgtgtgtatgtgatgcttgctgtgatgtgtgtgcggaggtcagaggacaatctcacaggagtcagttctcttccattatgtgcttgcctgggatcgaactcagtttgccagccaggcttagtggcaagtactttgacctgctgagccagcttgctctcctccctcttagcattattttagttaataacttcttgttggcattcttcttgtgtgatgtttaaacaatcacaatttaattaattaattaattttaaaaattttaatcactgctttaggcacatgttttctagttttggaatttttattccttcaagttaagattttatgatttttttcccctccctagttttatgcctgaggtacatagacaatttttgctgtgaatctctaagtttctcatttcttagatgtcatagattttcttttcatgctttgagatgatttactgcaaatttactaatttttttcttttgctgcatccatgcacatttgattcccagtgactttagttttaattatgatggccagaatgaaaaagaatatttattaactatttgcttcaagtgccccaaacaaaaaagcatcatgcccacgagcaacaaaagcgtctgcttgttttaaagcgcttgatagttgttactaaggcgttacatacacgtcgtaggtcagagtttgctggctctgatcaagtctccctgtgaaaaagcagtgaccagagaggagagacctggtctcagaggcgcaagtacaccggacaaagcagtgtgccgcttagtgggaagcgacatccgtggctgacagacgagggcaggagtgttcatcctggaatctcaagggatctataaatccttaaactgcacagacactttgatgtgtacttttatttttcttcggagacgacccacagctccttattaaccctcaaaagtatccttggctcagacagcgctaagaaaactgagctataacataagtgcttcaaggctgcagcaggagacaaaattggcagttcaaacaaacaaacaaaccccccaaaaaccaaaaacccaaaccaatactttctcctaatttaatcagttaaaaaaaaaaaaacctgaaagctaattgaaaaatctgaaggtttaataaaagtaatacaattgaataagcttttcttaatagagttggtacattgttacatattgatttttcttttcctcagagaaacaaactttcagcttgggctaaaaataattagaaaaaaaaaaaaaaaggggagctgttttttctagggcagcaactaaaaaaaaaaaaaaaaaaagcagccgctgctatgaatcaacaggacaattactgtaatcttggaccattttgaaaggattcaaagaatattcagagccatttacaaagcacccccattacctttccagcataaaagagcaaaaagaggcaagaagagcggacgtcctggaagaaaggattgcattaaagcctggaggggcctggcaggggtgggttctgggaatgcccttgtggctgagtggctgggagcagtaattctaccctggaacccaggcagccgccgcactctcaggtcgtagtacacaagaactcttttgatgtagcgacagacaccctctttctataagtacaaaaacacgccacgatctcctcacacagtcctcttctgtctcaggttgaagggactgaggagcacaaaagcgagctactttctggagacagtccttgtagaggtagtggggctgtaactcacggcatcaagcgcatttcgagcttgtaaggctagacgtggacgttttgtatgcattcagagatgcacaggcttgtaagtgaattctctcaagtgtctttaaccgtttgatcagaattatcacatgcacgcatgcgtgcgcgcgcacacacacacaatcccccactcaccctttggagacagggtctcaggctagcaggcctggagtttactgcagaagtaagatggtcttgtgttccttatccgcctgcctttgcctactgagaagtaattctatgagtgatttttttttttccgttttgaccaaatgtgccatttattaatgcaatctactgggtttgaaacaatcaaacaaacaaaccataaagaagcagttgttttcttttgaaatagtaatagtaataataaaaaaatcaacctgtttttatcttagctccaaacaaaacatgaaccacattttattttgtgcagccaaagaaaatgttcaagaatgtccctttcctgagaaagttggaggtaaacaaacctagtcctggctgctccctggaagatatgttccctttcttgctttggcagtgacccctgatggctggcgaggtgctcattgtcatggctgttactaggctaacggagtcacctgtaagagaatggatgatgcctcggccaccacggtccctgcgctgtgttctccttaatcggacatggtccctggcaacgcttgcttgctgtgcatgggctgtgtttcttattaaggagtatattaatctggctgtgttggatctttcttactccagtcagattgacctgcagagtttaattaggcatactagccaaacgactccaatattttacttctagcacggtgagcaacttcatcatcgcgaggctgccgaagagggcacgagccgtcacgtgacccaggaactctgggtcttctagctttgccgtttccttgcatcagagtttgctgttggatggttacagggtctgtggtttcctgatgtaaacggatcaagtgcatgatctgtgtatgtcactgtcctctaaggccactctgtgctgttcctatgttagcatgccttccttttctcctatccctgagtttccatggcttgtttgtctttttattaccatgcctgaatgcagcctttcccatagcttttcattcagagagagaaaatgtgcatgtgcactatccccttgatttttgattcagtctgtcacagtgtcacgttccctgcttgacaagtgccattaaatatatttgatgatatgctatgtacttattgtgatttatctcataaaactctgattctctgggaagcgaagcaggtctggaagtctctgcaggtttgactacgtaaatggatggatgctcttctgctgtctcaggaaaccgtcattgtatagcgtgtgtcctgtttccctccctgtgtagttgttcccttgtttgccagaagccttagccactagtttgcatcagatatccgtaaactgagatcacacatcggctagagaccgggttcccctcataaagtgtctctgggagcagctgctcaattcattctgataataggaatgtttttcagtctggtaaccaggcacagcaaaggttgccattcagcttacagacatgccctgtagtggataaattctcttaaaataaacaatcccccataccccccataaaacccccaacccccccctccccccaaaaaatccaactcatccacacacaaacaaaaccaaccaaccaaacaaccaaccaaacaaagacattaaaattgagcaaagtggtactgggcgtgcatctttaatcccagaactcgggaggcagagtcagtggggagtctctttgtgttcaaggatggtcttgaacttggtttacagaataagtttctgagatacatagtgaatctacttttttttttttaaagacacatttaaatttgtggtcagcatttgtgactgatgaaagtgcacagagaattttggattcttttttcagacgtggaaggctcttaatggtgctatgcccaggtcctgcatggaaacagcagggttgagttacgggtgctttgagagcacctgcttttgtcctttgtcacctgacccactccaagttctaggaccctgggagtgtctgaattttgagcctctgtaatagctcccctgaaagtggtttcgttaagagaccagtgaaggccttgtttctgaggcgtcctctccttgtagtgggtgcgtttgtttatcgagacaagtgtttctcagaggactgcagaaatgtttttctgtaaggtgctttcaaaaagtggatagcatgacttggaattctttgacaagggacttcagtgtttttcaggaggcaggttcattaaatgcatggtctttcaggatcatagcatttcacgggggtggggaggggcggcatcatatttgtgtgtaacatttttccagaatttaccaatagatatagtctagtagatttcccagactctactccactgagtcagaaactctgggcaggcccagtggccagtcttcaagctctctaggaccctctgcaccagtctaatgcaagcatgcaatggaacactataatataataataaaatacaatgcagtttaggtttaaatttatttttgtttttttatttctgaaaaaatttcatactgctgaccttttcatcccaggacttatttaataaattctgagccacaagacttgttaatggccttgtgtttaaggtttactccaattatcagtgtcagtgagagagatctggattcctcctgcctcccacacttggctgtgtaagactttacagcaggcctttcctggttcctggcttatgttctggtagaacgcagtgtgcttattatatttcagccttgcttgggacctcagctttggaaagcactctgcactgttaaactggacccctctggcgctggctgctcctgttgttttgggaaatgagatatagtaattggcttacagatatttgctgctgctgctgttagggctggctgtttgtctacttagcttgagagggttcaggaggtttggaagacgggaatctaaggtctatatagatggctagcgagtgttctctgtcatggtcatatgcagtagagttggctagagggcttagtattctttcagagacatcttttttgtatttaagactggtttgacttgacccatgtttccatttgcttcgcttttgtactgtgttttttgtgatctctgagcatctcatataaagaaatgatctgtaagaatggggttagcttactgaaatccagatgcatgacgacggctttgcaaatgttctccctgaagagccaggactacctgggagaccacagagatgggccagagtgaagaggaggcccatgtcctgtcagaggcatgaggctctctcttgggcttaaggcagagactcagaagatgtcagtgggctcacttataaatcagaatcctgctatcccgagatctggtctctccccaaatgataaagtttttctatcttattattgacttttcctattgttgtgacaagcaactgaaggacagatggacagaaggaaggatgggaggaaggaaagaaggaagtaagggtggaaagaaggaaggaagaaggaaggagcaagaacgggaggaaggaggaagggaagaaggaaggagaaaggaatgaaggaggaagggggaaggaaggaaggaaaggaggaaagaaggaaggaggaaggaagaaagaaggaaggcaggaaggaatgaatgaatgaagaaggatggaagggcagaaaggaggaaggaaggaaggaagggagggagggagggagggagggagggagggataagggtgtggagggctgttcagaaagcagagagatggatgttgctgctcagctttctttctttctttggaattcactgtgggcccccagagtgtggactgctgctgatcacacgcagggctgaagctccctggcatatctggaggtttgtcgcttagaggattcttgatcctgtcaacatgaaccatcgtattcatgaaagagccttagagatgtgtagatgtgttctcactggatggtgctgttcattttagggtgcttggattgcatagcagggcaaatgtgtgcttttttttaatttacagaaatggtgtttttttttttcatatttgaaagaaaacattaaggatttgttttatcagtccaatcacagaaaacattagccaaatagcctagaaaatgttttattatccctaatgcttttcactgcacagataggatccactatggggcagggtggctttaaggagggatcctggctgaggtgaggggggtattagtaaggttgcagtttataagattcttctctgctgttatctactttgagttggttttgatcccttgggcaagaactccattccccgtagactgactttggggacaagtggccaagccacacggaaaccgtttctcagctgtagtgcttcagagacccaactctgaaaattaagtccaaaaacatctgcacaggagaaatgtgccaaatgttccccctataaatcatctgtaagcttgcaacaaacacaagtttgcttcccttggcagctttctgtgggaaatattttgaaatagttaacacttgtaggggcttaggaggtggctcccacagagaagtgctagtctctcaagccccgatgacctgagtttcactcctggaacctatgtaaagagctggatgtggtggctcgagtctgtcatctcagcattcctatatgagatgggaaatggagacaggagaattatatggaagattgtgggtcagctagcctggagtacacagcgtatctacagaaacaatgcaagagacccagcctaatatggggggaggtgagacagcctctgcaacattgtcctctgacctccatgtgtgagccctctgaggcagaggcagaggcagagggatctgtgtgagttcaaggctagcctgttctgtgtatcaagttccaggccatccaggaagagaccttgtctcaaacaaacaagtgaacatccccaacttagtggtgaaaaacaataaatggcaaacaaattaaaccacaaacagtaaaattaaataaaaaaaatcatccagagattcaataaatcaaaattgagaaagcaaggagccgtgtgtgaacaccattgatgatagccatgaagtctttaaatcatttcagtaaaatgatgaaattgtggaattgaatcagacacaactattttttttttcctctctgcttcctatgaaaaaaagccatcaataagaacagattgtctctgagtcagacaataactttcaaaagttcagctaataaggacacccctgttttcaaaacatgtgacttgtagttatttatgtctctagctgggatgcacatagcttcctgctttcatacataagctaaaatgatgcaccttggtgcttagatttttttttttcttttccttgttgaaaataacatgttagtagattttttttttttttggtgttggctgtgttcagtgtgctgagtataataatctatttttatttttggtgtgaatttacagacaatattaaaaggcctatatttaccagaccataaaaacagtccctggaagtatagtcttacgtgcctatatttaaatagccattagtcactataccataatagtcttgcaacctaaagaaattatgtttaattgaggcacacctattttctctagatttgaattgtgactaataatttgatttaacttaatagatctaattattacttttcatgtttagcatgtgttcaacaaaccatttggttttattttggattacttgagcatgttgcatattgcctggcgtatatagcaagtgcttaatgattgagctcatgaatttaatacatggctgttgaattatgatgttccttgataacctttcaatgttcctcttttccaacgaataactttctttaagctaattaaaagggggttactagtatatactagaaagaaaattttaatattggtctgtaaaaatgaaagttttggagaagacaataggatggctgacatatcttaaactgtaaagaaggaaacatacatcaacatctcctggagtcagagtgtcctgctgagaatgaagaggagaggtttaagtcatatacataagataaggaacatacatatacatatgcatatacatatgcatatacatatacatatacatatacatatacatatacatatacatatacatatacatatacatatacatatacataatggatatacatatacataatggatatacatatacatatacatatacatatacatatacatatacatatacataatgcatgtacataatgcatgtatataatgcatatacataagatcaggaataaattattcaaaatggctcctgtgactggagaatcaacgattcagttacctccattctcagagatgtcccatgttggttatattgtcaattctcacatttcaggtggattgaagagaagggaactagtatccctnnnnnnnnnnnnnnnnnnnnnnnnnnnnnnnnnnnnnnnnnnnnnnnnnnnnnnnnnnnnnnnnnnnttgataggtgcttatgccgtaagtactttatttgcggttattctgaggtcaagtcgatgtactgctaacgctgttgggtcccaggcatctctgtccagtaggacaggaggggtacattactagcaggttgggagctaattagggacgtaaagtggactaacatcatcggagtgcttactctccatcatcaccatcatcgccatcatcaccatcatcaccatcgtcatcgcaatcttgctttgtattgctctgagtcagagtcctctgtattactggcctgggactttctgagtagccaaggctggtcttaaatttgaggtggttttcttgtcttagtctccttagtgttaagatttcatgcatgagctgtctcgtctagatgtagatttatttttggacagttagtgaaagattcttggaatgatttttgtgtagcttggattctcctgttatcagcatttagtgtgcagaacacctatacctagtcaggacatacccaaggggggaaaatatgtgtatgagtgaaatataatatagaaaatttaaagtccgctaagctatttttgtggaggtgggagacagcaaaggagaggattattattgttaatttttaaaatcaacctatgcattcatctgtactagtgtttgcaatagaaaatggaatgtgaaccatgcatatactataacctccctagtaagtaagtgtgatctttacaaaagtaagcttgagtagaacttttgttctctgaaagcacaaacgcatcaatatgaattctatgtgagcaggccacagtttctagaaatttctggatatgctgggactgggccaaaagaagacagaaaccatcatggctcaaatgtccctgtaacctggcctggctcttggggggggggtgggggtgctctgtgtgattcctcctgaacaacatgctgatttataggaagggaaggagctgacatttccccaccttcccaggaagggccagggtgtctccaaagcctgaagcttgctgctgtgggtccttttcaggccccatactctgctatgccaagtgcaaattcaaatttccaggggtggggcgggtaggtgactgctggcaggccatggggacgcaggcagggaagaggacaagctgatggtcaccggaagcctgggccttgctcctggaacttcaatttcctggtttgtttcacttcttctgtcatctgcggccccctttctttcttgttacccagtacagtgcaaggagccgagagtcaataaaacacggctggctttttcattctgaagggactctgtgctgatagggtcaggtcgctcttctctcagccttgcttattttccaggttgtaaaacgggtgaattggctactgtgaccccgacatttcctttcgggtcttaggacactagggtgatttactgtgtaggcaggctgttgtttctaatctggagagcatacaggaaaaaccagctattgctggggagggttggggaattgctagtagctgcattaagcaggtatgctattttgcacctgacacactcataattgatacttgattgattgacagcgtgattaagtatggagcgcctgtactcacctcttgactcaagagccatgcaccaagcatgtctttcctatggggctttgtgatgttttgagcatgttatttataggtcctttgtcataaagcacctctgtcaggacgtccctctccctcaccatccttctctcttactgtccctccctcatcctttccttcactctttccttctctccctttccctttatttcttcctccctttccctctctcccccctccttccatctttccctctcttccttctttccctcctctttccttctatccctctctccttttcttccttctctccctccctctctcccttcccctccctccgtccttccccctttctttcttccctcctttcccacctgtcattcctgtgttgtttagagtgagctttaatttcaccagttaactcaggaattttgaaatgaattctgggcatcacacatgcattgcactcttgagaaaacaccctgagataaagcaagttcgggagcttctgccactttaaagcaactccaggggaaagcgcagcctctggcgcagtagaagtagtgctgagcacagcatgagtttgtcttaccctcagtcacagtcccgagtggaaagccatcattcttgtatgggtcatttcccagctgacctcgctgattttgtaaaagctcagaattgctatataaaaaactgacatttaggcttgtggtcatttcttcaagagtgaatgcttcttactgtatgtacttaattgttgacacaattcttataggctagtaataggacttatacatatcagttaatgttcgtatgtgttcagtgttgctaggtgggaaagtctgactcttataaacgaatcttctctgggtatgaaagagcctctaacttggaagcagccatagaatctatgacacaaaataagtatgtgtattttttttcagacagatgtccctaagagtgaagacaattcaattttctctctctctctctctctctctctctctctctctctctctctctctctctctctctctctctctctctcttcctctttcaagatagggcttgtctgtgtagttctgactgtcctggaactcacattggagaccaggctggcctcataatcacactgatccacctgcttctttctgcctcccggtcctgggatcaaaggctaccactgcctgcccagtttcatgagtctctttttaaatgtgccatcagccacgttcaagggctattggctcatgccttgagacaagtcttctgagctttagctttctcactgataaggtttagataatactggagctcccctgcctactgcacaaaagtattatgaaggtcagacatggaactgtctgttggatagcaccacattatatatgtaaattattacaaatttatagcgacaacatatgcctttctcccctctaacccaaactgattcatttccccagcagccattcccttcagaaagcctaacgcttactcttgatgaaccaaatcagaagttagtagtgatttcacttctctagtacccgtgatcagagtgtgattggctctaagtcccggaacacatattgaaccaggattcgtctttctgtttcgtgccgttaccctttccttgatcacttctgtagcttcatgaattttgctcctgccttcctttgtgtattcttgtttcgctttgaattcgcttgagatgcaattatcagggtggtttttccaaaaaaattaaagtgagatcgtatcatgaccctggtttgaatctgcaggctgactctttccagcatctggttctttcgactggatcctgtgtggcctcatgatctctgtgctcacgtcctcccattgtactggccttctaactgaaaatagtgcgccttttctcaccagaaaccttgatagttctgctctctttttatctagagtattcttacttcagaccttccaatgcctgtctgtcccctctgtcccccaaagttactgtcttggagagcctttcccccaaactccgccctgctcccttgttcacctcctggcacttttctgttttattttctagctggcactccgtctttgaagttacgctggtgcatttacgtgtgtattatatctttcccagaccaaagggtgggggaccttatctgttttgctcagtgccctgtctagagggtgataaagtatttaacgaggggttaggtcaagtcgttcactagttgagttggaagctggccacaaggctgtggcagtcctagaagcttcctgctctgctgaatcatggtcgtggatgggaggcgggcacacggacgaccttagaatgcccagcgtggaaggggcaggtgcgaggagcatcagctgtttccgagttggagtatctgagtaccaaacatccagtttagggtcatactggctgtgagtatgtgaggcctgtaaatacacggaacgaataaagcactgtaatggggcaagttggatagaaagtataagtgatgtctttcttcttccttcccggaatatctgaacgcacgttgagccaaaggacccagaatcaaaggcgatagctggcataagaaacaagaatgtcttcctttgaaaacagacttttatttttctaattgtttttgctgtggtaaaatatacaagactgttaaattagagacataaaaacaacaacaaaaccccaaacaaaacagggtttcctatatgttggggtggtcagcacaagctgtgcagtcaaggtgactctgaacttcagatcctccttcctctgcctctcaagtcctgggatcgtgcaccatcatgcccacctgcctctcaagtactgggatcatgcaccatcatgcccacccagtttatgcaggcctgggggcatcaaacccagagtgccctgtgtgtgctacgaagcattccaccagcacaggtatatcccagctcttagaaccatttttaagtagccaattccatggtattgattaccttccaaagacagttcctcttgtaggtgacttccagtatgccctagaaggtttcatgtttgtttccttatctgtaagcatggagagtccatttaaagccctttcttctaaatcagtcacaaggatccgagaggagataaagtacagagaagcctcttgttcattaggcgacccacaggaagtattactctgtggctaatcttaaggccagacagctggatcgatgtggccacttggagatcctagtgacacgtattggcatggcctccttgctctctaggctatgacattgcactcctggaattgccgggctcacatttgaattagatatcttctttccagtgtagcacttggggtagctgtagaatcaggatgcctagatcaccggagcacccagacatcttcatgtgacttgaagaaagtagctgtcaaaatgtactaatgaggggctggagaggtggctcagtggttaagaccactgactgctcctccagaggacctgggtttgtctcatgcctgacatggcagctcacaacagtctataattccagttggggagggggcagtgggaggggggagatcgggccctctcttctagcctctgtgggcactgcatgaatatgatgcacagacctacatgcactcacacacatgaaataaagataagtgtaaattttaacaaattatattaatgaagctcttgccctgaaattcaagacaaagttcttattctgtgttactgtatttagttcacagggctttgacaattgatgacgtccatgatggctgaagaaatgggaggtgtatatgtgtgtgtgtattacaaacatataggagaagttatagtaatgtgatttttttttttttagctagtttacaaattaagttcagagttaaggaataaagaagttttgggttgctatggtagtgcatacctaggcatccgggatttgggaggctgaaacagggcaattgtgaacttgactccagcctgggctacatagtgagttcaaagccagccagtctgagttctatagtaagcaagaagaaacaattagttttcagagatgcagagggtgcttaaacagaggtggcaaccacattataacctccttaggttacctttaaacctttgccttgatggagatctacagtatagattaactgggtgtagcctgagccagactttatgtctgcactgggagataaccaggttgaggtttatagactttctaaccatgcatgtctaccttttattttgtaccctacacatagagctattaatatggttttattgtgctagtaagtcaccttctaattggagaggtgtcattctctaactggatggaaagcaaccactgtagcagagccagggctgtagctttgaacccactcagtgggtgtgtgtcacaagtaggcctttgcttatttaatctcccgttctttcatctttaggagcaggggtaatgatactttacgtagtagaggcctgaaggtgaaggaggccttgcatataaaggtgacattgtgatcatgttctaagcacttagaaatcccggccaattcagggggtgggggtggtgctgcgtggccttccccagttttctgggttggttgctccctcctcctacctgttttgtgctggggcccttagaccacagctctgagggctctgatagccaccttcctcctttagtgttcttatcttcttggttatcccttagtgtgcataagtccttccgtggctcagtagcaatcaggtggttgttaatctaatcaccgcttaatagagttcctcagatatgagtattgagctctttccatatttttttctcctatgatgtgattttcctgtttagaggaagaatctatttaaacggcatgggcatctctcttgtgagatgcgtagtcaggtcttgattactttagtatatatttatttagctcctgtgaaccatggtgagtcctaaaggatataaacaaacaagcaaacaaacaaatccagcttcaaatatggagagcacacaagcaatagataactgcaaaaagtgtgccataggcattgaagcctggagaaatgagaattcatcagtcgcgttggagcgattaccacgtgacaggcgcacagccagaagagttgatggtgaactgtgaattctcctactttctgctgttactgtgaggacctgaggccacacatgggaggattgggatggtgggtcccagcaggcggagttggtaaggaagtgtcacatagggaaagcattggagctaagggagtttaagaaagggataatataacaagaagttggggagggtctcccccttttcttcctcttctaatcaaaaagaaaaggtttaatgtgtttccttttgtgtggttgttttgtgctcatctgaaccccctatcactgagcctgttttaatggtttgctgatcagcagaccccaccaacagggtatgatacagtttgtttgccatttaatatttttttatagcatataaaacatttttctgaattaatatatgttgttgtacttgttcttagcctaaatgctcaggtgtgatttcaaatgttctttttttttttttaatggatttttaatctttagagtgctagagatgggatcaataggtttagggttttttttgttattgttctttcttacttttttttttaagtatagtgttaaaaacctgtggcgccttaaaccagttcaaggcctattgtacttaaaccagtttgtacagttggcactatgtagaatttaaaaatttatacatgcattaaatttttatatttatttatttgtgtgtgagtgtgtgtgcgtgagtgtgtgtgtatatatgtgtgtgtgagtgtgtgtgtgtatgtgtgtgtgtgagtgtgtatgtgtgtgtgtgagtctgtgagtgtgtgtgtatgtgtgtgtgtgtatgtgtgtgcgtgtgagtgtgtgtgtgtagatgtgtgtgccatagcagcctgagtatagaggtcggaggacaacaggtgggactttgttctctcctctccaggggttgaactcaggtcccaagctcaagctccgacacaagagcccgtctttctgttcctccaggcttatttactgggtgtgaaccttacagttttggaaatttaattgctaaagactatcacttcattatttttgcttttgagattgggtgttctgtagctcaccatggtctagagctctctctttagcccgagctgccctggaactccacatctgcctcgtatctcatagcagatgttctggttccctggctcttgcagtctttctgtcctttctttcatgatgttccctgagccttgggtttagggctgatgttggagatgcacgtagtgggtgaggttggcgtcccatggccagttagaacaatgttagttaaaaatgcttaagtaagtgtcggtgtgttacttgatgcctggttggctagccacgcatttgttttgctcttctcacagaccatgttacttcctgcctttattgactttattaacatctgtgaattatgatttctgaaccgccttagacttgtcattaaatctgtagcttcagcgtgttatttaaaacgcaggcaaaaaaattgtcaggaaaaatgttggttcaaagtaacaaggatgtttctatcaaacgtttattaaagcagtagctcagcggctgtcagggaggagcagagcatcatccttccctgtaaatctaatgatagcatcacgcagggaggaagggaggggcggggcatggcttggctgactggtttcctgtttgcagttccttcctttagtgggttgataggcaactcttttgtgatgttgcctgtaaatgggccatgtttttgttcgtctaagcctgtgttttttggtgactttgaaatatcccaggcttcctgaaaattgtagggttttttttttttttcttcagtctctccaagactggtggtgttctgtttgttattttccacacagttagcacagtgccgtcttcccatagtccgttctccttgggttccctctagctgggttctaggaagagtccctctttttgtttgctgacagcatctttctcaatttactgcataaatattttccgtatttcatttttcctccacttctgctagggaagctgaaaacaagcttcatctgtgctccgataagcttgcaaacacatccatccacacgtcacggaccgaacccagtgatagaacgcttattcgtgtagcacgtttaagggttaggttcggtccctactactgagatggctcagtgggtaaacatgcttgcggagcaaacctggcatcctgattttgacagagaacccacttaaaggtggagggggagaagaaagttggccgctgaactctgtgtgatccccccaccattatacatacatataacaacaatgacgacaatgacaacagcaacaacattgtataaagaaaaaaaaaaaagagtcaggagtggtgatttacacctgtgagcccagcatttcagagtcagagacaggaggattgccatggttcaagaccagcctgggctgcatagtgagactcttcccatgtgtggggtaaaagtgtgtgtgtgtttatacacatataattacatattttaattacatgcatttattatggaaataaaaatttaaaagccccttcaaatccttatgccatttcctatggtaagactgtggcttttgacgtatttgccatgcctactgtgagaccgtgtcctgaacacacgtccttgggcatacctggcatttgctgttccatttggtgtagctttcctgatggagccagctcatagtcagcatgtgctaatgtaggcccacaggcttcctcttcaacaggacacatttcctaggacatatgacacaggaagtcatacttccaagtttcatttatgcaaagggatgctattcaatgattgtactggggtcaaatttaatactgagagcatgggatgtatttactgttttctcttagttttaaagtaaacacgttaggttggaaaactagatccagctttgcagggccactggagtatctccacaggaagccactggaagaaccccatctctgggctgctaggaactcagtggggatagagctaatggcttatccaagatcgattccatttcttgaagagaaagagcagaacccaggttcagtccctaggctgaagctttgtttagtcagagacaactgagaagctcctcttagagcaacatctgctaagggattggaggtagcatgccgagaggacagatgggctcttcccgggatagagaggtactgtagtgtttcaagtccaggtgtgtgagctgtcctccaggggacagctgagtgttgattctggctaactgggcgaacatctactcacctctgtgttcctgccagatgcaagcatagttcttttcatatttgctttgtatgtgatgtttgtggatgacttagggtaggtctgagcaggaggcaaagtgataagggagtgggagagggaggtgggtgaggcttgcaatcttaggatggaatttgtctgttttctcccttacccccccccacatttacatatatattgaatgacttcatgaggcaactcctcctcctcctcctcctcctcctcctcctcctcctccttcttcttcttctctctctctctctctctctctctctctctctctctctctctttctctctctctctcttccttttttgagacaaggttctcatgtagctcaggctcagactcaagttgttgccatggaaggacctcagtttctgatctaaggtcttctaccttgtagttacacatatgatgctggagattgaacccaggaccttgtgcacgctagacaagtactctaccaactgagccgcatcttctgcccatcaggcagcttttcacattacagtgtgtgaagcatgctattttcttttctatattacttaagaaaaatcagtgtggggatgtagctcagttggcagaatgcttgcttggcacgcatgaatcctagtaccacgtagggcatatcagcacgtgcctgtgatcccagcatttgagagaaggagctgtctaatcttatattagacaggagaatctggactgcaaatcatcttctgttgtatagagaagtcaaggccagcctgggctacatgataagatttgtctcaaacaaaacaaaatcaggactggggaatatttttttttgttttgttttgtttttttgtttttttttgtttttttttttaggacctggattttggcaccaaatttgtggataattgtttgggtttttaagattagtcctcagctaacaggatcaagttgaagaaaaactgccggtattttcagtttctccaagagactcccatgccaaggtccaggtggtttttagtcagctgatactgggatcatgggaaaagctgcttgtgttaagcgcgcagatcataagactgatttatccttatcacattatcatctgattcactgtgttaccctcaggcttctctcaggctttctcccccttttctaggcggccagagcaggctgtccggagtaaccctgaaggagaagagcctgtctttggtgtcaacttggggcccttgcagaggcagcctgagcctcctaagtcagtgtgaagagagtcagaatgcacccaggcactatccattaggtttttaatgtattttggattctataattttaacgtgtgaattttatttcaaggacacgcccctaatacacacacacacacacacacacacacacacacacacacacacacacacacacacctgagtgttgtggcacacccaaatgtcatcatttggaggctaaggctgggtggttgtgagtgccaggctactctgggctacatagtgacaccctgattcaaacgaaagaacgaatccctccaaaaaccacgtgaccctccaaagcctagaaaggaattccatttgatatgatgcatttcattatatttatatgcattttcatattatatattaattatatcctttctccattgtggaaagcgaattagttcattcaaaactctctccatatgtgagttgaaaggaggagagcgaggtgcagtccctgttcggttcgctctgtagacatgactaagatcgttagaatttaagatgtcgttgcacattggtaagcatagactgtgccacgtgaaccactgaacacacgttactacttggcattcttttctcctttcctttcttcctctctgtctcttcctctccttcatctttcctttccttttccctcccgttccaacatgtcccccactctcatcccctcctgagtctttctctgtagccctaggtagcctcaaactccaccgatcctcctgtctctctttggatctttgttagtttttctccccactcccacccctcattctcaggacttccatggcagggccttgaagggcttttgacatttcattttgtagagccaggcttatttagtttggtggcaaagtcacggctcacgaaagtaagttgctttgctggtgtcacctttgcttgaaggaaacattcaaagttgttccacgacttcataaagctcttagcagggggtggcctttgtggtttacagcttcacactaaagagcagagcgagtgtcagcctttctgtggggtcgtgcagacggcaggctgagtcagactcctcaatcctttcaggagtaggtgtgagtcattcattgggcttgcttggtggaatttcttatttaatcaaaataatacgaaactttttttttaaagacaggctcttcctggtgtttctccaccctgatctgtctgcctgcgccagccccgccccttccggttcttcacactgccattttcttaccacctcactccggagcaaggctcaagcagagctttctccatttacctctaaggtgctgtgataaacttcccaaagttagttctctgcaggctctctctcccctgctagagtgagtttctggagtaaagatatatggattttcactcaaatatctatgtcccctgtgcccaagccagtgcctgtctctgcagttttagtggaaaaggggatggatgcgctaggaaacgtccctgcagggggttcagagtcccagagcgagcgatcctgtgctgaccacctaaacacagtgcagacggacctccccctcggtctctccgctattacatttccatatatgacagcaaactcttcattatccctgacactaggtattagtcaattttggccttaacatattaaatggaaaattccaaaaaaaaattaaataaataaataaataaaaagttttaagttgtttaccatttcaagtagtatcatgatgtttcttactgtctggttctattccactgtggctatgaattatctcagcgtccagcagatccacattgtatatcctacctgccccatagttacccactacctgtcttggtatctagtctactggcatactgtctcattgttcatattgcagtgatctttaccaggttactctctacctgtattatccacccaacttcatctgatcacttaggcactgcattttaaaaaatgatttatttatgtatattagcacgctgttgctgacacaccagaagagggcatcagatcctttagatggttgtgagccatcacgtggttgctgggaattgaactcatgacttacagaagagcagccagtgctcttaacctctgagtcatctcttcagtaaaagtggtgtaagaaaagattttgagcggctacattcacatagcttctatgctgttacaatttttttctgtcaatactagtttctgttgttaatcttttattttgcctaataagttaaataacataggtatctatctatctatctatctatctatctatctatctatctatctatctatctatctatctatcatctgtctattcatccatagttaaccaggaggcagtagaatggctctgcaggtaaagtgcttgctctttaagcttgaaccctagaacccacacacatgcagaaagagacagctgatgtcacacagtcatactctgagctccacacacgttatacacaaatatgataatagtcaacaagaaataataaaaaaaattacaaaaaaagaagcctttgggtcttcgtggtttgaagcttctcttctgggttgacaagcatgtcccctgtggggaagtggaggtcactctgctttagtcctgagttctaggccttgacgcctctgaccggtatcccacttcagtggtcaatttgggtcagctgctttttaaaatgtgggagtaggaaggagatccacgatgtggacagcattggggaatgcactaacattacagaatctcatgcgttagaatgagggacgtcccaaatcccatgagtttgaactaatatgttccctttcagagatgtctgagattttgaggaaattctcagtgcctgaaatgttttttttgtgtgtgtgcctgcaatagagttgtagttttgaccataagctacatttttttttagagcccatttttaaatgtactttcttcttaatgatactttggtgagttgtaagggaaattatgacaaatagggggttagcattttaaaaagttccaaaatagttttgttttcctatctccaactaagtgaatgtatttggaaaaaaaaatataaaaggatatcctggctttggactgctgctatgattagcacagaggtcagcaaatgaactggatactagattttatatctgacatattgtgcttatgaattcaggaaagaagaagttgattaagatcttctattacgttgttgggcatggtggcccacacatcccagaactctggaggcagaagcaggtagatcactatgagtttgagactggcttggtctacatattgagttccatgccagccagggctgcataatggtatcctgtttccaaaaaaacccaaaccaaaacaacccaccgaaccccctaaaaaccaaccaaccaaccaaccacaacaacaaaacttacaattaacttctttttgggggggatttaaggaatgttgtttggcctaagcctcctaggttcacaagctccaggatgtcaacagagagcctctgacttctttcttgtccactctagcagtccagagaatcattttctctgcagatttgccccagtggctccggacatgggttcttcctagaaacagacatgctttagggaggcttgctcctcaccccagcctccagctttcctagtccccatcctcactataccaggagactcagaccttttcagaggaggtcgaaccaggagggaagggaccccctgttagggttggcattcaagtatctttgaaacccttgcattatttgggcacccaagtcccagtgcacactgtgatatgaaatagccagccacctcttctcatctagcatccttgtcatttcattgtccctctctctctagttgtgccctctccccaccaatctctttcttcttctcacttgactacttctctcctgttgtcttttctttctctttttcctcctttccttaattggccaatgcatagaataacagtgttgtgataactgggacttttttgttctttggagctgaatcattcttagacttactcaagtttaaaacagtacatgaggccatggtggtgcatgtctttaatccagcactcctgaagtagaggcaagaagacctctgtgtgttccaagctaaccttttctatgtagtaggttccaggccggccagggctacatagtaagacccaatctcaagcaagcaagcaagcaagcaacccccccaaaacccccaaaaccaacccccccaaaacttaataatagtgaattttctggttgtttaagtgggaataaattgtttattcatttcagtgggaaaccttcatcctctctccagcctggttaatatgtatattcttttattgaactagtatttatgagcactcatgccagacattcatctgggctctcaggtggtattgaacaagtaggtttgaatccctgcctttctgagtttatattttgctgagagaagcatggtgtaaaatgtagcaacatgctggcggatggttgcctatttcatactggaatcagggaagtcctcctcgagcgacggacagttaagacgatgcacaggaagagtattttgggtagggcatgtcccaaaggcctcagagtcagaatgggtgggttgggagaggagctaaggcaagcccaggttgctgcatcgtggtgtggaggacagcacagagaatgagctctggggtctctgtccagctggtatgtaaggatgagtctgggtttcattctccacggcacaagatgctgttagggagtgaaaatggcccagcagccttttaaactcacctgctactttgatgacttaccttcatggctgaaatttattctgccccatcatgacagcttaagtgttaacctgtctgtcttttctgttctcacttttatgtcctgaaagtataactcagtgtctacaagtcaccacatgaacacagaggcagatgcactacttgagctgtaaaggaccttagcaaatcctgttgatgctgtcttgaaatttcattgattttttttttttttccattaaagctgatagttgtgtgcttgtttgtggctctgaagaaatagccacggtctttaatgttctaatgctggtaacaatggttttcagcaattgctgtgtgtcagaaacacctgtaaataatcgtagtcagagctcatatttagtgagtttgaatcttaagcaagcaggtctggatggctatatcttgaaacagcttcaaagttttcgttgttgcctgtgaagtgtactgaaaactgggagcatctcctgcattgaaaaactggatatatgcaagggatgctctatggggtcagaagcatgttagccttgatgttggcattatccgtggttcccgtatcagtgactctttgttgaaccaagataagaattgtctgtattggaattatgggaaattctctgccttgatccttttcctgtcctctgccccttcctcatttccctttcactggtaaaccggggcttcaagtcttgatgcgacagagacgtgagggagaacagctgaccatggggcgaggatggatatgtctgctggatttttagaaaatgtgatgtgtattcactaaagtgagccggaatgggggtcagaggtgaggcagggtgtgtggggatgggggtgggaattcctagtagctacaaggaaggaagatgtattttctataaagtaagtgtgtggtaaggtaggtctgtggttgcctttacttgtctgtgttctcgtttgtggaaattagtgagcgatggcatgtaggaacctgcttacttcaaaacaagacctttgcatgcttaagagggatcaattcttttctcttcttgaaggacaatcttgtcatgtggcatttgtttgcaaagttcaggctaatgtacagacaaatgaccacaggatctgttctgtaaacacccacctagtggggcaagctcttgtttctcctgcattctccaagcaacaactctttggtaaacactggaagagaacaaccagttccttgtttgagtccattgttagttttctcttcttgagtaagttcaaagagaaggcgcttacacattaccaggcaggagctgtgagacctgagttgtatgcagtgtggctctgccttgaaagtttgccttaacatctcccccgcaaactcctcaaaacccagagaaaaccaggagaaagatatttgaaaatgttttgaaattgcttattatttttgagataaggtcttgtgatgtcacccaggctggcttcaaacctgagctccctgtgtcttgatctctgagtgctggtgttacaggcacactctgctacattcaactaaaaatttaacttagagaacactgttgttgtttaatgttccttggttacatgatctggttactgaatgaacactgagagcctggtttaccttctccattcctggcagatctcaggccatggtttgatggaaaacatccaatcttgactgggctccatctctgctttgcagccctcttgctgtgtgtgctcagaaagtgtttccttcccaacagttcccatttgttaccacaaggaaaatctctcctcttatctctgccccacttctcattgccccaggttttaaatcagccttagataaaaatgtcaaatattaaggagagttatgcattttgaaatagaattgacataaatataatacaatactgttaaaacaattgaagtagttcagatttcaatgtagagtcactgagaatgtactcattcattccctcacggtttccttatttttaagattttacttttatttattattattttgtgtgcgagtgagtgcgggcaggcacacatgtgccctggtgaactccgaggttagaggtcagagggcaactttgtggagtctgtttctcctttcacttttacatggtttctggagactgaacacaggttgccaggttgtcatcactggcttcaactttgagctttgatcttgggtaaagtatatccggagtttgagatatttgcctttttaagtaagctttgaagtgtagttcatttgtaagtgaaagagttatcatacaaaatgacagatgtttgaaaaacttaaatgtttaatcatgacttacatcagccactagtatcttgatcataaacatgttctgatttgagcctgatttgaaccgagttttacctagaggttgccttctgacagtgactgataggttatacacaggcatatgcttacctgggtatacatgtatgtaacatgtaacctgtggttactccaggaatatgaaggacttaggtactctaggggccacacattttcttccatcccccattctgttttttttttttttttttttttcatgtggaagaggttttattgggagcgagagacaaggtggcagcagaaagagaagaagaggaaaagagagaggggaagattttctattggtgtggttttcttcggtttgcttggcaaaggcttggcctacgtccttatgatttaactgtcggtgatgtgtgtgttggcacatgggctcgaatcaggcataagcagtccacggtgtcattgaaacagttctagcaagagatgtgcgactgtcccagtcgcatcatcagctctggagagacatctattcaggctgattatgaaaattctgctttccatgaaattaaatgaggagacacatgtggctaatatctgcaatcctcccaaaaaacagcccatcaaaggctcccgctagctccactctggttgtatccatgagagaggtggaaggagtgtttctcatccaaatgaattttgagataaacacaatcgtgtctgctgcttgtcatctgtctacttaacccaaactccagatgaaaatgtagagatgtcatgagggcatttcagagcaaacagaacctcagacaaacaaacgaagtcacagcccatttctatgaagatgtgggatgaaggatttttagggtagacgtaagtgatggggtggtgatgtgaggcccaattctgcttcccccttacggtacattgtgtctccatctttgttaggcagtactgtgttcttcgttgctgacttcctggtctgtggtttctattggattggaagggttttctatatactggcttcaaccagactgcagaagataagattcggtcttattattgtgttttaattagaataccgagcctggtagatttaaagtagaccagacgcaggccgttgggaacacagtgggtttctgcttcgtaaccacaggcttgcctatttaatgtcctcaattgttccactctgagtatttctgcttctgtaagttagaacaaaagtgaaattgtctgtgcatctcacaaataagtaggttttttttcctttttttttttttttaaattatcaagttgaatggagttattgtttttcttgtcactggatagaatggcaggatatgaataagaagaaaatgttacaaaacattaaaaatttaaacatcactgtttgggcttgtttatgacaattaaaattgaaatctgtcttcaggaaatagtttacaaattaaggaccttgacatttaaaaagtctgagaaccaagtcttaggcaccaaggacaaagcttaaaaaaaattcatgacgttggctttttgcaaacttttttttttttgagatgtgccttctgtggtatctgtaatctttacaggtaattgaagtgtttttctccctagtcttggccattttgttctgttgttcataaaagttcatgaaagttcaaatacagaagccataagtctgaatagtaacacctctctctccttgacatggacgtggttcgagagacacaggggtcagccacagcggcgatgctgagatgctttgagagtggatttgataaatccaggggctggtgacatttacttcaatgttcatgctgaggcttggactgagagaggcaccggtgcctccattaaaccgagagggtttccctggatgatggcctcatcgtcctgattttagcaccccatcatgtccccatggtcctatgcttcggcagccatttggacttagctctatgaaccattcagatctaaattcacacagatacaggtggcagtatgagtttccttgccgctgccacagagtatctggcaggagcgtcctaagagaggggactgattttctcccatggttttggatattttaatacatagatcccagtcctgttgatccaaggtgagatggagaatcacagtggtgggaagatggaggacaggaaccagagaatgaggaagggattgggggtctaggtataacatgcgccgccataccctaatgactgacttcctccaatgaggaagttctcatagaagtccatgagagacatctgacatttaaaccgtaagagtggagaaaagagaaaatattgtgaggctaattggatctcttgtctgtattcccttactgtggtagagttatatgtcaggtacaggtagaagtctgctacgcgtttattacactgtttaatatctctctaacaaacaacatacaacctagcgatgtctccgtgacactttgaccttctgtctgggggaagttcatggtccaggaatgtcccctcttcacacttcctgaaacagaagtatagagaattaattaattaaattaatcaatcacaaggcaaaagagcctacctctgaacctaggcatcttagctcctgaccattgggcttggttatcacactctccattttgggaatcagtgttttcgaaagtatttctttacaaagaaatctatttattgtttgtgctatgaccaaccatttttagagcactttttatgtgcattgtgctgagccttgcagatcttaagacatgaaaattaccttcactagcatttacagcctagctagagataaaaacaaaatcagataaccttagaaacaaactacagtaggaatgtgaagaagcagggctagaaagatggttccgcagttaaaagtctgaggcctcagccttgggttacatgagacccttttaagaaaacaaaatgtaagcatagtacccgagttaaatctcggcgacccacatggtggaaggagagaactggcacttggcaaggggacttggaggtcctctaacctccactgacctcccattgtgcacaataatgtaataaaaaacaaaacaaaacaaaaaccaaaaaaaaccctagctgggtggtggtggtggcgcacgcctttaattccagcacttgggaagcagaggcaggtggatttctgagttggaggccagcctggtctacagagtgagttccaggacagccagggctacacagagaaaccctgtctcgaaaaacaaaaacaaaactaagaaatctgtgctcatgttaattcatatttgtgattagataataaaaatacccttgagacctcatacattttctcagagtagccttgaatgttagcagtggattttctgttattttgctcaatatattagttgttcagaagagggaaagaagcagagaacaaccttccccaggtaggttctgcccctgtgacactgccactgtgacttgaaatcaacattctggccagttctgagtcaattaaatttctttccaaagagatgtccaggaaactgatgctacaacccgaaaatagttgagaactaaggtcatctgggtatgacccccaacccctacccccaaagagattatctctaaaagctatcagactagacaatcaggcttagcagcaggtatctttgttcactaagccgttttatcagctccttagatttctattaaaggcatatcaaagttatatgtaagtatgtttctttcagtagtgaactcttttcttattaaaagatagtaatactccccagagaaagctagaagtattataaggctcaaggcagcagctccatgggaagatcattaccaaatttacagtctggcttggacttctatgtgaaagcaatgatcgtttctcagaaccacagattgcacagtagggagagcaggttgtcaaagtgcaggaatagagttgcaaatctcaagttgtttctgaaaaccatacatattatttttttataggttttatggatctcgtgacaataggctctagcttaaaagatagttttaaaaatactgcacgtaaattccgagaacattttaagtagtgtcttgggtggtctggtattctgtgaagttaggagagattgctaatttgatatatcgtcagtgtgtgatatgcatacagatgctttaaattttatgttatgtattgtaatattcctttctgtgttggttcagtgacaggttgcccacttgtaatgctatcaagtactttaaatcacattggtttctggtaacggagtgtctctacaaagagacttggtagtatgtggtgatatgtaagagttagtccatgataattaaagctttggcatcagtgcttatttataaacattatagattattttaatttgtagtactataatttttcttatatttttcaataaaacccctttgtctcctgaatagtatgtgttacagtcctgcctctcagggatcatgtgacaaatggaaaagtctttggtttctggcattgaaattaataagatagaaaacaaatcactttgattagtagactcatattcagttaaaataggtacatatatacttgtctttttattttattttaatttttttttattgattgagcaggtctgtagaacttcctggcaagaatagaacaattttatataagtaatgcaggcgtcactcactaaattggaatggaatgaaacactgtctctgtcaatgatttttgtcaagtgctgatcaaagtttgggaaaattcttcccattgacttatgtatgctaatagctagtgtatatgtacacacacacacacacacacacacacacacacacacacacacacacacacaccatttccttttagaagccaaaaagataaatcagaatatgtggtaggtgctttgataatagtttcagaagatatttttaggaaatataagacttgttagcacaactttgggcctcaatatgaactattttttggggggaggaagacatattaagcgtttcatgaactgatttagttactttctgtttaacaccaatgttgttcacacctgtacagaagtagaacagagtaggatgttcgcttctctccaattccgcatcaccttggttcctcttaacagtttgaaatcttgtaatttaaaacaccatgcatgtttgtatggttagggttagagttagggttagggctggagagatggctcaggagttaaaggctaagcctgcatgcgtgtgccattcaacaatgaattcttgttcgaggagggtatttccccactctccctaagcactaagatccagactgtaaaaggtcaacctgtaacagatgttccaggaatcttcctggaacttagatgggctctgttgggtttcactctgcacccattaataatttagtactgggataaaaataaaaacagcagctctcctcttacagcgtgagaacatgcctcatgtgtgctaagtcatgcaggtgggatgggagggaagccctgtggagtaaccagtctgaagaggttattttatgtgggcccgggtgactgcctcctgtagccctattgcctcaagattaaagggaattagtataattgctccttaggagggaaatgtagttttcctttacaaaggaggttgtataagctttaattatctaatctaaacacaagaagctttctcccagcagcagctttccttggtagcagccatacacaacttccaaaccccctaagcttgggaaaagactgctattttcttttctttttttttttttttttttaaccagttctattacagaatccacccattagggtatagtaaagttatgttgtagctctggtgactgcaaagagtccttgaagctaggattggcttaaattgattttttaaaatgagttgagctgcaaccagagtcacaatcctcggcatgcagcatcagtgtcccccgtctgtgtcagtccctaggaagacagcttgtcttcagtgctgcctgtatttcagactcgattcgctttggttggggtgtgctttgtcagaccttttctccatttgtcactggacatgggaatttgttcctgaggctgggtgtacttgagtgtgtgttggggagggaggaaggatgcacatgcatgcacacacacgcacacacacacacacacacacacacacgtgtgtgtgcatgcatgtgaggccaggcaacctcaggtgtcatacttcgggtgcagttctgtactttttggagacaaggcaggtctcccattggtgctagaacttgctaaagtaggttaagataagctgggtggccagtgaacctcagggatgtgtgtatctctgcctctccacactgggattacaaacatacaacatcagatctggcatgtatgtatgtatgtatgtatgtatgtatgtatgtatgtatgtgtgtatgatgggttccagggcttgaacttgggtcctcacacttgcaaagcgagcactttaatgactgggctatctccccagctactagatgtacctttttgttctattaaatgactttttgttagagaactcaagagggctactagttttgaaattgttagcaagtgaatatatgctatatatttccgatggaatgacttagagttcaaaggtgctttgaagggcagaaggagaacccttctttagataatagggactgcttgcctatcctgtaactgagagtatatggtcttgatgttgggacatttggaggaaataatgccattaattctagctagagaggcttttaggaattacccatcctttagcacacagtccttgtcttgtctgacctctcaccctgctccctgctgcccatccacatagaacacaagctgtgtcctaccccaacacctgtgtcccgtcctcatgtgtcttcctatcttaaagtcactaagagacctgctcctgaccatcagtcattgccattgggctaccatgatacaaattcttttacagtggtacccagtattgactacagaacccaatatgtgctagctaggcatcatcatgttccgaatggaaattatttatggctttaaacatttctttttattggtttgtatattagcagacatatatcaatatgtctctgctatcaagagccaggagtactgtgttctacagtgtttttaccagcattcattttcataagtttcattatgatttcacctagcctttagagaaccaaaccagctcctctcagaacaaagatgtcagttgagatccctggggagggcgctcactgtgagctctgagcatcttaccaggccccgagctaataactggccatctctaataaagggcaaggaagctactgttggtctttggttggaagaccaatgacagaggtacaattgtcaccccaccttgtgtctgttcagtggggtaaaccccaggttgcttctttaaggtcctgcccccatctctaaacacccatttatctgtaagcctaaggtggtggctcagcttcaaggtgaaccgggatgtcggtaactccgtctaaggagtatcaggccaggcgtgaggggtacacctgttatcttagcatttggagtgcagagccaggaggtccaaagtgagctggagggcagcttgctctgtatagtgggttctgggccacagagctacagatcaaaacccggcccccaaaataaaaccaacaggcaaaacaaccaaaataaaagtctgaagcacggaagagaacagcagcttccccacagctgtgactccaagcagaagaaacaaaaaggaaagttggtgagtgggtaagttggttttgtacggtcttctaaatgttactcattgtttgtctgccataggtcatctacttaaagaagacaccagaagaagcgtacagagctctcctgtctggctcaaaccctccttatcttccattcaggtacagctgctactgggtcttgggttatacttagcttgaccattccttagagttggggtaagggggtcttgttaactgtctgaccactgagaccatgatgccctccaacataaattgagaattctttctatcctctaagttctcaagatagtttttattattattttgcagactaggaagaaaaaaaaatggctgtttctttccaggcatttccctctactcttaaatctcttctgtactttgatactgtacttaaagagcagagtgcctgatttatgagctaattagatttcagtaattacatcatgggttcacccagccattctttcactccacgagcactgagtgaactctgtctgcctggtagcgttacagatagatgctagacccaccattaccacccaaggccacagctgtagttcccattggttctaagatcctctgttcattcctcccatcttgaggaacattctctctcatttcagccttgaagaggaatcttgtgtaagtgtgagttggcaaataggaggcttcctcagtctgccccattgctgggcattgtttgaaagtccacttacagcgctctcttattgtcagacctgtaggtcattttctaacttttccattgtagcttttttgttcacattgcttcaggttcattctaagaaactaaaaatactctagagaattttattgccttgttgttagacatcaagaaattatagtcatctgttgaaaggtactcattatacgagaaggaatatttagaaatgcagaggcgtttgctccctggtttaagcccttgtgtcttactagaattctgaccttgactggaacgcagggtagtgcttttctgataactcaaaaagttgtgtcgactgtaaactgtatctctgagtctagcttctttacacactgcgtgtttgaagtaaacaacagtgaggcgctcagatgaaagaatgctgtactagagttgagctaaagaagccacccaaccccccataattacagaatggctgaagccatgcagtgttatcacagacctttcaaacactaattctgggtactcattatggccttggcttcattataatctgggttatagcattcacaaggtttgttactcctcttgttttatgttatacctttgtcttcattatctagactttttccaattattgctatgttagcaactatctatttaaatatttctttttaaaaagtatgtgtttgtgtgtgggtaggtgcatgtgagtgccagtggagcccaggggcgttggacttcctgggagctggagttatagatggttgtgagccatttgacaacctggatgttgggaagtacacttgggtcctctgttagaattgtatttgctctaaactacagagccatttctccatattccccccagccatccatttaatttttttattgcttacatttttctacaaaagtctattttgattgtttttttaaggtgtggtggccgtgtttgtctgggtgcttctttggaatgtctgagttcccaagcatattatgttctactcctgtgataaaacatcacgatgaagatgactcacagaaggaaaggcctatctggccttctaatcccagagggataacagttcatgatgacagagtggaggcacaggcaacaggcaatgcagctagaacatcagagggctcatagcttaaacctcaagccccaacagactgccaagtaggcatagcaggtggcttttaaaactcaatgtccacctcctcgtgttgtacttccttcagctaaccatatcacctaaagccaacagcactaactgggggctgagtatttcaaaggcctaagactatgagggacatttctcatcgagaccatcataattgtaatggtatccctcactattcctcagaaaagagttttatggctattgtgaatttaaataatggtcttcctcaaaatttatttatttagtcaacaatttgagcagacacctctatgaagccccacttttttcttttctttttcctgtgtcagcttggcaggccctttgcctgaaattctttagtatatgttatgcatcacaatgctatacataccctgaaagcaaacttctgataattatttgtttgcatagatgacttttctcttgcgagtggatattgacgtgttttcctaaatgtgtcccaagagaaaaaatatatattaaacatattgcttttgagacagtaaggacttgttatcaaccttagagcatctcagtatagtttgtataagtgaatgtggatagggagggatgctaatattcatcagagttcatgggggaggtttgcagacagaaatttgactttggaatcaaggagtggatgtgagatctaagacaaccccataggacaggggctgttagggtgaaatattttcatgttagggtgaaaactggggtgctacaacacaggggttgattttttttaggtactcttaaattcatatgacacagattttcaaaaatgatgctatgtttcgcagagcactaaatcacatgacactcattatatttagtatcaatacattattaaaataaaatgatctgtttcttttttctatttgaagttatagttaaacattatcattatagcattctatgaaccttggttggcatgtccctaaagggctaggacagatagctcagttgtcaaagtgcttgcagtataagcacaaggaatggagtttggtccccaaactcacaagcaagagccaactgtggtggtatgctcttgtaatcctagcactagggaggtagaggcaggtgcgtccctagccagcttagcctaaccggtgagccctagcccaacgagagaggctctttcaactaatcaagatggacaacttgtggggatagattctgcatgcaccctcataggtactcacagagataacatacagacatgtgtacagtgcattggcaagcatgagaacacacaaatgttcagacccatggaaagtcactgaaaatgagacacattaagaagaaagacttgtgcatcatgactacgtaattcttgattgactcaagtgtattgcttttgtgaccattgcacatctctgatatgcctcggctcttcagaactgttgttgctttcctgttggggagtcagtcttagggtgccctctggaatattaaggtatttgtgttgaaaatcgttctttcacttgaactaagagtggccaatgtgtttatcaagagtgatggtggctgaaaactagagggaaaagatattttagttgtttaggtccgaccatcctcagggctgtcttggcatctggcctctgtggaaagaagggaattacagttctgggggtagagccagccgagtttgacttggcaagcccagacgagtgttgttgtggtctccccttttcagagtgcccctagctgagtctacagtgttggtcaaacattttataaagtcagattatttgcttcttgtctaaagtcccacaagacccctgcctttagtgaatcctttttgtggtcagtaaatgttagtggtttcaaatctatactgtttgatactcatgaaatagcaattgtgagagcttcaagtttcacaaaacatgaaatattgactaaattgaatactttcctttgagattttcacatgtgtgtgtgtgtgtgtgtgtgtattcatatgtgtgtaagtgctcacaagtggaggtgcagttcatcgggtgtaccatttttgtccaccatttctgtccaccatgtctgtccaccatttctgtccactatttctgtccaccatttctgtccaccatttctttgagttgggggtctgtcactggcctaaaactcatcaagcaggctaaatgtgctggctgctgagcccagaaacccacacatctctgtctccctagtactgtgactacaagagtatcttggcggagttggggggggggggagaaactataatcataatatagtgtttgaaaatttctccttgtaataacaaaaggaagatcataaatagataataaatctttaaaaatctcatgcaaaccattccaaaacaacaacaacaacaacaataacaacaacatccctcccaaatcacaaacaagtatatagcactatgcctgacttttttgttttgtggattctgatgctcaaactcaggtctccatgacctcaaggcgagcactttcgcaactgatcttctctcctagggaatttgtttttttttttttaaaccagcttgataagttttgtttgttgtttttttgtttgttggtgatgataactaaatgtgccaaaatctatttttttcccttatggtataaaatctctcagaaaataagacccagggacttagttttttaagcatggcatgaaaaggttgactaggggaggagatgaggtgggggtaggagttgagcagcctggttcttgctgttggtgtgttgttttgtctttgtgcgttctttcctgagtacggtctggcactgcaatgtgtgtgccacgcccctcctgctcccgcctcttgcccaacgcttgcagaagaggcttgtagctgtcggtcagtgttccccaaagtttctccacgtttctccaacttgtctgtgcacttgagaagccttaagaagctactgactcttgggttccactccctgaagttctggtgcagttaaccctggctgaaatctgggtattaaaccctccatgtgaccccagtgtgtgaacctgtggtcgcttagagagctgctctcccaggtgataatgtgaaatgctgcctaagtgaaatcatcccgggttagaactcctctcatggggattcggaaagcacgttcctatttagaagatttgattcatgtcgagaaaattgaagcaatctgtttaacctgcaatttcctggagtacagattcactcctgatgaacaggcagcagaaccattcttccagaacattctaaggcaggtttcctgatccacacctgtgggaaacagaacgatcctttgggatcagaataatttgctatggtttgtataacttgttctgtgctgtttccggagagtctgagacataagttggtttaccagctttaaaaaaaaattttttttaatacaatgtgaccaggaattaaacaagctttctctcagagacacctgagatgggtcttcctcaccaggacacaccaatctccctctgacagtcctttagtgacactgactttgcaaataggctcctagtgtttgcgtaaagggaggtgtttgttgtgttgcgggatgacccttagtgatgatttggttgctgagctatgaggctgagccttaatgggaaatctccaaagcaattagtctagatcttcgggcatgccagaacctgcagttcttctaacaaagcctcagaggggtcaaccacttagaacttggcacaagattaccttctcctgaagcaaagcaaacatatgccgggcattattataaaaacatacagatatgtgccagcccgggtatggcattatgatttttgtcaaactttgtttagtaactaactctgtatgtcagagggtaacagctctttaacagctctttttttttttctcttgagtttccaaaatgtggaaataaaaattagtttcacactgttttatgatgctctttttgtttgtacatttgtttgtctgtgtgtttttgagacaatttagtcctggctctcctggaagttgctggccccaaacttacagagattgatcctcctacctctgcctccagagtgctgagattaaaggtgtgtgccactatacctgtctaaaatatccttttcattctccactgtctagctgctttttggtagtctttagggtcagttcgagggctgcatggacatttcataaatcattgattttggcgcttagtgttggagaagaatccagtgaggtttgacaatttctggcttcagtctgttttgaacagctatgctctatttgatggagcttggagaggtatgagaaatagaacctgaccaggtttctcctcttaatacaatggcagttaaacaccattcccaggggctggagagacggctcagcagttaagagcactgactgctctaccagaggtcctgagttcaattcccagcaaccacatggtggctcacaaccatctgtaatgggatctgatgtcctcttctggtgtgtctgaagactgcaacagtgtactcaacatatataaataagtaaatctttaaaaaaaaaaaaacctcactatttacagaatctgagaccagaaacaagctttggggtctttgtgacccttaaactcaaaggcagtgattcattctctctctctctctctctctccttttctctctctctctctctctctctctccctttccctctccccctccctccctctctccttcccttcttttcatccttcccatcgaaaaaaaatcacaacctgtgttgtgaaagttggttcagattattttttttcctccactgttcctacttttatggcttgcccttactggtaccaaatttccagcagtaggattcgtgctcgtccttcgtgttctctctgggtctaggagccagcctcagctaggttggaagaagactgcaaccacttacctttaggacattctgccattatttgtagtttgaaaggagaggttgtaggttgatgagatgactcagtgagtaaagaatttattgtgcagggaggaggatcagaggtggattgcccagaacccatgtgtgtgtctataaccccagacctgaggatttgggtgtggacagtggagacaggcagattccagagcttgttctaggtctagagagagatgctgcctcaacaaaataagtggaaggggagatggagagagggctcagtcttccacagcacttgttgctgtccgaatctgaaaagtaggagcctgttttacccctggcttccgaacaggtttcacgaggctttggacactggccccacaaggtcattttgctttgctctttcagggggcagctgtgttttctcctcaaatctgctttcatcttggtggtctaaaagacacaagcagtccaccctgtctttctctgcaactcctagacatatacaaccaatttgttcagaggttgaacgttctcagatataatatcttgcaagataagagcatgtaagatagacgaaatagtgtctagttctcagggatcatataatatagatcccaaagtgtagttctcagggaacatctgacataggaccatacaatatagatgatgcaaagtctcttagttctcaggtattatatatagtatcatgcaatataggaccatacaacatagatataatagtgtgtacttctcaaatgtaggactatactgaccggtatgtgctctcgagcacttgaactggtcaagttcatattgagatagattacaattgaattgaaaagggtgggccagggaggtggctcagtgtgtaaaggcacttatggctaaacctgatgagttgagtcaggtccctggggactcacatggtgacaagaaaggaacaactcctgaaagttgtcctctgacatgtgtgcactatggcacatgttcacacccatgtaggagatgcatggtgcacacacatgaacataccacataaaaatacatttttaaaaagaaagaacaatatagcaatattcgatagaccctgaaatgataatatacaatgataacatatatttaattaaatgaaatatattattaaaattaatttgattatttttaaacatagttataaaaatactaatatgtttgcttctgtttcgaaagattagtggttcccagcaactaggggggtacaaaagtttttgaatgaactgctggtgggcccatcattcctcccttccttcatttgttcaacagcatgtataatatagctgtgtgtacaacactgcactattctctgggtgaacatactttctatttttaggaagctcacagtcttgtcatgattgaggttggttcaatgcttaaagtagttcttagatgacctttgagagtttccaatatactgctcttcaaatacttccacggttcctaagtgcttgttattcagagtctttgcagagaatcatgggctcaaagcacatgtagatgagagtcttttgttagtatttgttaatttgttcattttttaaaattcttctctcccctctcctctggacagggtttctctgtgtgaccctgctatcctggaattcactcttgtagtccaggctgtccttgaactcacagatatccacatgcctctgccttctgagttctggggttaaaggcaccaccaccagctttaattcatgcattcattcattcattcattcattcattcttgagtggagtcctgacattgtagagtctccattgttcacttggaacaacgttattagcagacttgctttcttacgacgtggcttctccccccaccaacctctacgtggttgcttcacgtcactctgagtagcttcttaaattcttggattgcaagagcacgagattgacagagtgtttgctggtgcttgtgtgagtacagttcttcacagctgatctaggcgctcaagagttctgagtattttgcaatcaattcctgtgagcctatttaagacatgtctaggacctgagaaaatcaggccctttcatttacttatttaaataagtaatttggataatatatatatatatatatatacatatatattaatatattatccaaatatatatatatatctcagttgttcacagttttcagatttcattcatctgcttttctgtttaacgaatctgtattgatgctctcaagattaacccaggctttgataatcgctcaatggcggctgtgttgctcgggtgactgttaggctacaagttgcttgtagaaaggattaccaggatggataaagtttagatgatgctcaagcactaggctgagctaaattcgtgtttggatgtctctgcaccatggttggctgtaacgttagccttctttactgaaggctagagacataagattttgtcttcagcagcaaaggtcagttagatgcttttgtgtttaggttttattttatctcctgaataaggaacagctttgtgctcactagttttgcagagtaatgtatgatgtggtcaaatgatcatgacagatacgactttgggctgttgttgtccttggtagcaggggtcggtgtgtgggcatttcctctttctctctgagctaagtaggaaaatggcacacaccctcttatctccctcaggaaatatttggttcaacgaatatgaataacggatgaatgcactcacaaacaaatgaatgatgaagcaaaccaagagttaagccaaaggttggggcctgtaactgtaagagttaaagtagttttgcatattgttatggtgagtgagctcctcaaacatctattttgtttgcctaaagcaaacctggttagtgaatgtgacgaaggaagagagccgtacctgcagcatcgccacctttagctctgtcagtcaacactcactcgtagagaggacagaaggcaatgaccataaagaggcagaaagaatatgaaattaattcttgctactgagaaagcgggcattaacctacttgagttaacaaaaggaatcctaaaataacatagataattttattgatgaatgtcaaggttatttattttatctaagcatgtaattacagatatttacttattatctacttttgtaccaggtgctaaggtgacatagatgaacagtgaatgtatagatccaatattgtaatggagacagtagccaagaactaaaaaataaaataaaataaaataaaacaccaggatataatttcaaattgtaattaagtccagtgcaaaggatgggagtccggagacctgatgtaacccaaagtagggttagtgacctctgtgagagccatgctccttgacctgagatcagaagggctatggattcgccctacctagaggtgagaaagaggcacaaataccagcaaagacagaggtccagggcagagccagctgtgcgtcagatgtggggtcctggggagagccagatgtgagctgctgggtatggaaggccgctgtgtctgggcagtgaggtccaggaggcagggagctgaaaggcaggtgaggccatccaccccaggtctgtggtcctgttgggggtttcaattttacctcgaggacaattggaagtcggtgaagagatgtgttttaaaaaaacactccagcttcagtgaagcaaacttttaagactggctaaaaaaaggagagtcactagaccctaagagagaaaaacagggacacaagttgggggagcttgagggatgctgagagttgtgggttttttacctagggtgccagaagactaaacgattgctgctattgattttggtgtagggaaagattcattcccccgccccaaccccagcttgggggtcaagctgaagccgtcgttgaactggctgtgtagctaaggataaccttgaatttttgattctcctgctcccagtgtgactgcagatgtgtcccaccatgcccggctttatcaagggcttgggatccaattgagggctctgtgtattctagacaagcatcctaccaacagtgctgtgttcccagtctgagagatttttttttctctcgcccagtgaatttgaggcacctaaatgcaaaggtggctagttatactatttcaaatcattttaggaggctttgttgttgtttgttttatttttgtttttgcttttgcttttgtttttttgagacaagatcttgctgcttagtttaagtcagcctcaaactcataaaataccttctgcctcaacttcccaggtgctggcattatagacacatgccaccacacctggctgccgtactgtttcagagttctaagatgttctaaagagtacatgtgggggccactggataaaagtaacttatgtagatgatagtgaggagtgtggtgtctcctcctaccaagaaaaaggactttggaagtttgccaaaacaccaagctctcttaaaaagtcccttcctactctgactacactgctcaaagcttcgggttctctttcttttccacatcactctccttctcaataaaacttcaacatggtctctgtgatctcttaaaaagagccagtcatccaaagcttgcttgccttcatatgttccctcagctccacactgcctttgatttttcccttaaaaataagacctcactgaagacttgcccttcttcgcctttccaatggtttttagcgtaagcatagtgttgtacaacccattgtctttcagtccagaacattcctaccacgcccgaaagaaaccaatccgttcgcgcctctccctcctgctccaccatccccttggcaaccgctcatgagctctgtgtgtctgcatctcttactcactctagatccacggaacgttctgcaagcatcgtcccaccaacaaaacgtcacccacttctctgagtgctcttgctggacttccattttacttttccatcgttatcccccaacccccctgcacagttatcctttacagtctctaaggggaaaccttagcaagccaaagtcccagccccggcccgtgtcactgcagaccctctgcctagactttaatgtgcatcagtattgcctgggtggctccttaagaacaagatttttatgtcacagggagtttctacatcaggaagtcaaagatggagtctgaggtcctacactgctgaagtccccagccctttctctcttgcctagactggggacaggatttagggcatgctgtttgcccgctgctctgtgcactggtacatgctgtttgcacgctgctctgtgcactggtacatgctgtttgcacgctgctctgtgcactggtacatgctgtttgcacgctgctctgtgcactggtacatgctgtttgcacgctgctctgtgcactggtgcgtctcagtccccagcacagtgcttccaaggcttgtcacctgtcttgggctggagggtgggcttgacacttaacttcctttatcctttccagtttgtaaacgtctgtctttttcattagcctgcagtgacaggattgtgtcccacccctgtccctggcatgttaagtcctccccagctctgtatgtctgcagatttgaccaccacgtcaccatggtctgcacattagtcattgtgggagtggggctgtgaaagtagaagggatgtcacgagactctcagcttcgctgcagacactcagacaacctaggccaggagcacctatatttgtgcacttgttcaaaagcatctaggggtagagacagacttgaggtagaaaggacctccaagtctcggaattatgtttttttttttttctcctcttacatgtacgtgtgcatactgctgtgtatgagcgtgcacatggaggccgtggggacaaccttgggtagccttcctcaggtaccatctatttttgttttttttctttttgattgtttttgaagcagggtttctctggctgtcctgaaattcattctgtagatcaggctgacctggaactcatagagatctgtctgagtctgacactcatgtgccactactgcctggcaccagctcctttttttttttttttttttttttgagacagggactctcacttgcaaagaaggctaggttagcaagccccaagggccgcaactctcctgtcccctgccctcttaaacaaaacaaagcagagtaaagcaaaataaaaacaaataaaccaacaaaacaaacgaaacaaactgctgtggattctaggaatccagctcatatcctcaaactttcaaggcaagcgcattctcctttcctggccttcaaattagttttatatttttaaatttgaagcagttgaagcagtatcttgaaatctaggtttgccaagagagtccacagtcagtgaatctggatgagaaaaaccttttccttttattttcatccaccttccagtttctgagatcagattcaaggacaacacttggagttcagctagagtagagtcagcagtgtggctgtcgtgatagaaaccacaggcatgttatctatcacattgctcttctatctgaagatattatctatatttacaccttcttgaaaattaaagcatttaccaaatgtggctcagggtgggtgtggcccagggagcttatgcatgccaggcaagcacactcactctgcccaccccatcaccaattaaaaagcacatatcaaggtattacaaattttgtttttgtattttggttaactctctttaaattccatcaagttccctttttgttagttttgtggtttttttttaatgtattcttatatattgaacaacactttaatacataatggatctatagacatcagatgactgggggtcaggataggggtggtggtggggaggtgatgtttgcaaaggtgatgaacttgttctttaaagagaccgttgtgtgcaaaggtgtatgtattcctataaactaataattcatctcagatctctaatggtttcaaggtagctggaaagggagctgttctgtttggacgtgtgagttcaggtgtcacttaaaaacaacatggacaaaatcaatagagcccctgttgaagtttggtcagtcctgcctcttcacacaggctaacatacaggaagtgtgacggtctaagaggcattgctataagtttcggtaggtcactgtttctatgttattttattgggtactgaagctctgtggtgaaacgagttttgtttttttttaaactcgtgacttagaagccaggagactttgaagccaaggttcgagctccctgggagagctggtgctacaacacttggtttcatgttgattatgtgtgaaaggcagggttctcttggcaccatcccgggatgctgcccttgagccaaccttgtttgggatgtttgactgtgccaggctcagcacttgacagctctctttcttgggtcagcactggggcccagctaagggactgagacactcagggtcaagtttcttgctggggacactgtggagcattgctcctgttaaagctccaggaccagttcttgcttagctgacccgaacttgatactttagttttaggttgcctgaaacagacccgagttgagctgctctacaaaacagtcctgagtcttcaattttcagtacagtagatttaagcattatttttaactagaaaccttgttttgggttggagaggatggctcagtggttaagaacatatattgttcttgtggaagacccaaattcaattcccagcatatgcctcaggcatacatacaaataataatacataatattaaatattttttcattttggttcctagtctttttgagagcactttctaatattttcagaatgcttattgatcccagtaaattggggattgttactacattttactaagtttcttctcctttgcagtagagggacggcgtatatgtgttaaaataactacaaggttctgttggcctgtagatgttgccccacaccctcaccctctggctccacacctttccaggcttgggttcaccggtgcctgagaggaggttgctcccctgccacagtcttttttgtttgtttgtttgttttgtttttgtttttgtttttgttttttcgagacatggtttctctgtatagccctgctggctgttctggaactcactttgtagaccaggctggcctcaaactcagaaatccgcctgcctttgcctcccaagttctgggattaaaggcgtgcaccaccaccgcccggcccctgctacagtcttatatagttatggatacttcacttgatgaaaccgcccaaaaggctgttattaagagaagtcatgaaccaggtgtcctgaaacacacatgcctgtgacttcagttcttgggaaacagagacaggaggattgctacaagtttgaggccagcctggtctacagtgtaactcctggtcagcttggattgtatgaaaagattacgtcaatccccctgcccccaacagtaatagcaggtagactactattgaagtgcatcttctgtaccaagcgctacacagaagaccttacatcatttttatggcacctaacaaccagtcctgtggatgatagccgccgtcattaacttcatttcacatccaaggaaagcaagattcagatagggaaaggaactcattcaagtgtgtgcccacgatgtgaagggtgcaaatctgaataaaggcccaggctcctctgtctgccgtcaagtccggccagcaggcccgaccgtcttgatgttctatcatttgaagatctgggttcgtgtttttaatgtcgtttgtttgtgcttgtagggatgcatcttttggaaactgcacttacaacctcaccgtccttgactgtttacaaggaatcagaaaggtaatggtctcacgctcctgccacatagctggacaaggaatagttgtcaacacctttgcttgctgttggaaggctctagagtcagtaaagagggggcctttcacctcctggataatttatttgtgaaatatagtcagtcttcagtttctgcctttttttttttaagattaaaaattttattttttgtatcctttgaaaatttcacacatgtccgtcatcttcacagcccgtaagccttttcttgattgaaaatatttggaggtggagaacccacttttttttttctttgctgctgtggctgggtccccatcagtcatttgtctttagttttaagctaactctcagtgcaggaggggcaagaagttatccaagccactgttgtcagtgactggctgcgccccagactgaactgaatcataaagtctgagggtgggaccctgtggtctgtgtttgaacaataccttcgggtgactgacgcactgtaaagttggttaatgaagcatagttatttaattatttatgtgtctaatggaaaggttaagcaacatttggcacgggtttaatttacagcccgggaaagctctgcagggtgtactgtgaattctgtagaggacccagagggacacagcaacatggtgaccatgcgactggcacctttcagtcagaaatgtgtgcatggtgtcatctgttcagctgggggcagtagcagtgttccagctcaaagttctgctttctgatgttgcataaaatgggctttgccatgttttgggaaaaatcagtgtaaatattctacctatttagtgtgtctgtttatgactttataaatgcattcgtagattattttatttaaaagaatgtggttttatgtgtgtgagcgttgtgcctgcacatgtatattttgcaccgtgtggatgcagggactatagaggttggaaaagggcgttgcagccccgagaatgagagccatagaggcctgtgagctgccatgtgcatgctggaagccaacctgggtcctgtgcaagagcaacaaatgctcttgactactgagccatctctccagccccttaaattattttaagctctcaaaaacttgaaagtagtttaaaaaaaaaaagtcaaactcaaaaactaaggaaacattcaaccccatttttgcaagcagtattacacaaatgctcgaccataaataagagtctaggagtttatgggcaggttacccaacatagaagccattaataaaacatttaggaaagatgccagagggaagagagcgtttattgtcctggttattattattttgcctctttccatcggatagaggatgtttcttttgtagtgctcatgaaagtcccacagttccctctggatcatgtctgatctctattatggtgtctgacatctcaatatagaaatttatgacatccttcctgccctacaggaaaggtgtgactttgttcgtgaataaaggctttttaaagcatcgtcgtttctcatgttagggtgtcttcaagtacagatgagttgttgttttttcattaattaatttatttatacttttcattgcaaataagcctcctgcttcctcctggcaccctcttatacagaccctgcccctttctcccttcctttatcctcagccagtcaaggccagcttaggctatgtgagactgtgtccaaagaaatgaataatttgaagaggttcattctatggccctagtcctagcgaatatgatttgatagctttgagatcagacgcaggaggctattttatgagtaatcttggtgtctctggtatagaagatccgagctccacattttgcaacgcacactcacctccgtgtactgcagcttggcttactggcatctttgtctatttttaatgacttgatcatgtaactttaaagtgtactggtggttttatgttctgttgtcatgtctatagcttcctggtttagataaaaaagacttccattttcctgaaaatattaggtgtgaacaggctaggtaatcttaaagaattttgtcactgcctaaggaaaaaaaatgaaatgtttctgttgttaaaaaatccattcttccttctgaattgtaagagcggtggtatatattcattttattccaaattactgttagaaaacaagtgtgaaacaaagtagagttgtaggaatttaatgaaaatgctcctttgggaaatatttcagtgtgataaaaggaaggcaaacttttctaagaaatgattttgctcctctatgagaagtttatcactgtaatatatactcacatatatataatatgagaatattacagatatgagagaatattatatatgaataatataccagaatatattatatatataaaatagtctagttcccaaaaggttttggttctaacttttctagtatgttccattttctatacattactagtttttgcatatagaactggaatataaattggaaaagaagcaccttttgcaaggcacattttcatattacccagaatatgtagctgacagcttcagcgttgtcagtgttgtaagggattccccgggggaggcagtaagaagctaaagtctgaagttttacatgggcttagtgggacccttttgtgatcggacatttcagaacggattgctagattttgaatagcgtcgtgtgcaaaaacactaattccgtgttccttttagggattacagcatgggttttttgactttgagacgtttgatgcggaagaatatgaacattatgaggtttgtacacttaattcttttttttttttgtagaatataatttcgtgttagttgattttaaaaaataatctaacagtattacctgttaaataaaaaccatttatcatttaaaaaatagtggtcagctttggttattatggagttatcaaaatgttaatttaggaaagagccctgtctatctatctgtatctatatctacctgtctgtctgtctgtctgtctgtctgtctatctatctatctatcatctacctacctactaacctacccatatatttactctcttatcaaactttattgacaatctctttgtaccttttgataggtgattttgaagtgtagtttggtaatgaaatcctaaataacttttacattaaaaatgaggttttatttaaggcaaagttaggttttataatactttcaacggcacgtttgattttgatgtacagttgcacgcactcagttctgatgctgacgtacagctgcacgcactcagttctgacgctgacgtacagttgcacgcactcagttctgacgctgacgtacagctgcacgcactcagttctgacgctgacgtacagctgcacgcactcagttctgacgctgacgtacagttgcacgcactcagttctgacgatgacgtacagttgcacgccctcagttctgacgatgacgtacagttgcatgccctcagttatgacgctgacgtacagttgcacgcactcagttctgacgctgacgtacagttgcacgcactcagttctgacgcttgctgttcttttccccatggcaccgttttgaaccccgcctgttccgtgatgcagtgttagagatgcctgtctactcgggtcctgctccattgcagtgctcaggaccactttggagtgggatgaggagagggccagaagcaggttctgttttcggtggcccgaggagcctgtagactgtgaggaccaacattgcttaagcatacgcagctcatctgttgggtttctcgagggcaatcatcaagtacactccctagcatgtcaggcagtcttcccagtttgggctagtgtccagagcagtctattcgaataccttgcttgtgtgtaaaatgtgctctgtgttcgtctctcatgagcagacttgtcttctgatccattcatctgcgctaatggagagcatcctaccaatggcccagagactagaattcccccttacagtcttgctcccacggcaggtgccagaggatgcattatctcatctcgctctctgatgtcacttcctttaccctggatcagaactcctcagcctggactgttacggatgctttctacctgagagttgactcctttctcaggcttctcccacaaccctggctggataatcttaaaacagcactcccatcttgtcctgttcttggacctgagctgagctgagtgtggcttcgtacccaactctctccgctctgccaggctctggctgcctctggagcctcactgcccgattcttcgctgtacccactcctgtggcagttgttcgagctgtctgctttttgaacgtctctgctctggctgagcttgcttcgtgcagttctccattttctctccttcatttcatgttcttgcagactctgtggaaaccagatctctactctggaatctcctgtcccctgagtttcatgttttacaatttatgcctattttcctttcatcaaggccatttacatctttaatttccttactagatacaaatttcctgtgcataggacatggctttgaggaaaaacatattctgtgttcttgtatagaagtctttaagttcagaaacctctatgtctgtctttaaggttaatacgtttagtataattttacaggctattgtttaaatcttcttgtttaaattctttctctctttctctctctctctctctctctctctctctctctctctctctctctctctctctctctctgtgagtagtagcaaaagaaccttttcattttagaaagaaagaaaagaaagcaaccccataaattagaaggcagtgcatttataatggacaagactgctttaaacgtgtgtgtgtgtgtgtgtgtgtgtgtgtgtgtgtgtaccacatagtggtcattataacaagtgaattgacttaaacttctcttggaatgcttcctatcatttagtttttagaaggacagagaagagtgcttatagtttaatacttctttgtagagataaaaccactcctaagaagaccccatctcatacatatatcatatagctgtagtgtgagtggaggtgttttactctgatctcatgcacatatgcacatagctatagtgtgtgagttgtcgtggtttactctgaagctaatgacgagtgtatcttataaacccctcccttgtgtaggagtcttttaaggtcatggacctaactgtgtgggagtaattttgtcctcttataatgaacctccaaataaaatgtttcagatgccatctccaaagagccccaagtgctggacctctgccccaagtgtctgaacatggaggatataccactaaatacaccattaactgctaaagacatttgcttaacaagagtgattcaggcctgggggatggagaacagcaagcacaaacactacctaccacacagagcaaacaaacactgaaacagaaacctagtggatcatccctctgccttccacaccatgttgttgaggcagctactgtatcttacacaggcagtgctgtgtgattcttacaaatcagcagagacaataaataggacctggtgacaatgtggtcctcctgcctttacgtgaattaataagaacccaggggctagaagcagagctgtgggtttgggtggctgtctagaaagctttgttgtcaaattccttccttttctgtacgtggaccgtctatcccatcacacagactatcaaagagaaggtcatgaaacacagagccgtggtgggcgtgccatcagcgtgtgctcgatgagtaattgaagaaagggtcactttggtgacaatctgtggcccaggcactccttgtcataatgcgtcttgctgtttgcacggctccagggagcctggtcatttggtgaaccgtgaaagagccagcgtttcaggcaacaaagccttagtccagggatgggctcgcagatttcaaagcaaaattgtgttgctgactgcaattgtgagactcactgggaatgatttgggatattcaggatggatcttttcataggaaccttcccactttattgaaaatagatttcttctttacccctcacataacatatgttgatcatccccgggttctcctcccatctggacccgcccccttcctttgaagggataataatagaataatataaaatgagatgacatataataagagaaaagaaaatctaacacataggaatagggaaaaaccaaataaacacaagaaaaggggcccaagaaaaggcacaaagagacgagacacagagatctgctgggttgtgcaatcaggaatccttaaaaacactaaattggaagccataatatatacttaaaggacctgtagggtaaaaagaaagaagatagaatatgtctaaataaaatagaatagaataaaataaaaataaagaaagaaaatggggttgggggagaggagagagagcaaggaacctgtagagcctctgttggccatctgctgatagacatgacgcctgcccttaaggttgtttgcttcccccatgagacagactcccttggagaaaactgagtttacatttgcaagtggttctcaatgggagcttgttctgggttaagaatgggagcgtgtgtccacttcttcctttagcgtggtgacccagtggggcagagccgtccaggccgtgtgcaagctgccccagtctctgtgagttcgtatgtgcttcagtccttgtcttcttggccttctcgctcttttcattctctggctcttagactccttccactggagtgccccgttgtctgtcagtgggtctctgtgtttgttcccacatgctgtaggaggaagccctgctgatgatcgcaccgatctagtaatacagcaggtcaccaggaatcattttatggcctttttgttgaacagtggtgtttggttttctcctaggtccctaggctatctaatcccaggtccttagtcacccaaccagttttgggttgggctcagtcttgtggagtagcccttaaggcaaaccagatattcgttggtgactcccacaagatttgggccagcattgctctaacatatcttgccaacaggacaccactatagagcagtgggcttgtgggtaggtccgtgtttacatttctcctttggtagcatgcggagtcccttcactagcacataggggtgggaggtctaggcaggtgccagctgtacttttccgtgctcagtgacttgtgtagctgttgtctctagcaatggggcttgggcatcagtttgtggagaacgacttacagtcttggccacagtgtgggttgtttgggcgttttggccaacaactcaaccagatgtaacccaatcctggtttggaagtttcatttggtgacaagaaatgtgcagttggggctctgtctccccatcatttagtgatcgcatccagattgccctcaaatatgtatggattttaggaagcttttcctgtattgggtttccataccacccaccgaatggcccttatttttagctgtatctccccatgtcccccctccctctttccttcccctcccacttggtcctctgcttcagccccccatctcccatctgtgcataactatctcttgtatttccctttcctagggagatctatctgccaccgttcccttcctctaaatctaacctgcgtggtctatggattgtagcttggtcatcactgacttaagagctaatattcacatataaacaaagacatgccatatttgccttcctgagtctgggtcacctcactcaggatgattttttttttcctagttcagtccatttgcctgtgaattttatgatttcattttttaatggctgagtaatactctattgtgaagatggaccaccttttctttatctgtctgtcgagggacacctgggtggtttccagtttccagctgttatgaacagagcagcaatgaccacagctgagtaagttcccctgtggtagggtggggagttctctgggtatattctcaggagtggtacagctggattttgaggtatatcagttctcatcttcctgaggaaccacggcactgtggcaggacgcagttgcatccaccatcagtgggtgaggatgccctgattctacatcctcgtcagcatgagctgtcatttgttttattgatcttactcatagacacttctttgctaaactacacttactatatagcatggcttaagaatgctaggtacttggaaagccgaggcaggaggattgccatgaattcaaggctagcttgagctacagagaccctgtctcaaataaaaaccaaccaaccaaccaactaaccaactgaccaaccaatcatccaaccgaccaaccacacaagcttaatatctgtgatattagtttctcccacacttttttgtttgtgtgcaatgtgcctgcattcattgttttgtatgtgtggggcacacatgtgtctgtatgtatggcgtggatgtacacacatgtgcgtgtggaggcctaaggttaataaattgtctatcatccgtctacctattcattaaggaagagtgggtctcagtcatattcagagtttatcaatatggccgggcttattagccagcctgttctcggaattcctttggaagctagatttacaagcaggctgccacactcaccagattatgtggctttctgggaatctgatgctggttcttgtacttgcatggcgggtactctaactgctgagtcagtcccttaaaggaggttatgtgaccagaatgctacttataatgctacagaggatgggtcagcagggtgtaaccacttgcttctagtctaacgatttcttaaaggttttgtctgctttcacctcccattcaggaatctaaagaatgccatgtataagccaggcggtggtggcccacgcctttaatcccagcacatgggaggcagaggcaggcagatttctgagtttgaggccagactggtctacaaagtgagttccaggacagccagggctatacagagaaaccctgtctcaaaaaaacaaaaaacaaaaaaaccaaaaccaaaaaaacaacaaaaaaagaatgccatgtataattagtcatatggatattttaaatattccactagggacattcagaaatgatagaaagaaatggtgaaggtattttaaaagatgtatttcaattaattcattatatcccacatatttcaacatatagttaagacagggattattaatggagtagtttagtttacatttaaaaaaaaaatcatgccttcaaagtccagtgtggcgtttacactccagcatacctgagtctggtctgttcatcctgtaagacacaggagccatgggtggccagggtaatgattccacaaaataacaggcttgccatgtacggtcatggtcccccagaatggcatgaagcctaagtcagtgctctatccgctctgactgctcatgtgggagtactttcaagattgtccaatttaggaggtttagagaaggatgcctccggaatttggatatttccatgtgaccagcacatggattattgactttaggactgagaaatagcatcagacacaggtcttgaaaaacaaaaacaaaaacaaaaaaaacccaaaaacccaaaaacaaaacaaaacaaaacaaaaccaaaacaccttctagaatatggtttctccagttcccaagtcaacccgtctgtcctgttgcttagacacacattgctcagtcaggattctaccagtaatactaggcatatccagatccaaccaaccaaccaatccgctcacccaccctaacaactaaccaaagtcacacgatctgaaagcgccccgtagcaatcagtgtcgaaacgtctgtactttccgacagggcttgtaaggtattcccaaagaacccgagaaccaatactacaaccactccttttggaatctagccagggatcagttcaggaaaataatatcgaccttttatcctagggagatatgtgaaaacaagagccctagtgttcaatttacaccgtgatggtatgtgcctgtgtatatatgggcagcacgccctctagtggtgaagtgactgcaagacatcctgctttgacgaccttggtgacgctaggtcctcaatttatagctccctctgctttccgcgaagcgcgttattgctttattttgatgactggtccatgagctggtgacctcacaggaaaatgcagagcagggtcacccactagcagtaccttgttcttgcttgtggctgggattgatggagacgaaatgcagagaaaggagcttgaggggtgatcttttgggggtcgggaggagcgctcatctctgtgggtcacatttattacctcgcttagtttttcaatttcaaaaagcttccttaagtagcctcctggggattcagtagagttcaaagatcaactttagaatgtagcaactacttagaaggcttccttttagctacatgatgtctgtcaccccccccccccccagctcccaataagtaataagtctaaccacttttgagcgaatgctgtctgagaaatagcgctgtcagcaggagggtatttttttcagattgtcaatctattgttgacttgattttgttttctcaaatgctggctatctgggacacatctttgaccttggcaggtgagagccacacccagctacatctacctgacctcagaggagaggagctgctgctttcgcaggtgcaggggcaccgcacagggcttcttgttttttaccttggtactcagagaacaggatcgtatttgctcaacacctagtaaacacagttcacacccatccatcggcagctggggcctctgctcgcctcagttcctgcccaggcagctccattccgatcgctctgactgggaaactttgcttttaaaaaaaaaaaaataataataatataacgctgggaccagggagatggctcaatcagaaaaatgtttgccaaagcaagcatgaagaccagattgtagattccttcagcctgtgcaaaaaaagctgtcatggtggcgagctgtctgtaatcctagcacttggtgtggaggtgggggagagggttgggatagaggcttgggctgtttgtgtggttccctgagtcattctcagccccatgtggctcacgctgtgttgcattagacacatctgtgtcttccgtgtcctctctgtgcttgtgcgcagaaactgtcttgcctgcccttgcatgaataaagtaagccactagcagagtctactcagcacaaggagttaatcggtgtgtaagacgtgaaatatctcacgggtgagcagatgagcatcaaatgccgagtggtctattttcagtggaaattgaccaaaactgtttttttttttttttttaaattttgagattataatttaattacaacatttctcatttgctttccctcccttccatatatccctcctcattctccttccaattcatggtctctttagtcattgatcattattggatgcatctgtgtatatatatatctgtgtgtatatatatatatatatatatatgtatgtatatgtgtgtgtatacacacacacacatttctaaatatagtctgcacagtccatatcatgctacctgtacgtatgttcccatactgaccattttgcattggtgtgaagaagagcctcccctggagaagaacacttctcccattccaagattctgtcggttgcctctagttctctgtgtagacttgaagcctcctggtgaatccgtccagttcgctgtgctcattgacattatacttgttcagctcatgcttgggcagtcacgttagtgagacctttctggtggagtttctgatattgttaggagacttgatttcacagctaactccctaggctgagacttttaattaaaaacacgttctgattttgtagtaactctctgggaacatatccacgatgggttagaatacttttttagaatatttgtttttaagaatactttcattatcggctcatccctgctgcaagaatttataacttagggagaaaaaaatcagttttttgtgcagcacagatcactggttggtgggtttaagatcaggattcgtatgtaatgccaacttggtttatggtgtgacttgagactgtctcacctgaccacgtccttcattatatcaggaaactgtcctactaaccagtggatgttgactcttaggtttagcacgttctgtgaggacgttttgttatgtcctccatctctggcctgcagcaggagtctgtgtgtggtagggcaaggctgtgctggggagtggctctgtagagcagtctgcagtggagtctggatgcagcttagcctgtgatcctctcttgttcatactctgtgggcaggaccgtgtcctcccaccccagcaccagggtcaaggaggcctcagtgcagatgtgtgggcaagtcctcaaccagctggagcaattacagaggtgtgcctcccacggggactgactatgggaactatttgaagcacgcttctggagtcgtcttgtatttatttcaccactgaaaggccgcaagtttaaggtagccaaattccttcctggccactgcagctgctactggagagggacccggaacttcctcatgtgctaagaaatcattgctgtatacagatggcgtcgactaagtctgtaagacttgaaaggttttcctctcccaaacaattatggtttttcccccttcctctttaatttctgtttggtttatttctttccctgtcctgctttctttctctgtgtctttgggcattttggtttttgctatcctgatattgggtctcaatgtagtcccagtggcctggaactcatagcagacctcttgtctcagctttccaagtgctgggatgatagatagcatcatcatctttttcttcttcttcttcnnnnnnnnnnnnnnnnnnnnnnnnnnnnnnnnnnnnnnnnnnnnnnnnnnnnnnnnnnnnnnnnnnnnnnnnnnnnnnnnnnnnnnnnnnnnntaaactatttgaggtgtggtctctgtaactattacagtttgatgctcctgtcaacataggagtgtcccaaaccaaacaggcccggttcggtcctgtggcctgcctctgattgtgaagtcagtcattttccttcctcattatgtaatgtgatggctcttgcaatctctggtcatctttctcaacctttctcataagccccttttcttccctttgtcctccctggaactctgatgttctaggacctcatgatttctgtgaacgcgctttctgtggttcaagtacactgacttttaagtgacaataacaacgtgtgtactgctgtccccaggccttatgtcttgaggattaaaatgacatgagcaagcatactggattttcacatcctatggctaagtcggctgtgagatagtggactcagtaaggttgagtgggttcagaaaccccggcacctcatacatgaggatgcgaggcatttcctctacccccaacctgattcctggcctggaacacatgaccacagcaccccccacataaagtaagagacacatagcacagaacagagttctccacgctaatgaggaatctagatgggccctgagggtttagccaaaagcatcccttcccggacattccttcctgcgaaaggtatttaatctctggtccaccccgaggaagtggtatgcacctattctgcacgataaacaatcaataaacagtttgtaaccagggactctctctctcatcaagtccctccgtagggggaaacctttgccgtccagaccctctgcctaagtctcctgcagaaggcccctcagtgctcccagacacttgccgcttagctaaactggagtcccgctctcctccgcctgggctcgtcatcctcagcactccggccccctctgttcctgatctgatgtcagggagttagggaaccccagctttggcctcagcctgtgttatttctcacccagactggggtccccatcttaggttgcgttcatcggtgcttcctgcaagctcgcggcgtaggataaaatgcagcctagttagcatcctgcatttcgtctgctcatcagagttcccacaccccagcatcgagacggaacgcagagccacagtctgcaggtgctcactggcctagactgttgaaacaatctctcaaataaccccgccttatctttctcccatgcccacggtctgtcttccatactgccttctactaacgtgcctctcacttccagttgttactagttgaggggacgcagtcatcccacatcgcgcaccccctttcttccaccacactctcattcaaaagtagaaccaaagccagtctggagcttgatggtgatctggcaccaaagcatggaaacttgattttaacccaacagctcaaatattgactatgctttcagctcataaagggtccagcttcatggcattatttgtgtttatggaataaagctgtcctgtcagtgtgaatttattgattcagaggttaaggaaaatgccaaaacatctttaaaatgaatttttgaaaagacattgaagtttttgtcttagtttttgaagcattctttctgccggccttctggctgatgagtattttggatggtttacggcaaatgtggtgcagtttttcccttaatgaaaaaggtcgcagctctttcctcttaggcttactttgggaatgaaatgagctacatagggtactgttctgcagagtggggatgtagttcctgtttgccttcatcataactgatgtttgtcaatcccaaataaaagcactgagaatcccttttattattttgtgcatagcaacaagtcacagtcttttttttttttaaggtttatttattattttttttatgtgcattgatgtttttgcctgcatgtgtgtctgtgtgagggtgttgaatcccccggaactggagttaccgagagttgtgagctgccatgtgggtgctgggatttgaacccaggtcctctggaagagcagccagtgttcttatctgctgagtcatctctccagcctaaagttatagttcttgacttgtttcctgggaaatcgtgtagagtgatggaaaacacatattgccagcctagacagcttttattgatagtcttgccatcagccccaggggctttctgtgttcactgtggacctatgataacggcaaaagtccaaatgtttgtgcttctgtgatcagtacaccacagacataaatatattctctgcgagtatagaaactgatactttccagtcagattccattctaggaacagcaacttggctgttcaagggaaatctgaagtggagaatcttaaagtatggtgcgttacagtatctaaacacacccatcgcaggaatgagacgtctatcttacagtgtaggtcacgtgcggctttctaactggtatctgatgggtagggagctttacctcagccggggctaaatcaatgttcacgtctcatgcctgcttacgtggttttttttttttttttttacaaaatgtggtagggttagaaagtacctgaagttcctgcctgatctggattctttgaagtttaattaggacaacagatttgtgtcattttaaatattctgtcattggcatgttagaattgtagaaatcaccgggaaaggggcacagatataaagtaacttttagttgcctgatgcaattgtcatctctgaggcttactacctctgtctgctaacttaggcctagtcctggaaatttctagcctctggacaatctaatctagaatgttttcagcctctgagaattactgttgaataagctcaccccttcctagttctttctgaattctggctagctggctcaactcagcagttctggctcaaatgcctcttcaagttgacagattcgattttgctcttctcttggcctctcctgaatcgctccgcttggcctcaaaatgacttgggcaatctgttctaatcttctggctccttctcattctctggctcattttgttttgacctgtgtctagcttgttctcttttcagccaatctctgtaaaaccgtcccagtaaagctgcctcctccttctgtctgcacctgttctttcatagctttcatttcctctctcttttcccaagagttgggcttatcctcttctgtcaaatctctctctgattctctattgtctgccacaccattagatatcactttcaaacatgggcacttcttaattacaaactaactttaccatcatcgtttggtattaaaggtgtgtgctaagggctgagccccaccacaactagaaacagatcttttcagtaaataacacagtcttggggtttacaacatgatcaagtatcttgcaacatacagatagatccttgttctggaacattaccggagcaatcttttatgtattaggtcagttaaaagctgtgacctttctttcaaatttaaatctaagctctcattgtttaactttagcaacgtttcctaggctgccaaatagagccaggtgttccccagtgttcaccattttaggtaggaaggtttaccaacacaattctgttgattctgtgagtgaatttatctcactgtctctattcacatgatcgattataaaaggttactatttaaccaagcagataactataatcaaaatgaacaggtataaatatattcaataaattcatctgtcctccttagtggccaagaatacagaaatagtggacacagaaagccactgtcttccactattgatcagggcatgcttttgtcttttgataattgaagctcatgtttattcttcactttctaaagtagatcattcatttagacttttatttaaacaaattgtttaatcccttagcaattgttataaagagatagctacacatctgcttatgcatctccaagatttatagggtgttgtagagtgattttgttttttatctttgggttactatagtggatacacattcaagatgccatataaagcttttttaaaatacttttttttttttttaacgattggagagatgttattatgttttaggaatataaattggccagtcaggttttggttttcatggaagtgacagtggataacataagtgaggtagtggctctgattgccttgatgttctagcgtatttgatacatatttattttgtacttgccaaagagtccaagctctaattggcttagatgcctaccgtggaggccgccacgccagaggaagtgttctttacacagaaacgtgctgctttcctgatgtagatggagacttgggccaggggtggagttgggtgtggggggtgtgaatattttctaatgtattacataggagccccctggtcactggcaaagtcttgggtttcaccaatccatgtcctagtccggatgggttagtagcacaaggacagggaagccactgaggatggaggaggtgctggagtgtgggaaggcgagccatttcttggcctgtaggcctttgctgatgagcacattgagtttgctgaccaaaggttgacaagtattcatcagtcagccagcagatacattttatttgggttcatagggtttaaaaacttatttaaagatagtcaacagtcaaagaaagatttcattgaaaagtccatttggaaggtcagacctagttaagtcagcttcccagggtcaccagttagccagggctagaagcgcctgccttttttttttttttttttttttgcctttgtttgggcttggcgccctctgcaggcgactgtggccgagaggtttatggtgtctcgtccctccttcctgccctttgtcagtctttaaagcagcattgattgtaggcataattactcccaacaacaacgacaacaacaagaagaataaaagcgattgtgtttattgtgacccagatagttatagttttttcactatttaaagcctccttgctatgttcatgagagtccttatattttcccttacctcgacctattgtttttgttttttgtgctttttttttttcctggaataaaatttcattgcagactgacaagtttactttcagacaaacaacctttcatacagtctgtattttttatcatctgagtagaaacttttcttaaatgaggtgatactatagtgtttttttatatctattattatatattagtttccccttatgtaagtcccattaatctagtactgacggtgtgacacgttatttgtaaggacttcttaaactgtagaaacactataaactatttttctttccttttttcacaaaattctgccagcgagttgaaaacggagacttcaactggatcgttccaggaaagtttttagcgttcagtggaccgcatcctaaaagcaagattgagaatggtaggtcattttttcctgtgtcacgtaaacatctattgtagttcattttcattacattctccataatgtatttccatatataattcacttccttggctaatatcctttgaggaatatttgttcataattttcaaaattgaacagtattaatttgtgtgttaaatgctaaacttctattatattttatttttttaaagcaggtttattttatttttaattatgtgtatatgtgtgtgtgggaaggtatgtcatgggtggtgtgtacacagagcacatcccctacagaggtcacaagaggccatcagagtccctggagccgcagttggagggtagcttgagacagaattccagatattcaaagtgtttgtttgtccatttaataagcgcagcgttgtaggcaggtggaggcctggctccccatcccttactggttgtggaacctgctgtgagcgtccttccttctggaagcattagttcccttgtatagcccaatgaggggacagacccacgtcttgggcagctagtgaggataggattagagacatggatgaagggcctcaaggtggcaggtccctcagcagctacacaattgtctttttatcccaatgttctggctaccttattatcatacctagaacagtcatttccctcagctttcccccactttcccaactttaaagggaagtctgggaaacgatgaattgaagtctcttagctctgaaattgtttccttagcctgttctttagcacctctgggtcctgtgcttcactgatgtcatgtctccatctagtggcaagattcggtaagggttgggtgagcgaccaatcaaccctgggtggattgatattaaaagactaaccagtccctcacaacatgacagtgacattgccacacgtttggatgatttttcttggttttaattaattcaaagtcccccctccctctctcnnnnnnnnnnnnnnnnnnnnnnnnnnnnnnnnnnnnnnnnnnnnnnnnnnnnnnnnnnnnnnnnnnnnnnttgggagtaattatgcctacaatcaatgctgctttaaagactgacaaaggggaggaaggagggatgagactccctccctccctccctccctccctccttctctctctctctctctctttctctctctctctctctttctttctttctttctaataaaaaagcttgtcctgttctcttacttggtgtcctgataaatggaatggcgttgattgagccttacctgaaacaatcacccacacaggtgctagagtgtgacttacagggtgtaaacgctggctagctatgtgtgcatggtaagctatccaggcactagttattctgtaactgtgtggtttagtgagataatccagatagagtactttggcgcctggggacatagcaagtgatcaataaaattaggtattattactgtcatcatcattatatcaatgtcctgataccatgctaagtgaacggcatctattgactgtgtggggtagctcactaatggcaagagaaggctggagaactagaaatggtgaagaaacaatgtatctgcagggtttacataggagagcaggaccatggccagggattccagccacaaggaatttttatttactcattaaaaaatttatttatttaatctttttaaatgagcacacacagtcttagatattattgtgctatttttgaaagaagtgtgtttaagtagagtctcctccccatcaaccctcccactgctggtacccagccctccatcatccctcccactgctgatgcccagccctccatcatccctcccactccatcatccctcccactgctgatgcccagccctccatcatccctcccactccatcatccctcccattgctgatgcccagccctccatcatccctcccatggcccggtaccccagccctctcttgttacctcccctggtgattctgactttcatgtcagtccctccttgctctgcttttttatcactagcacctctttttcaccctctcttgctttcctagttttctaggctttatttgtaacgacatccatttccatacatacatgtatatattacaagccaggatccacagatgaaagagaacatatggatttttgtctttctgagattgggacacctcacttagtattatacatcccagattcatccatttttcccccctggaaattccattttctttacagctgagtaacatcccattgtgaattggttccacattttcattatccactctgttcatggacatctagggtggctctaaatcctttctattgtaaatagggcagcaataaatatggatgtgtaggtatctttgtgataggagtcctttggatatagtgagtggtacgctaagtcctacggtccatttgtttttaatgttttgagtaatctccatgaggatttccacaatggctgtactagcttgcaccccacctacattgaataaaagttccactttccacacgtctccaacagcatctgtcatcagagttcttgatgttaggcattcagaggaaatttagtacagggagtttgctacagtgagactaagaagaaagacagcaacgaaggatgcagagggcgatggagaaggtagtgggttcctttgaggctgagggatgaaagaaacaaaggggagttgggaggacggaggcccgtggaggaagagcctctgctggtcctcagggctctgaagggaatgcaccagagactctgctgtcagggaagacatctggccggttcaaggcatgccaagccgagatgggagctctggctgaagtgctgacagacgggaagaaaggtttcctttggttgtcttgccatctctcctactttgagagcaaacggaagtatgctagaagggtagtctgcatggagtagtaggtggacccagaattacaaagactgagttggaagcctggcttggagctgagagaaaatttttaaaaatgacagggtgagcaggggtgcagccaagagcatagtatggagaccctctggttcactccggagcacgtgatctggggggggggggtgtcattctttctccagagcacgtgatcccctcggggtcatactccggagcacatgatccctcggggtcattctttctccagagcacgtgatcccctcggggtcatactccggagcacgtgatccctgtgaatgaggtcacttcacttgcctgggctgccaggaatctgccagcagctggcgaaccctgaatgggtgaatcctgaatgagtgattggtggtaactggtgtgttaggaaattagtcctcttaacccctgggctgcaaggcaaggttttcagtgacccaaattcccgtggtcactttggatgaccggccaagagtagatcagtaacaagaatgcttgcttgctgggggacatgccaggacacgtggagattgtctccccccactgtcaagaaagggtctaccaaaagttactctcttaactttactttgaaatactaatatttttattggacatgcatatgtttatgctacacatatgattgattaaaattatgtatatactatgaagcgaccgtcaaatttaacacatggatccagtcccgcacgctgtttttaactataggcaacatgctgtgcactagggcccttgatcatatttctcttgtccagtggcacccttggacctccatcccacagttcccagctgttattttaaggagatggttttgagaaagcttacaaggtgtgactcggacattgcatatgataattaatcaccaccctgcttcacggggagtggtgttatagatggaaacgctacctctagcttccaaaaagccttcgctgtagctgaaacgaatctgttaaagaatactgttcaagaaggaatgtcgccccaaatcaccccagcactgctctgtccatttgagtacttcggaactgcctttgtttggggtctccaagattatgcttcctggattctggattcttggccagtcatccagaggctgccatttttatttttttatttttgtaggttgtagtcgcctctggtgttcaattaggtcagccgctactttgatggctccttgtggttttctgctgactgtcccttgtttgcctgtaggttaccctctccacgctcccgaagcctactttccatacttcaaaaagaacaacgtgaccacgatcgtgagattgaacaaaaagatctacgaggcgaagcgcttcacagacgctggcttcgagcactatgacctgttcttcatagacggcagcacccccagcgataacatcgtgcggagattcctgaacatctgtgagaacaccgagggggccatcgcggtccactgcaaaggtgtgtgtgagctctcagcggccactgtgctgggaaagggcgggcccagacccacctaataatgagccagacctgcgggtgataggatacaatgggatgtttttcttttgtactagatagttggaacatgagcccattttaataatcccttccctaaagaaaggattaatcgccttggtggtggggcccagctttctggacaagtcatggcatgcacttgtgactcttctgagcccaggcgcattgactctgaacaccactagaaggaagtaacgcttccttcagaattgatcatcttttcttcgtactcttccatcatctgacatttagtgtttctatatgcgcgtacgtgtgtctgtgtgttcacacgtgtgtatgccagagtttgacaactcaagtcttccaattttgtagttttgagacagggtctctcactgaagtaggagcttgcctttttggttacactgactggcccgtgagtcccaggggctctcttctctctacactccccattcacgggcacctgcattatatctgggtcatgacagtgtctggctctaactgcaggacccccattcttgcttggcaggtttactgactttcctcctagctcctctcgatggctttcgggtctctctactcttccaccctcgcgccgcccctcccctaagtcttatgcctcatagaatagagggtcttcccacccattactcgatgtgggttgtctcagaattaactggaagactttgctgtgcaagtgaatacctggcttctggagtgggcactggtcaggtagagcaagtgtaggtcccagcttttaacaaatcaaaacgcaagatttccagttaaaattgagcgttacattaaagtcggaaggagctcagattccactgtgggttttctagtttggtgatcttcatttccgcggagacgaatcactcctgggaatgaagcctctagcgtgccactcgcagctcttcacggtgccgcgaggtggcgctgctcacattggctttgcgtccacaaaggcggttttttgttgcacggttatgcaaatcggccagtaggtgttggggatggtactgttcttttcatgtgcggagcgctgctgtaactgccttattcagacagtgtggctttggttctgacagaaattaaaataccattttgtaggcccttgtttctatgtttaagatctgagtaggtggaggaactttgctgaacatgtgagctctgagcagtgatgccaggctgcgttcttctcccagcagcctgggaagacagggaagcgaccggcacatggcccccgatttagggatggttcccgaagccaggctgcatctacctttggcgcagctcttctctcgcccttctttgtgcggggaagaccctggcttgcaggacagtagtcctctctctgggttgttagactaaggtgttcatttgctctcttctttgcttctggtctctcctggggcagagagctggcttgttctgaacgtttctttggcactctaagtttgttttattgtaaccctcccggcgggaacgaaaggactctaaatagaatcttgtgccagccgcgtttgactatcaggctgttgagattatgaaccccacgaaaatggattttcctcagcattttcctgatgggagaagccagctagagggagatctctctctctttctctctctctctttttcatatcactgacaacttgtcgggtcactttgcaagtcttaagaggggggtcacactcttcactacaacaccttgagtgaatccccctttctgttttctactctcacatatatctttagttagaccactgcggataggtggctgtacttggctctgtgtgtgtgtgtgtgtgtgtgtgtgtgtgtgtgtgtgtgtgtctcgaggtggggtagggggaagggcaattgggacccagcctctgacctaactctggtaacatggtggtggtcccatgctgttagagtttgctcacatgcaggacaaggcccaccattcccatatgccatgtgtcagaacctgggagcctatggagtgtgataatgaagctttagtatgggacacgccgatcgtctcttttgaaggaagttcagtttcctatttaaacaaacaaacaaacaaaaaatcagcattttccctaggggattaatttggccttttcctagtcagtattattatgacaaggttctgtgtatatctgtatatttataagctatattttggatcaactgactgggggggcatagctttccttttttatatacttttttaatacagtattttttttatcatgtttcccctccccccaattcctttcctatcctctttacctacctactcacccagagacatgttctctgtctctctcaaaacaagaaaacaaaagacaaaaatcaaaataaacaaaaaaccaataagatgaaaaaaaaaagcccaaacaaaataaaataaaacaaaacaaaagctccccagcccacaaagacatggggttcatcttgtgttggtcaactaacttctgggagtggggcatgccctgggatgtggttaatacgaatagggagactctcttgggaaaaactgtttcccattgtcaggaaatggctttttggttagggttggaaccctgtgtctgcttccctgtctcaatgctgggacccttgatgcttgaacctgtgcagctctggtgagcactgacacagcctctgtgagctcacgtgggcatcacttgctcttgcagtagatgggaattagcagtgatccactgtggtcaatgagcagagagtgagcgacttgggagcactcagtcctaagtgggatgcctttttatcactccccagcctccaccaaggcccagggatctaagggcaagtggaggtggaaagattgtaaaagccagaggtggcagatgattccaagggaacagtgtatcccagacaaagcttaaatttaaatgtagtgtctccctcgatggcatgtggcgtctaagaaatactgggaaaagacaactctgaggctaaatattcttgttgatagacaggctttctctatatatcacctacctgtgaatgcttacctcttaagaattgtatacacacacacagacacaagaaatgtatacacatccccccccccatggcagaaatgtttttctccccatatttccactatcccttttttgtttttaaagtgttgaagtgagctcttaaagaggagtcacattgatgccgggcatcacttacatgtgaggtggctttctcctttcccctcctgttaatgaactcggggttcttttaaacacatcacacctttggtttaattgcagctgttttgtttttaatggcgtacttagctacctgggcttgctaattactttgacatctgccctgattaagtcagcttaattttctggaaattcaagaagcactcagtgttttaattgaactaaaggaggtggaagtgagtgtcccatcctttttaaatgaactctccccggggagtggggagagaaggaaaatgccatgtgtcaacatacagcggcacttgggggcaaattagacacagttaatttgtggcaaaggtatgaaacccaccacaaggccttgtttgcagtccacattaaaggaacggctgtacattgggggcattttctagcatcaatattcatctaaaatacagcaacattgttactctgtgatgtgcatactgatgccctattgggagccagaaggaggactggtagtctaaagcttttgttataaatagagcaccctgcacctttgtcacgcggtgccagggagccctttaattacggatgctttaacgttttttttttttgttaaagttttaatagaaacttagtgaagtactcctattctgttccctgtggtaagagctcccaacgatggagtgctaagtaggttctttttatagacctaaaattatagactcctttttaaaagggggggaaagcaacttcagtttcagagaaatttgaacattcgcagcaccatcccttggctgtcaggaggattaggagcctgattgggggggggggggggaaccaggcagctccctgcatgaggagtcgtcgtgggagtctctaggaagaagccccctctgctccccagacagggacccaaactggaaccccccgagtcccactggttctggtgcctgttcttagcatgctcagcggcagcccctcctgaagttaagccttgtcaagtatccggagggagagtgactgaagcagttcatagtgaggtgagagtcaggagggttaactgcaactgtttcttcatgttaaagagaggatccaccgaagctttgggaaactttagcctcttgtttgtgttgatgcttgatctgggtcagaaggtacttgaggtaaatacgagatacacacacacacacacacacacacacacaccccttgtctattaacagtgcatgtacgctttgcaaacagaaaggtgaatgggaaggccaggccaggcatctatgggcatgaacctgactatctgccctttcaatgtcacatttgatgtccattctaagcagtattgctgtcaagtggacacacagtttgtgctgagtaaaacccttgttatttttttcctgcataaagtccggatttacgcaccatgtataggttcctgtagcagtgcagtttcatgataggcaattaaaaataaaatgtccagagatgcccctgggaaacagttatatcaaaaaggcggccaggcagatggctcagcaggtaaaggtgcttgctgccatgcctgcccccacctgagtttgattgctgggatccacacggtgaaggagataacggatgtttgatcatcactgcctgacctctgtgtgcatacacacgtacatcccagataagccaatgtaacttaataaagtaactgtggaaaaaaaaaaaacctgacgtaacgacattcattttctatatttttaatacttcttaaattagattgggtttaaaaattgatgagcaaggatgtgtatttcaccattagacgttatgactgtttctcagctctgagcaaataccgtgcatttcctaattctgggagagtagattatcttcattatttgaccagggaggatgcaataattcaagtccatggttttatttatttattgtattggggattgaacctaaagccttatgcaggaaaaacaaactctctaccactaagttacaggcctagtcctagactattcataaacaaagctattgactagatttcatctctctctgtccccctccccctttccctccctttccccctctcctcgcctcgcctcgcctcgcctcgcctcgcctcgcctcgcctcgcctcgcctcgcctcgcctcgcctctcctctcnnnnnnnnnnnnnnnnnnnnnnnnnnnnnnnnnnnnnnnnnnnnnnnnnnnnnnnnnnnnnnnnnnnnnnnnnnnnnnnnnnnnnnnnnnnnnnnnnnnnnnnnnnnnnnnnnnnnnnnnnnnnnnnnnnnnnnnnnnnnnnnnnnnnnnnnnnnnnnnnnnnnnnnnnnnnnnnnnnnnnnnnnnnnnnnnnnnnnnnnnnnnnnnnnnnnnnnnnnnnnnnnnnnnnnnnnnnnnnnncctctcctctcctctcctctcctctcctctcctctcctctcctctcctctcctctcctctcctctcctctcctctcctctcctctcctctccttctctccctttcttcctgcctcttctttctgacagagtctcacacattttgccctggctggacttgaacctcaggattctcccacttctgcctcctcagtttcaggactagagtatgtgtcaccacatctgatcttcctcttcccttttctaatgagaccttttcatggatgaattccaaggtcagaggcttcaggcattttaaattccactgtgacccaatcaaaatgtctttctaattcatctcttatccttatctctgcctcccagacccccttgggccatctttgcacccctgcctctgcccacctatccccccaccccagccagcagttttcttcttccagatccatttcttgagtttacgtcactttcttatcctataatgtagggcagctactttttgtcctttccgttggttaaaaaaaagtgtgggtggttctgtttcatgtttgtttgtttttttccctctttctttggtattgggaattgtactaggggcgtcgcacatgcttggcaggagctctgccaataaacgacatctccagcctgagtaaatatatgtttttacacgagagacactgcgtgaacgccagccattgatgctgtcttagccctagaatccagtgcagtctgtggacagggtagtgttcatgttttggcggatgcatttgctacactttgcatttctcgtttccctcttttccagctggtctgggaagaaccgggacattgatagcctgttatgtcatgaaacactacaggtttacacatgctgaaatcattgcttggatcagaatttgccgaccaggctccatcatcggaccccagcagcacttcctgaaagagtaagtgtccctttccgatgactgtgttgcctttttgccctgagcctttcacccccaaattcccaggggtcaggggtcagtccctggggtcagccactgagccagtcactgggtcagtcactggggacagtcactgggtcagtcactggggacagtcactgggtcagtccctggggtcagccactgagccagtcactgggtcattcactggggacagtcactgggtcagtcactggggacagtcactgggtcagtcactggggacagtcactgggtcagtcactggggacagtcactgggtcagtcactggggacagtcactgggtcagtcactggggacagtcactgggtcagtcactggggacagtcactgggtcagtccctggggtcagccactgagccagtcactgggtcagtcactggggacagtcactgggtcagtcactggggacaagtcactgggtcagtcactggggacagtcactgggtcagtcactggggacagtcactgggtcagtcactggggacagtcactgggtcagtcactggggacagtcactggggacagtcactggggacagtcactggggacagtcactgggtcagtcactggggacagtcactgggtttagtgagacaaccaagctgctaaagaaacctcagttttcggattcacgtgagagggaatggaggaatgagaagataaggttcaagtttctattctgaccaggtcgctgccagcttcatgctcatcattcggaagccccctcccttattaactcacttacacttatgcctttccatccaaccccaggctgctgtgcagaaagatgcaatttgtaagaatgccctttgtgaagcagcctgtctccccttaaaatattaagcactgaatattaagcacaagtaggaggaggaggaaacttttcatttgtcttgagatcatagctctggttggccttgacctcgatacgaggctgagggtgactcaggtgcctctgcttccaccttctgagcgctcagatgacaaggttgattgaacccaggtgtttctgaaagcgaggcaagtgcgaggcaagtgcgagccacgcctccggcctcctaggatgagatgaactggtactagttgtcgtcagtgcagttctaacatacgctccgtttctgataccttatgcggacgctttgcttccgtgcccccccacccccccagttggagtgatcccatccgacttaaatcagtttagtttggatgaggtgtcgtaagtaagaaagatgttccaagtgagctcttcacatctgaaatgatgaacaaatccttgagcccaagggagcactagtttactaaacccacggggaataaccgctaaaaaaaccaagcaccaggaaatgaacaggaaaaactcagctcagagagccagagacaggagaatgatgagtcctaaagaaaagctatgtgtaaatagggtcattaaagagaaggaggtgtccaggtttctcctcatgtatatgagtacactgtagctgtctgcagacacaccagatcccatcacagatggttaggagctgccatgtggttgctgggaattgaactcaggacctctgaaagagcagtcggtgctcttaaccactgagccatctctccagcccctcctctagttcttgtcgctgttgttgtgcattttatccatctatagcatggggtatatgccatgcgcttatgatactaactgcttgataatgttgaataagtggcctcaaggttcgaaacttgaaatccaaatgtttctaaacctagttccttaggccattttctcagtcttggatgatcggttggaagactgtccctttaagagggacattgaagcctcacttgctccaggctcctgctaggcacagccgaaggacccagggctctattggttcaggtcttttttttttttttttttttttttcctgagcagggtgtcaggatccaccgttgtccccctttctgctcacgtccccgatgctttcaccactccatctttctcagccttctcttgtaatgatatcagaagaaattagggtctgggggcatctgcacttggcttgaagcaatgccgtttatctgtaaatgcatatgctgtaagactttggtgacacccttccacgtgagtcatagcacagttttccaagcttttgcctgtgcaaactgaagtgcagaagtgacctacttccttagctcagtagtgttatgcttggatcagaaccttccagaaggtagatctcttttataccttttctgctttgtgaggggttttgaacttgtgtagaataacgccccatgttcctcatggcttctcccaggcttccttagatagtcttttccagtgttgtggtctagggctattctgccaagttctcaaacttaatgttttagtctcttactctctcctctctgacccctcctctcagtttcatctcctgggagaggtcatttagagcacctgggacacacactcatccagcagctatgtactgtctgcaggcttatatcactcactgttcttgcttccagggtgtagcagtaaatgtctcagttaaggttcttatagtccttgcctttcaactggagaggtatgccataggtagatatgtgatttgtatatgggagagcttttgatggtaggtgctatgaagatgcaataggaaaggggggaggatgatagggaggggggaggaactctctctgcatggggagatcaaggagagctgaacactgaagggcaagaaggagcaagtcccatgttctatgcagggagcatatgaaggtcctgaggccgaaacacacccactgttgcagtctggaatgaaggctaagtgaataaggtttggtactgcacaataaccccagaactcagaggcaggaagagacaagttcaaggcttgctgggctacaaagtgttacaggctagcctcagaaatacagaaagatgctatctcagaagacgaagtgaaattaaaaaaaaaaaagtcagagtaaaagttggtatccatggaatataataagctaggtgtgactggctgagaggttaggccagtgagttagcaaagcattcgtccatgcaaccttcccaagaccaagaagtagaaaacactggcatctgaaccatttaacacccagttcaacaaggctatgggtctgtctcgtcacaccatcaatgagctgtgcagggttttgagtcttgtctgagcagaaccaagtagtatgtgtgtctagctttttaaatttcctcttcccttctattgctttttgcattggaatgtttgaatatgtgatttgttttcttgtcctcctgatgaacatttaggctgttcccagtgttggctaacttgcatcttttgcttgcatgagctgttggctggatacctgtgatagaacaatccggcatgcgtgcgttgggccttaggagtggtagccagcagtttctcaagatcttggagctgaggggatgagcagaagtctgtactagtgcagggcttgtgtggagtaggggcagaatgagaggcaatttggcattttgggaactacagtagcgtagcagtctggagggctgcactggagaagcaggtttccttccccttcccctgatacttccggtattagacttagaaacttgatttcaaatgccttccccttgtcactttaagcatagcattgaaccttctacaaggttgttttttactaatagcgtttttcttttgctcttcccatatacccattgaaatatgacaaaggctttctctgtaaacaactgagaagagagtttgtttcataccttcttttcaatatgcaccctgaagttcttagtgaggcaactttgaagtagttatcttctgcctcagctctctgttgtaacggagacctgccaagaattagcttcccaagaggaaaggttccttttaactcatggccttcaaggtgtcagcccatgatttaccctacaaattttgattacctatcaatcatatttgtgtgtccatccatctatccatccatctatccacctacccactcacccacacatccatccatccacccactcatccatctatttatacattcatccatccatccatccatccatccatccatccatccatcctactgtttactgttaccatcctctatctgcaatctaatcacaatccaaaatgttgtcatcttacaatctgagtgctgtctatagaaatgttcccttacttcctgctatctatcatcaccatttataattatttgaactattttactagtgaacgtttagaaccacagtggagagaggcaacagccttgctcccctcattattattaaaatccaaaatgaagaaggaaaggcccactttgtgctcccgtattcctctcaagtttcttctatcttttcctttcaatttaggaaatgtcttacagtgattcttgtatcttgggtggtgtgtgtgtgtgtgttcgtgtgtgtgatggcacaaatgggaagttcaaaggtcaacctcaggtgttattcattgccttccacctcgtttgagacagtgtctcttgtgtttgctgatgtgtacgtcaggctgtctggcccctgagctttcaagaatcctcctgtgtctggcttccatttctccacagagagctgagatcacatgtgttcactatggtgtctggctctggagatctgaactcacagcctcacacttgcatggcaagtgcttttctccctgggccatctctctagccctagagattcttttagagtagatttgctggctcccagttcttttcattttcctgcatctgagaatgtcttgatttcgtctttattcatgaaaggccatagcttcacctacagacatttgcagcttccctctgtcctccgccgtaattgctgctgagtgcaagtcctgccgttgccgctttcagaggttttctaccactgatggtatcatctttcttgctgcttttaagatgtgcttaaaaattatctttgatttttcaggagttaaacaatttattgttatttttattggttattttatttattaacatttcaaatgttatccccttctcggtttcccctctgcaagccccctatccccattccccctgcttctatgagggtgctcccccactcacccactcctgcctcactgtgctagcattcctctatactggggcatcgagccttcacaggaccaagagactcatctcccactgatgtcagataaggcaatcctctgctacatatgcagctggagccatgggtctctccatgtgtactctttggttggtggtttagtccttgggagctctgggagtgggggtctggttggttgatattgttgttctttctatgattgcaaaccctttaagttccttcagtccttcctctaactcctccactggggtctccatgctcagtccaatgattggctgcaagcatccacatctgtattggtcaggctctagcagagcctctcaggagacagctatatcaggttcctgtcagcaggcacttcttggcatcagcaatagtgtctgagtttggtgtctgctaatgggatggatccccaggtgggattattgcatcatgatttgtgggtcacttgcttctttagaaacaaatttcatatatgagatttaaaaaaatattcagtgagaacaggggaaagtatacatacttcatcttcctacaaatggcagcactgccctataatttgggaaaatttagcatgactgtagtttttgacctggtgtttgctacagtagactatgcgattgacatccctgaccacttacattaccttcccctgttcctgtgtgtgtagctgtataagaaaacaggaaccccgcagaagggattaaggatcttggttttggtgagagccagggaaccacacaggggaaaaggcaacaaggcagaggagacacctgtatgctttgaaggtagaaggagtggaaaggtgtcaaggaatttgacagccattggacagtgatagcaataaggaaacagattgcctcctcagagtttccagaagaaaccattcctgccgacactttggccttagctcagtgaacatgcaattagatgactaaactccaacttttgtgtccttcttaaccaccctggttgtggtcatctatagaaactggctctcagtcaggaaacactgctgggaaggtgcacaggtgccagtgacagccaaggttacttcttgtggttgtcctacttttaaatttggagcatttgatgtggaggagtcatgtgatgccagtattgctcagggaaggctgggctgcaggctgcacacgatgaatcagatagacgggggtcagagaagctaaaaggaggctactcagtctgtcagggagacaggcttactaaggcactagatatgggctcggagctagagacctgcaccaggaacatttcaaggggaaaaaataggctttgaagcgcgactggtgctatgaaggacgaagagcgttaagtcagagatgacgtaaaatcgtgaataattaacagggtcattaggagagaaatgggggtgaaaaccgttccatagcgtctccatctgtcacagattatggaataggcacgaggggccgactgcctttctttcagaactgaaaagtcaatcagagccttttaagctgtatcagttctaaatctgtctgtagaaagagctggttagtcatattccaatttccttgagaaacaaagcaaaacaaaacaaaaaaacaagccaaggtccaggtgtcggatggatgtgtcttagacacttgtgtcacctgtgttaagtgaggtttgacggcatttctgcgaatcgccgatcaactaacacatcagcagttccgaacttttcctttgtttgatatttttctatttaaagacttccgtaggatataaataaagatgtttgcgaagcacccattgagcgtgtttcttaaacttaaaactaaaaataccattcttaagctataaataatcaccgtggacccaaaatgtttctactattaaatgccctttggactcttgagatgatacacggataactctgttattattagcccgctttgaacgcccgcttctcaaagacaacctgtggacatgtggagtcaggctgtgtctgtgagactgccccactctgctcgaactttctccagagaacccacaccgaactgaaaaccacaccctaccaggagctccatctattttgaactatcttcagaaagtaacaattttgtgtctggaacccttttcagtttttttttttttttaagaatttattgtatgagtatatatgtgtgcctgcctttctgtctgtgcactgtgtgcatgcaggtgcctgtggaggccagaagatgtcaggtcctttggaattggaatcacaggtggcttgtcagaaccaaacctgggtactctcaaagggtagccaatgctcttaactgttgagccatccatctccagtgccctcccagctccaccccaacccttttcagtcttaaacccacggattcccaaattcgctgtagatattagttgtacgctgtcatccgttagatccgtttctgcattttcagttatttgcaaacttcctcttcagggctccagtgacgtcacagtgatatcatttgccaaagacccatcctgattgagcggatctggggtggcacttgtaagactacatttgtagcacaatgccctggtgtgccatgaagtagggtcttaccccacattcagttaaaaaggggcttcagctcacttttactcaattctgccatgtcttagtgttttgttgctgggaagagacaccatgaccacagcaactcaaataagggaaagcatttaattggtgcttgcatatagtttcggagatttggtacgttatcgttatggaagggagtatggtggcgggcagggagacagtgctggaaaaggagctgagagttctacaacaggatctgcaggcagctggaagagagagtgacactgggcctgcctggggcttttgaaaacctcaaagtgcacctccaatgacactcttcaaacagtgccattccctggtgaccaaacattcaagtctattatgagccgacggggggccattctcaaaccaccacataccacaagttggcaagttataccacatctttcataagtgcttagaaaacttggtgaattaatttcacagttgggttgtgctggatcagaaactaatagtttaaccattctccaacacccacataaaaagttaagcaaggtggctttcacttttttttttctttctttttttttttttttttttctagacagggtttctctgtatcaccctggctgtcctggaactcactctgtagaccaggctggcctcaaactcagaaatccacctgcctctgcctcccgagtgctgggattaaagacgtgcgccaccatgcccagcttggctttcacctttaatctcagagctggagagaagaggtaggagaatcggccaaggcttgacaactgattagcttcaactcccataatagattctgtcttcccctaaagaaggtggattgagatgcaaaaagatacatgaagttgttctctggtttccactcctccatgtgtacagtatacccagccacataaatacatggcttgggttgaggcttagaattctgttatttagagtccttgctaagaagcctgggacttccagttgaactgtgtggtggcacacacctggaatcccagcactgggaagagaggcaggagcatcagaggttcgagtacatcttcacctgactacacagtagctagcgggttctccaggcttcaaagctactggttctttgtgtgatcttgcacgttcagcagtaggccataacttcataactactggctctttgtgtgatcttgcacgtccagcagtaggccataacttcataactactggctctttgtatgatcttgcacgttcagcagtaggccataacttcataactactggctctttgtgtgatcttgcacgtccagcagtaggccaagggatacagcttaactgtttcaataacacatttaaacatctagtacttagtctttcctgaaatataagaacttaaagtctttagtattattaaaaaattatagttcagcactagatgatatcatggtttgtctattaaaaatagcaggcatttttgctttaagtttttagtttacattatttggtaaaagtcacattttttttagttgcataaattgatgattttctttttaatatttactcttgaacctttcaatttcatcatttgacattaaaaagttactaaggaaaaagatcctaatgtgggttcaaatgttaacagtaattaataattcgaataagaaacttaccttgaaatacttgtatcaattacattagatcaaagtttggatttttttgtaataagttataaaattaaaatttgtttagatgtacagtttgttaatcttaaatatattcacaatgttctgtagccctccccactctttgtggaatattttttaatcattcagataaaaagttcatacctattaaacataaaacctccactgaccccttctcctagttcctggtgacctcaagtataccaaatattcatagtcttaggtatctcatatcatgtctgacttattttactttgagtattttcatgttcacccacatcataatagtcaaatatacatgtcaaatgtgtagctcagtcttgatacccttcctttgttttctttttgtattgaagggattgaactcaggtcttttgcatgtaaggcaagccctctataatgtagctataccgccagtcccttgattccctttaattcctgaatactattcctctgtagtttgtttatgcattaacttgttaatgggcacttgagttgttccccactttgggatacggtgagcagtgagggtctgtgttcagttcttttagtgccgttagatgatgtggaattctctgtgtagcttttggaggcactgccaagttctttttccgcaacagctgctccacactacatctccacctgcaatgcatgctggtcttttatgcagtcatacaatgctctgtgtcctcaaatggccagatatggaaagagttgaaagagtattgtgctagattataaagtgtacattttggccagacacacagatggtctaaaagctgatcatagaaattctgtacctaaaagtagatttatctacctgagtcttttaaatgattttccccttctagtaatttccttgtgcacttcaggattaaaagccttcccgtataccatcagaaatcctacacaatcttccacgtggtctcccattatgtgtgactttctgaataccttttctcacactctctgcctcttggtatctgccattttgatattgttcaagtgtttcactagtgagtgccctaagctaggagttacccgtgtgtctgtcatagctctgagacatgagtaggaagtacacagagaagattggtcctctggtcattgctagaccaaactataaaatgggttaggcagctggggagatggttcaggatataaagcacttgccatgtggccatgacaaccagaggttaggtcctcagaacccatgtaagagcctgatagaccctttggcctgtctgtaatctttatatctgggaggcagaggcagggtatcagtcccccgaggcaagacggctaacaagattagcttgtctgtgagctctgggctcatccaagaaactgccttagcatgtaaagtggagggtgactgaagaagccttctgatcacaacttcaggtctccacatgctcacatgggcacacacacatgcccatgtatacacacaacacacatgtacaaacatgtacacacaacacatgcacacaaacaaatgcatacacacactcatatacacaaatacatgtgcacatacacatatacaacatataacacatgtacgcacaacacacacacacacacatacacacacacacatgccataccacaccctaccataccatatacatgtacacgcttaggagaaaatgggttcagtttctatatcaaatgaccaaatgatggcttttgatgaacactggggtcaaggttggttcatcctggcaagcagtgtcttgggtggaaagcctgaagataacaatgaagagacagtatcctgtaatgcagtgatagctccctttaaggagctgagggagaacaagtgagcctcacatagaagcaactgcacagtgtctcccgcacgcaaaaccacagatatttagaatggcgcatctgacttgagttgtactaaaagcagatatttacaaagaaacatccaaactaactacacattggctcatattaaagccaaattacttagttattttttatatggcacataggtctagctgaaatctgactaatttgggctaggatgtggccccacacaatcaccccaaccctggccacgtctcccaaaaggctgcatccagatggagacaagtctcttcctgttgctgctcccaagcacggcatcttttagtgaagggccagccatttcttgctcttggaaaatgtgctataatgttggaagattggctttcaatagatgtgttagctttacaagaaccaagttttcaacgttaaatgctttagaagacacattttacttcttttgtttgagaggaggcttttaaggcgagacagacagtgctacagaagctgctgcgatgaatgtcgtctgtggctaggtatctctctatgtgaaaggccgcttccttttgctcaagaagcagttgcgtacatcattgcttagcaacacttgcttcagctctgacaccttattcatctttaatattcaggtttagatcaagtctttccagagacggggcaggttgagtctttgaaaccaagcaagtggaagttgtcacttggcaattttcaccctagggctgtcagcacgcgccggctcttcagctcataacctatggttgaatttgacattccttttcactttagttcctttagcctttgttcccacttcattttgttttctcttaaatccctaaagacgctaccacaatgtctgcatttggggcatcacatttaaatatcttagcacggcacctgagatccatcatcagaaaggacgtttccccaagctcagccgaattagccagtgctgtgttctgtatgcagtttccttagcttgtgcttgtttgggggtggagtggggtgaggtgaggtatgatctcggctggatgagtcctgctttatctttccagatagggcccagcattgtttaaggacaggaatgcatgctgagaaatgtatctgtaggcaattctggcgtctggtgcactttacaaacctggatgtataggctggccatcaccagcatacatgacctttagaaggtgggacatgcaaccgctgccttgtaacatgacattgtatttaatggaagacttcctttcttatgggggagggagagagaagaggagagaaaaagagagaggaagagggagagagagagagggagggagggagagggagaggagagagataagcagagagacacacagagagagagaaacagagaagaaagagaaaggtgtgtatgtgcatacatgtgagtggatgcatgtgcacacagacacttggcttctgagctcatagggaatgtctgatttctttagatagggctgggcccctttgccttggatcttgtctgagcctcggtcacagggcctcaacgtgctggatctcagctgttcacttctcccttattaaagtaggaatttcttaagggacaaggattctgctatctatctatctatctatctatctatctatctatctatctatctcatccatccattttaagtttttcaagacagtttttctctgtgcagccctagctgtcctggaacttgctctgtagatcaggctggccttgaactcacagagctccaacttcctctgcctcctggtgttcaaggcttgggccaatgccgtccagctcggtctttattcttaaatcctcctgtctgtgtgtttcatgtatttgaagaatttgtctgaatgcgtgacaaggcagaacctttccctgagagcaacagttcctgggtcttcttcctgtatgaattcatcagccgtctccagacctatacattccctgtcaaggactctgctatttcttactactgctggaaacccataagagtcaagcatcagataagggttctgatccatgtcggcctgaagtagaaggctgggaagatacacgagtgagggcaggatgctttgaagataccaacatttaagagcctaggctacgcttttctaaacatttgcacaaaggaaagaaatacgaaggttgttttaaatccctgttttcacagctggtatagaagatcaactgtgactctatgctatcctaacagcattggcttatatatcctaggcttcaaaagtacgatttgagggttagcttctaagatagaagacagatagagcctgacttgttagtgaactggtgtggatggatttctgagctattgttcatatttaaaaaaaaaactcatctatttagaaatatttagtttacttagaaatgtaatggtatatttcccctttctagtctagttgttaaatattttgttaatatctttcttgttaagatatcatagcattgggaagatgaccattgtttatcttaaatattttatcctctctctctttccagaaaacaagcatcattgtgggtccaaggagacatttttagatccaaactaaaaaatagaccatccagtgagggaagtattacaaaaattatttctaccctggatgatatgtctattggtgcaaatttatccaaattacaaagcacagaaaggattgggagaggtgagttttcccccggaggcatctacctccctaacaccaacattctttgtccatttgttcctgcattgaacacatatctcgtagacctatcttttctttctttttaaaacatctatctatctatctatctatctatctatctatctatctatctatctatctgtatgtggggtgcatgggtggggaggtgtatgtgtgcacatgcacacatgtttcaatacatatgtggtagtcagagggacaacttttgggaattggctctcaccttttaccatgtgggttctgaggatcaagttgagattgtcatcaggcttggtggcgagcatctttgcctgctaagctgtatcaccagcacaagtgaccttatctattccctgggctcctgggagggctaagtttctaagctgggagtcattgttctatagagtacaaagtagagtaaggaaaccagtccactgtccttgtaaaggcagcaatgaggtcataatttaaggagcacgcttagaaagagtgcaaggactatttatagaaaggcaacagaaaagtaaagcttccctttgaaaccagaaataggtaccaagaagaaaaagttggatgctgcgtttgtagaggctgttcctagcacaagtggtcctttgaaagcctttaaagagtgcagcggggaaagcagagttaggacaacttgttttacccagactcttctccaaacaaaccactcaaatcatcattctcttgcggctgatttaatctgcactcccacccagtgaattagatagtatctctatatggtgctgagggtgtttcagagatgggctgacttcagttttagagcatgatgcgatttgtctgatcccaaactcatgctttttttttttttttttcctattgttctctgctttctctgaagtagcaggaaatgacttacgatggattcggagtctgagcatttggggagctggaagctactgtgctagtgtcatttgttctagttctcctctgtggataagaaatgagagatccaaaatgggatgtgcccaggggtcttgaattatttaatagcagactcactttcagaactgggcatccaatgcttagtttaggtgactcttcctcccctaggccccaagaaagggcctgtagcccaggctaaccttgaaagtcatgatgatccacctgcctcagtcacctaaatgctgggattgcagtcacaagccatcacgcctgaccctagttcagctctttgtgtaacatcgtgtctgaaataaagctaaggacttgggttatgtttttatattcctaaagaggtaaaagagggctggggagacaggccagtggataaagctgttgtcttgatagtgtgagaaccggagttaattcccgcagagaccaaggaaaaactgggcaagtgtggtagctgcctataatctcagaataggagaggccatggcaggggatccccagggcaagctggctagccagagtcgaagtaagagacccttcctcagccattaaagtggagagtaatcaaggaggacacttgatggcaatctggaacatatcacatttatacacatgtgtatgtatatgcatgtacccacccatatacatgcacaggcacgcacacacatgcagtgcacatgtgcatcctcacacccatgcagaaaagaaagagcctggggaaatatttaagcaacaagtgtagatctacattaccttagctggatatccatcgacccagaccagagtcttgcggaaatttgccccgcaggagccccatggatggcatacagaggtgtctcaagccaatgcttgctaccctccagaggcttcttctagtcagaaagacatgagagcttgtcgaggagagggagagcttcactctaggacacaggatagagactgctgaaggagctggggacctatcttctggatcctaggccgggcattcccgtgtcctcagggaatggtagcccctctgctcctgagggctatctcatgatcgaaccactccaccaagaggcccccgccaaataccatcactgtgggatgtttggacttcgacatagaaactctggggaatatattcaaatatgtaaatttgttagggcccatcagtctttatgtcattttagctattggtgagtgctaatgtttgtactgttagagtaaggaaatcaagacaaacaaccaaaccaaactgaaacccctcaggtgccagagtacaatgggataacagccacttcatctggcaaggatcacgttaggaaggaagggcttatgttggctcacgatttgaggggggcagagtccatcactgcagggcaggcatggcactgggtgcttccatagcagtgagagcatgtggtagctagctatctcatgtcatagccagttggaagcagaggaacaaggcttagaagatgggcagggctctaaagctcaaatcccggggtcctccatccctctcagtagcctgcttctgctaggcaggctttgcctcctgaaattttcacatccttccaaaccagtcttaccagctggggaccaagtgtgcagacacaggactgtgctttgtgcccgtgccataatagatgacatcgtcctacacaggggcttgtttgtggcttttggaccacttcatacacagttgatgccttttacaacgaacacttctggacttttctgtaaatgaattgaaagcagagaatctcaattccatttggatttgtggctctacagtacttttcttgtgattgcttattaaggagcactgtaatgacagggttagaacatccaaatacaagaaaaacagtaaccggaaaggctggggctttctggtgaatttctcagcacactcagaactgtgaggagtctttcagagctgaggctgtgcctttgtggaacctggccttctgtgctgtgaattaacactcaccacccacgtgggggcagcgtgtgtcctcccctctccctgcacccccctccccatgctcctgcagagctgggaacttttctcccacgctgaggtttttaacttattcccatcgcggtgtttgatccctgggctgcacagccttagtaaatgctacttgaatgaacaaagaaagcttagcatttcagacccaagaatagacgagaacagacacgtgagatggacccgatccaaatggtgcgatgatgtcacatgctcaaacgcaaaccgatgcccaaaataaggattcggtatggcatccaggggcataagaagccgagaaggtggccagaagaaagaatgtgaagagctgtatttaaagacaaatatttgagctaaactaggagtttagtggtgacaaccaaataggtagtatccactgtgtgccaggaaccattttaagcaccttacatggactaacccctgatatgccatatggcaagaccctttaagatacacatattggaggaagagaagggcaggcagctgcctgaggtcacacataggtcgtatgtattgagttgttctttgagcataggcacactggttcacagattgtacctttccattagtctactctgtggttctaatacatcactctttgtgacttaaaacaagaccctggtcagctccacctctgagaagtctctcagagtcacagtaagctcagtgattcatttagctcctccagggttctagttcagcaacaatctcccagccagtggatgctcgtgtcttagagatgttgttccctagatgcagatgctgctaatgtccagccaactccttgtgaattggtagctgagcagctaagaaggtaatgctgcacctttgagaatcccatcttctatctccaaggctttactttcaagtatcttgcttccaccctcaggatggagaggtgttcccaggggaacgccaccaagagccaccagaggctttcgggagagtagtggcagcacctgggttcagagtgtggggtgcctcttctggctttagtttagaaggtgtgttggggcccacagaagactggaataaagggccagggtgttggtgatggggaagaggtccaactctcaaaggtgcaggccaatgcagtgtgagatcaaacaaacccaaactaagtcaccttccttctcctgtcccttcctctttcctcccatttctcctcttcctcctgcctttctttacctttggtggtgctgggacgaaacccagagccttgcatatcctaaacaagtgctcaggctctaccatgatagctacagctccaacctctgaaatctactctcccttctgatctcaggaacttattgtgaagatttctttgtcttcccctaactttgacgttgtacaggttcaacgtccaaacactgagaagaactttggcaccagtgccccatccaccttttctatttaaattgtttgaatttgctaccaattcacttcccatatttgccttccaatcctgtgacttctgttttcactcatccctgtttcaaactcctatgccacattttttcctagaatctctcatctttattccctaaggtgctatattttatctgagttcttttcataatggcacagtcaacaacctccctgctagcatattctactaccatttttattaatgtgttgtccagtcattactttatctaactaaaagctatggacactattttataataataattattattattattatctgcataggacattggaataaaatatagttcattgcctttaggtggggccaaggagtgagagtctccctcagggtcaggtttgtttgtcattgatctcaaagagcctgtgggtcaactagcgtgagagaaaaatgtgctgtggtatggtcagaaagagcctcgaggttggcttctccacatatgtcatttgtcacatggtcttccatgccacacctccccccactgtggtagactgggattcctctgaaactgtgagcccaagtgagactttcttccattaaaaggattctgttgggcattttaatctcacaactgataccacaccttaatggcatctcgtgggcaacacctttaaaccaactcctgccgaccaatcccctggactgctttgatgcctctctggtgtctagagttgaattctctaatgagttctacctgaagttcccaccctcaccacaggcttctgtgacttaattatattagagacttgatttccttacacatgtagctgtgcccatgtgtttaactctgcagctcaggaggtaaagatctgtttccagacagttttgtttttgaagattgcataacttaaggcaaatatgctttgaatgacattgcataatgctttgttaagaattcgagagcgcagaggaccagagtagcacaggcctctgagcccagcacttggaaggagagcgcatgaggattggaggcgtgagcggctttgtctacgtagtgattttaggccattctggatggcatgaaaccccgcctccaaaaacaaccaaacacaaacaaacaagcaaacaattagacctctatacttcttagtccctcaaatgccctaaaaatatgtgcataaataaacaataacatggtttctcttttgctaggtttctttggacctatctgcatatctagatcttttatcaagttgcctcctcctttcatgacgtctgatttgctgcattctcctctaaaccatcttctctcatcagactattacagaatccgcttgactctcctcctcactcttggtcctttcctttctcaattcattctttagccatggaacagctagaaggacatgttagcagtatttcaactacatttctaaaaatatataaaatgcctaacgtaacatatacaaataaaattataaaaacccacgggttcctacaggtcaacaaaacaagtctacctccctagaaatgagatgtgaatttacatactaagatgatatttatgtcttttaaatcttttaaagatgtactcttaagctctttgctaggtgaagttcaagagggtgtatactttggagggcgattggttagcactgtagaacatagctttaaaatgggcttagcaaatccgtttcacgaacttttctcccacagtactagggcagtgtttgacaaacgtttgcacctaaaatgatgtttgttaaagctgtgtacagtgctgaaaggcagagaacagcctgacctaaagtattcgttaaataaacaatttgccatgtctagacaacagaattttatggagcaataaaatgacaaggcgaggctctttttcatttgtcctagaacagcacagtaaatatgtattcttaatgaagaaataactctcaaagctgtgtgtgtaatacaacctgtttttgtaatgaggagaatgtcagggtgacagggagaggggaatgtgcatagcacagtaaaaatcctggaaaaccgtgccggtggctgtggttgttgttggcttttgatagtaaagttatttaacatttgtattttatttaagacaaatatatgataagcatactatatatactctattgtatgttatctatcatctgtctatctatctatctagccatctatctatctatctatgacgaagcaccatgaccaaaggcagcttgcagaaggaagagtttgttgatgcttacagttccagggggtgactccatgaccattttggtgaggaacatggcatcaaacaggcaggcctgagagcttatatacttaagacaacagccatgaagcacacacagagagagggagggagagagagagggagagagagagagagggagggagagagagagagagagagacagagagagaggaaagagagagagtgctgactgggaaacattggcttttgaaacttcaaaacccacccacagtggtaaacctaccccaataaggccacacctcttaatctttccaaaacagttgcactcactggggaccaagtactcagatgtacaagtctatgggggccattctcattcaagtcaccagattccactctctggctcccatcggcttgcagctgtatcatgattgaaaatgcatttagtgcaatttcaaaagctcccatagtctttcactctttaaaaggccaaagtcttttctgagactcaaggcaatttcttaactctaagcccttgtaaaatcaaaaatacaaacgatatccttctaactcgctacctacagaatagaatacacatcactgttctgagagggagcaatgggcatagtgaggaagtactggatcaaagtgtgatcgaaacccagcagggggaattccaacttctgtagcttgtcatccaatgtcaatgggcttaggtggctccacccgtccagattttctgactgcaacaccatcctcccccctcttctctttaagcgaagacacccttttcttctccagggagtgtgggctgggactatatatgtattgttttcttccctttaaaaagcaaaagattatttattaaatatctttaatcttttttacagtccacttgttacctgtcttcccctaccccgtctaccctctgacagttcctcatcccattctccctccctcctgttttcaagaagatgtgtccaccccacccccagccttcctggcctcctcactccctggggcctccagtctcttgagggttaggtgcatcttctctgactgaacacagaccctgcagtcctctgctgtatatgtgttgggggcctcatatcagctgggtgtatgctgcctggttggtggctcaatatcttagagtgagactttagtaaactaaaggaagaaagtaaaaacagtatttttaaatgcagatggttaggtatgtgatagtatgtcatgggatattatttgtttaacctgctggtcatggaggctcagggctgtgatcccaacacagtaggcgaagacaggagcatcaccaatccaaggctatcctgggctagtgagaccctatctcaaaaaaaaaaaaaccctaaacccccaaaaaacaaaaggcaaagcagaagaacgccaacaacaaagatacggctctttacagtttatgactcttagtgaagaaggaaaaaaacctccacgtattattattattttaaataccctgttaattttacttagctnnnnnnnnnnnnnnnnnnnnnnnnnnnnnnnnnnnnnnnnnnnnnnnnnnnnnnnnnnnnnnnnnnnnnnnnnnnnnnnnnnnnnnnnnnnnnnnnnnnnnnnnnnnnnnnnnnnnnnnnnnnnnnnnnnnnnnnnnnnnnnnnnnnnnnnnnnnnnnnnnnnnnnnnnnnnnnnnnnnnnnnnnnnnnnnnnnnnnnnnnnnnnnnnnnnnnnnnnnnnnnnnnnnnnnnnnnnnnnnnnnnnnnnnnnnnnnnnnnnnccccactccccctacccacccattcccactttttggccctggcgttcccctgtactggggcatataaagtttgtgtgtccaatgggcctctctttccagtgatggccgactaggccatcttttgatacatatgcagctagagtcaagagctccggggtactggttagttcataatgttgttccacctatagggttgcagatctctttagctccttggatactttctctagctcctccattgggggccctgtgatccatccaatagctgactgtgagcatccacttacttacgtgtttgctaggccctggcctagtctcacaagagacagctatatcagggtcctttcagcaaacacttgctagtgtatgcaatggtgtcatcgtttggaggctaattatgggatggatccctgaatatggcagtctctagatggtccatccttttgtctcagctccaaactttgtctctgtaactccttccatgggtgattgtttccaattttaagaaggggcaaagtgtccacactttggtcttcatttttaaaaataatgaaaaaacaaaccaacgccctttcttcctgcacccactggttgtgttagatgggaactacctcttccatcttcccacagggccttctccttttgagttaacataagaaggtttcatggggcaacactagtcggccacttctactttccaaactatggaatttcagaaggaaacatgctttgtcgatggagtgctgttggctctttaactctcgagagggcttgcgtgcctcctggaggattagccaacgctgagcgtgactgtgtagatgtctccagttatctgaccaagcttgctcataagtaggttatggaatttgcagtagcgactcctagaaacatctgggatgtgttatagtcaggattgagccaggctggtttccaaagcctaatgtgtccacatgacagtttttttggttccgacccattgccatagacatatttcagacactcccatatccagccccacgcttctttgacttggaatttgacggatatatttaaatgttgagtgtattcttactgctgagtttataacacatttaaatgatccaagctacaggaagatcatttcctgttttgtaagtaagctcatttgctcttatctgtaattataggttacctatgctctattaagaaatcagcataaagctaaactgtttgtaatgaccttcctatgggacatgcctgtttttcagaataattttgaagacgaagatatggaaattaagaacaacgtaacgcagggagacaaactacgtgccttaaaaagccagaggcatccccgctcctcgccatcctgtgcatttaggtagcctcatctttaaacctttcagttcgtagagcacctccacttgtgggtaacattgtgtcctcttcacttcagaatgccattctacaaatcctgagtttacctgtgttttccgacacttggctcttttgctcccacccccagctgttgtgtgtctccccactgatgggagtaggcacgctttaaatgcttgtgaaaacagttgctacatctctgtctctggaattctgcctcgcgctgctgagcagttctttctgcttctctgttctaaattctatttggagtttcacacgaaggtttctgctactctggcgggttctccctgatgtgccggggttttgtatggaagccagagtgtgaagaaaagaaaggctgggccaagttttggtgttttccactacctgacttcaccttccgtttttgatgattgcctgagtgattcctccatgtgtctgagaaattataaaccatcttgcttttggagtttaaagttacccaaccaaatcagtgctggcagtggacatctgactatatggcaatcgaaaccctgtgatagttcacatagggttcaaaagaaaagcaatcttataagcacagagagggtgtattgggaccatggttctcaacccgagggtcgcgaccccttgggtgtctgatgtccctttctcaaggatcccatatcagatatcctggatatgtaagatatttacattgtgattcacaacagtagccaaattatggtaatggagtggctataaaaataattttatggttgaggtgaagagttaccacaacataaagaaatgtattaccaggtcacagcattaggaaggttgagcgtcattgtattgggagaaagtataatttagcaagtacctatgcaaagggaccagtccttcttgtacagatctcagaagccatgtttagatgtgaattttcttttgaattttctgatattccaaataggaggtagacttcagtttccaccataccgtcacggcattatcagcaaacccttctctactgagtcatctttttgtgtaaaagcaagatgctataagtaacactcatggcgaaacagtgcctgctggtgtcgggattcattctgtaaagtgggcgaacgcccatatccacctggcatggtttttctctttcgattgtttaacatctttatgtctctgacacaaatgccacatgtggtctttgtttaactgtggggacctggtgataactgagctcttgtcttctggttttgcaggtcagatgatatgaaaggacaccaaagggcaatggcccagactttcaggtactgtacacaattagccgctatcaatatatatgaccttttagacacactttccaagaaccagaaaataaatataacttcatgaaaataaatataactaccagctttctctctatatttattaatcttggtagttggactaaatcccagggctttgtatattctttatcactgagcacccctctcctagcttatagcatttcatatcctctttcttcctgattgttaaaatacacccccaccctaagaaaggatctttctgcatagctcttgctgtcctggaactcactatgtagaccagactggccttgaactcacagagatgagcctgcccctgactcccacatgccaattaaacgccccctcccagcttaaccattattttaagtttacttatttattttacttatgtgtgagagtgttttgcctgcaggtgtatatgtacatcttgtgtgtgtgcctggtgctcgctgaggtcagaggaaggcactggatcccttgaacccagagttacagacagttgtgagctttcatgtgggtgctgagagccagagctggatcctctacaggagcagcaagtgctcttaatcactgagcctactctccaaatcggaaataaactgcatttttaacgcttacttttgaaagggcatttcttgtgcttccctcaggctatgtgcgggagttaggacctctaggtcctgtgagcttccagcaccttctggtctctggtaaactccgaagagctctgcaactttcttttcaacccagagactgattctgatgtctttttatttgttagtgctctttactctatttttatttgttcatctctatgtagttgtttattattcacgagaagaggaaatattagtgctcttctcttgaaaaaaaaagttccttgatcctccaggactggtacctagacactggtattacctggatgcattgtggcacctgctgagaagacttaaagtgattggctagtattgttgataaaataggacaaaaagctgccattttcttctggaggagaaaattctaaccatagcgttgtttaatgggtcgctcttattggcccaggtttctccagagcctgagtcacttccctgtataaccttagcacttttactttaggggaagtcatggtataagcagagcttagggagagggatgatgaagaaaggcagacagaaagcatggtccagcttcagcacagggttttcctaggaccgaagatatttgatattaaatccgtgactgagccctggctctcttcagtgaagcctctttcccccgtgtgtccactgggaacctgatgatgccgcacctgcacctgccgcgcccctcagagtggagacgagagagtctttgctctcagaatttattgtgggttatggaagtaggcaaaaacgagatgaagtatacagtgtaggagctgtgatgtactgggagagtgcccattaagacgacttgctgatcctgcttggggattcaggagagactccttgggggaggtaacaaccaaatggtccattaaggtgcaggtgggaagcctgagatgggggtggagcagggtggggggagcaaggagagaagaggacaccctgcaggaggaaaaggataaacaaactgcacaaaggggggagtgcagtctagtcagggaacccacagctagactagcctgtctagtcaactttcctgcttgtttaacgggacaaaaacagtggatacagttgcacatatagatgatgagtggccttgctccccacctgaggtgaacagaccggggtgaaccaacaaaaatgaatagggaagcttgaggccaccgggcacttgactgtgtgggattaatcttggagctagtacgacccacacagagaagcaagtgccagattttagatttttgttgttgttgtttgttattttttttaataagctaagccaaggtttttgagctagattttgtagagatggaagagaggttaaatggtttgaagagtgaagtatcagatgttttagatttcatcagagggaatcattgtgaaagaaacaagaggatgaaaaataatggtggccatatatagggcaattgcaagctggaagggaaggaggggactgaatgggactttgtcattatttttttcatgtctttagggcattgagtgtttgtaatttactgtatcatagctgaatattttaggtagcacaactttagtgtgacactctgtccccttccctcccaccccccacaaagattaagttcctcaccgcaaccaactatgtcgaccatgaagacctccaaagtgtgtttgtccccttcagtgacagccaaaaaaataagccgaggttctttgtcttcaggagcaaatataagaaggtaattcttcttcctcttccagggcgctagcctgaggtaaggaaggtctactgcaggccaggaatctgactgcagatctgcgagcagagggtgctgggaagaactggagaacccccaagatccctatatttctgggtcttcttgtcctacttccctggcaggctgtagaggggttggttggatggtgacagtggcagtctcctggggactctccactttgttttatatgatgcagatgcagtcaaggacgctaatgatcaacagtcctgttccttacccagaatgcactgtgggaaccaactcagctggttaagatgcttgatgtcagcatatgctagaatatgtctgggttaagctaaatcttggacttgtcagtttgcagactctccctgtagttagctacccttcacttttggcagatacagtcctcaaatattctatttacgaccagtcagtgttcaagcctgtctcttgggtctttgttaactgcttttgaccaaggagcttggcatgtataaataaggccatgaatgttaatgtcaccaagagtgatgaagccgattagtcaactgtgtggatcagaactgtgattctgtgtttacagataggagtatgcattgttgtcttttttttccccttcccacctgtgttttaccctctccagcttctccataaattcccggctagccagttctctagggaacttgaacgccgggacagaagaacctgagaccaagaagaccacatcactcaccaaggccgctttcatagccagcccattcaccagcttcttgaatggcagcacccagacacctggcagaaactaccctgagctcaacaacaaccagtacaccagaagcagcaacagcaacagcagcagcagcagcagcggtcttgggggcaacctgaacagctctccagtcccccagagcgccaagcccgaggagcacaccaccatccttcgaccttccttcccggggtcactctcttcctcctcagtgagattcctgagccgttctatacctgtaagttcacagacaccacctctgggtcctcagaaccctgaatgcaacttctataccttgccttcccagccgaggctgccaccaaagaaatttaatagtgccaaggaaaccttctgatcgacaccttccctctgtgttgtgcaactgtccatgcgctacattctgctggctcctcttcaagtaaatgccgagtttcaactgggttttcttcctttctttctcccctccccctcccttctgctgtccctaaaagagagacagctttcatttcatagatcatggacactgtaggctttggttacttttcagttaagttctcaaaacatacttaatacgtgataccaggcagagcgtttgccttgcttggggtggtgttgagagtgatggcttccctagtcttcaaatcatggtctggattggggtaaacaaatgtgggaagtgctacaagaagattcttcccacagcagagcatcaagccttctgcagggagctgacccactcactattcatgacgttgaaaacgaaggtgttaataagagaaagtcagagagaggtgggtaggtccctagacttcaagggtatgagcaggtagtttctaggaagacatttaaaattagcctcctctcttctagagataagtgagaactgaaaaagaaaattcttttttgtcaaagagatctttacccggtcaacaggctccatctttactagccctgacggagtgaagatctattggtcaagtctccattacaagcttaaaattttgattgtgtcaagaggcactgaaatccatttcgtttgagagggaaaataggtgaactatctgtaatgtatcaaggaggcaggatgtgggcaggttggttgttctcttgcaggagcaagcctggctccctgggagggctgtgcctacattcgcccacactgctcttcagccagttgctcagccaaccatcaggacaagacagtgctcaacaggggcagtgagcggaggaagggaagtgcagagtttgtgcttgtggcccacttagcaaaatacagcgccatgattagtccgtgcagggatccagtctcctgagcctatatgagtgtgttccctaagaatgtagtatgtgtatgttcttgtgtgtgtgtgtttgtgtgtgtgtgtatttatgctatgtgtgtatgtttgtgtgtgtgtatctgtgtgcatgtgtgcatgtttgtttgtgtgtgtgtgtgtgtgtgagtgtgtgtgcatgagcatgtgtttgtgttttcatgtgtaggttctctggactcatttatattacaagcttcttttcaaaactgccttttctatagtccatatgcaatcctctccctaagagaaactctagcatatataatttttccttggatgattttatttctatgaaaaatttcaccattatttaaaactttaacatttatgtttatttcatatggacaggtgttttgcctatatgtatgtatctgtgcgccatgtgcacacatgtagtgcctgcagaggtcagaagaggacatctctagattctgtgataggccagggttccaatgagccgtctgcccattctttgacctgattctgatcagattctagtccctttatacacttggaggagatttgtatcataagtgtgggaatccgtgggactgggtggggtggaacagaggtaagggttcatgggtgggcgctagatgggaaagagcggtgtatttaaacgttctcagctgtgctgatgcatccatccggcacgttacagtgaattgagttcatctagtattttcatacgttgttttgtggatcagcctctttttttagaactgattatggatctttttatttccaggaaaagtgttatataaataatgatacaaacagctcgtggatcccactgccaaaggctcgtgccatcctcattgaaagtatgatgctagaagcgtcaggaaattgtcaagaaggtcttaccttctgggatccctgtttaggagggatacgtgggacccctattctcctgtgctaattagagccccctgagggcgggaagnnnnnnnnnnnnnnnnnnnnnnnnnnnnnnnnnnnnnnnnnnnnnnnnnnnnnnnnnnnnnnnnnnnnnnnnnnnnnnnnnnnnnnnnnnnnnnnnnnnnnnnnnnnnnnnnnnnnnnnnnnnnnnnnnnnnnnnnnnnnnnnnnnnnnnnnnnnnnnnnnnnnnnnnnnnnnnnnnnnnnnnnnnnnnnnnnnnnnnnnnnnnnnnnnnnnnnnnnnnnnnnnnnnnnnnnnnnnnnnnnnnnnnnnnnnnnnnnnnnnnnnnnnnnnnnnnnnnnnnnnnnnnnnnnnnnnnnnnnnnnnnnnnnnnnnnnnnnnnnnnnnnnnnnnnnnnnnnnnnnnnnnnnnnnnnnnnnnnnnnnnnnnnnnnnnnnnnnnnnnnnnnnnnnnnnnnnnnnnnnnnnnnnnnnnnnnnnnnnnnnnnnnnnnnnnnnnnnnnnnnncctcctccacctccttcttctcccactcctcctcctccacatccctctttttggccagaatagggtaaatttccagtaattaattataaaatgtgggggtggagttgccaactcgccccacttcttttgttattgtgctgcagaaaacaacatttatgactagacttggcagtatggctccctttcctctctttctccccgagaggaaagcagatccccgtgcagacccccaatcctaagcctcctgggacctcccgtgtggttgatgtgcgggcttaggttctcctgctgctgcctggctggcaggaaggttaaaggaccatggaggtccccacttcttgtggaagtaagtaggggtttgagtcctccttcacggcccatgaagctgctctgtgagactggccttttgctgctgaagatgaaggcagtgcaggagcccagaacaagcaagaccccagaacaagcaggactgactcgctcaacagaagtgttttaagggaagtaaaacatttgcttgtgtaaacacagggacctgagttcaaacccataggaccactgtaaaagctgaatgctgctacacacatctgtaatctcagtgctcctggggtgagatgggaggcagagacaggagaattccccaaagctggcaggcctatacatcccagtgacatgtggcaaaaagactacatcccaaaacacagtggaaagtgaggacagcacccaaggttgtcctctgactacacacacatacacacacacatacacacacacacacacacacacacacacacacatgaacacaccatgacaggaacatcccctcccatcacacacataacccccttggaacttcctaggtaagaaaacgaagtctgagtggtaataccctccctgtacctttaagagagacccaggaactcttggaggatggggggtggggaggagatgggtgtttagagggagtctaatattttaaaagctacaattagcatctcttttgaaagctgcaattgctcgttcactttttgctgcagctcagcccccagaaaaatgtaaaaatgatttccttgttctgtcattaaccactctaacatgggaaacaggaataaatgttaaggagccctcgcggctgtggcagagtgctaagcaatagtcagatgttattttcattatcttggcctgttgggttagccttgtctccactgtccagagccagagcacggggttgcactttgggtgacccccccacccccaccccttactgtagaaaccaatttgcttcctgacggagaagttctcaagtgcttgaggaacgggggacatgtgatgagggtgtgggtggggtgggaagtgttttattaagttgaaactgcttgtggtaactgtcttgaatatttgctatgttatatttttaatgacatttttgctgaactgctagtcatcaccctgtccttatctgacccctaagtctttgtcgggggcccgatgattcccctgaaagcttttctgtatcccactttggtttttgttatagcacctctcaggaccatggatttcattgtccggtaggctctaagcactgtgggagcagagatgttaccttcattgccatggttacaagcctggatgctgttagannnnnnnnnnnnnnnnnnnnnnnnnnnnnnnnnnnnnnnnnnnnnnnnnnnnnnnnnnnnnnnnnnnnnnnnnnnnnnnnnnnnnnnnnnnnnnnnnncaaggggctaagagattaacgcttttgcccaagattttcctacaaacaaataacagaatcatatttggaacctagggcagtgtgaatcccaaagacatagtattttgaaggctttatgttgcatatgtactgttacagcagttacaaaaatagatgtaaatgataaatatttaaacaatctctctctttcccctccctccctccttccctccctcctcatcccccatgggggtagaaagttgtgaggacaggttaatgtcttcgtcatttgggttttgtgggatgaataggagcctgcaagcggtcctagtgaaggccagaggttggtgactggctgttttacacaggggaaaaagtttaagcacagagatgctttagtgctgtggctgagttctcaggttttgaaagcaagctgacctggcttcaatttctgtctctgactcttccttttatggaggtatttggcaacttatttaacttttttgagcctcagggaaataatgtaattataatggtcaggagcaaatcaaattttcttgtttgcgtgaagcttacacagtattacaggaatatttaagctacagaaatatggccgtggctttgaaaatgactggagatttacagagtgttggtgttgaggtcatgatgtccattgtcctagaacagttatagtgttcggttgacaaaaatcatatggagtactgtgcaagtgcttaccaacagtgcttggtagctgtcagctattatggctattaatagctgtgagtattcccaggacagccgaaggcccgcgtggccaaagagcagcctgagaggttacgctgaagccaaactagggaagagaaggagccagagggctttatagcaagaggacccagaggggatggtgatttggttggaaaaatattttttaataataattctttttattattaattatttttatttgtttacatttctatattgtccccccttttgagaataaactatttacttttctcctgtgaaataatcataactgcatcgctggctggcttggaactctttatgtagataaggctagcctggaactcgtttgtctctgcctcctgagtgcctggactcatggcatgtgccaccatgtcagataaatgattaaccttttagtgcacaaaataatgggtgttgctgtgacattttgtgtgtctgttgtgctttgctcatattcataccctgaacatcctcctctgtaccccttcctccctcttccctccttcctcttccctcctccctcttccctcattcctcccactgctcctcttcctcctttcaagtagttcctctgctctcatggtgtgtgtgttgtgtgtgtgtgttgtatgtgtgtgtatggtgtgtggtatgtatatatgttgtatatgtgttaa

SEQ ID NO: 698 - DNA, 2323 bp, Mus musculus
gagggaggaagagttgctgctgaaaggaggtggcgaaggaggagtctgagcagctgctactagccccgcggacacctccggagtcctgcccgctgccgcacgagtggccacgggcgcgatccgggccaaacgtcttgtcctccatgatcactttgggagccggggaaagactttgcccggccttgggagctggtgtgcgccgtccaggtttggtggagacggtgcagcgcgagaaggaggagctgcagctcgagaagcagcagcagccgccgccgccgcagagtccggatcacagcggttacagcccggggcgtgtgcgtcccgcgcccagcgggttcggttccccacggaatgtccccggggcgccccacgcgctgaccctgcagctgcctccgccttgggcgactgcctcctccctcaggcaggctcggtgattgggaccgcgagctcccagctcttgggcagtggggaagcccccgggggcgggtgacctcagctggccacgacccagccctcccccgtgcggatctcgcttaagatggcagcggagtctggggaactaatcggggcttgcgagttcatgaaagatcgattatattttgctactttaaggaatagaccaaaaagcacaataaatatccactatttctccatcgacgaggagctggtctatgaaaatttctatgcagattttggacctctgaacttggcaatggtgtacagatactgctgtaagctaaacaagaaactaaaagtcatctacttaaagaagacaccagaagaagcgtacagagctctcctgtctggctcaaaccctccttatcttccattcagggatgcatcttttggaaactgcacttacaacctcaccgtccttgactgtttacaaggaatcagaaagggattacagcatgggttttttgactttgagacgtttgatgcggaagaatatgaacattatgagcgagttgaaaacggagacttcaactggatcgttccaggaaagtttttagcgttcagtggaccgcatcctaaaagcaagattgagaatggttaccctctccacgctcccgaagcctactttccatacttcaaaaagaacaacgtgaccacgatcgtgagattgaacaaaaagatctacgaggcgaagcgcttcacagacgctggcttcgagcactatgacctgttcttcatagacggcagcacccccagcgataacatcgtgcggagattcctgaacatctgtgagaacaccgagggggccatcgcggtccactgcaaagctggtctgggaagaaccgggacattgatagcctgttatgtcatgaaacactacaggtttacacatgctgaaatcattgcttggatcagaatttgccgaccaggctccatcatcggaccccagcagcacttcctgaaagaaaaacaagcatcattgtgggtccaaggagacatttttagatccaaactaaaaaatagaccatccagtgagggaagtattacaaaaattatttctaccctggatgatatgtctattggtgcaaatttatccaaattacaaagcacagaaaggattgggagagacgaagatatggaaattaagaacaacgtaacgcagggagacaaactacgtgccttaaaaagccagaggcatccccgctcctcgccatcctgtgcatttagtgtgacactctgtccccttccctcccaccccccacaaagattaagttcctcaccgcaaccaactatgtcgaccatgaagacctccaaagtgtgtttgtccccttcagtgacagccaaaaaaataagccgaggttctttgtcttcaggagcaaatataagaagcttctccataaattcccggctagccagttctctagggaacttgaacgccgggacagaagaacctgagaccaagaagaccacatcactcaccaaggccgctttcatagccagcccattcaccagcttcttgaatggcagcacccagacacctggcagaaactaccctgagctcaacaacaaccagtacaccagaagcagcaacagcaacagcagcagcagcagcagcggtcttgggggcaacctgaacagctctccagtcccccagagcgccaagcccgaggagcacaccaccatccttcgaccttccttcccggggtcactctcttcctcctcagtgagattcctgagccgttctatacctgtaagttcacagacaccacctctgggtcctcagaaccctgaatgcaacttctataccttgccttcccagccgaggctgccaccaaagaaatttaatagtgccaaggaaaccttctga

SEQ ID NO: 699 - protein, 592 aa, Mus musculus
MAAESGELIGACEFMKDRLYFATLRNRPKSTINIHYFSIDEELVYENFYADFGPLNLAMVYRYCCKLNKKLKVIYLKKTPEEAYRALLSGSNPPYLPFRDASFGNCTYNLTVLDCLQGIRKGLQHGFFDFETFDAEEYEHYERVENGDFNWIVPGKFLAFSGPHPKSKIENGYPLHAPEAYFPYFKKNNVTTIVRLNKKIYEAKRFTDAGFEHYDLFFIDGSTPSDNIVRRFLNICENTEGAIAVHCKAGLGRTGTLIACYVMKHYRFTHAEIIAWIRICRPGSIIGPQQHFLKEKQASLWVQGDIFRSKLKNRPSSEGSITKIISTLDDMSIGANLSKLQSTERIGRDEDMEIKNNVTQGDKLRALKSQRHPRSSPSCAFSVTLCPLPSHPPQRLSSSPQPTMSTMKTSKVCLSPSVTAKKISRGSLSSGANIRSFSINSRLASSLGNLNAGTEEPETKKTTSLTKAAFIDFTSFLNGSTQTPGRNYPELNNNQYTRSSNSNSSSSSSGLGGNLNSSPVPQSAKPEEHTTILRPSFPGSLSSSSVRFLSRSIPVSSQTPPLGPQNPECNFYTLPSQPRLPPKKFNSAKETF

SEQ ID NO: 700 - DNA, 187913 bp, Homo sapiens
aagttctgaccaggaacagttaaagtgataggaaagaattagcttggaaaatcagcggtcttcttgtcaaattttatgtgtgtgtgtgtcttcctgccagcaagcgggtaatatttggttaatgatgctccatgaactaaagtcactttcagagaaatgctttaaatggcagtgatgagctaaagtccatcaggaaaacctgactaagcaaactgtcccagagcaccaggaaaggcaccatgatacatagacagatagagcttgttagataagaattatatctccacactggtgaatggtttttcacttaagaggagatgagcaaggctgggattggctgcccctgtggggacccagggcacatgtcatgtagtgctggtctgattttttttctttttattccatataccttaaggaccattaacttgccctctacaatgtaaaataatcaaatcattcacattaatttattatttctaaaagtttttaaagaaggtttttagaaatcaagttcttacatatgccaaattacttttgttagttaattataatatatttttaaagtgtaattctttttctttttttttttctttcgagacggagtttcactcttgttgcccaggctggagtgcaatggcgcagtcttggctcactgcaacctctgcctcctgggttcaagtgattctcctgcctcagcctccctagtagctgggattacaggtgcctgtcatcacgcccggctaatttttgtatttttagtagggacagtgtttcgccattttggccaggctggtctccaactcctgacatcaggtgatccacctgccttggcctcccaaagtgctgggattacaggcatgagccaccatgcccggcctaaagtgtaattcttatatattctattttttacatttgcttagggtccttttactcaaaatagttacaatttagaagttatctatattatcttatctacatttatcaccaacacaggcaaattaaatttcaggaatctaagacaattcttcccattaagtacttaatcatgttctgcaaaaaccaggcaagttgtattttgtctttttaatggtgagaggtaaaaagaaagaatgaaacatgctattgtgggcgtttgtctacattcccattataattctgattttggggggattcatggagtaaagtccaatctatttacaattagttaaacaattttgcagactctttctgtcaatttttaaaatcccagcctggggattttaggcttttcctcattaatgtacagttgacccttgaacaacattgatttgaactgcacaggttcacttgcacatgtattattttcagtaaatataggaaaatctttggagatttgtgataatttggaaaaatcttgcttttcctctcgcctactttatcataagaatacaacatatatataacatatagcatacaaaatctgtgttaatcacctgtttatgttatggacaaggcttctggtaaaaagtaggctgttaacttttagttgtatgtggatatgcaactgtgctcccaacccctgtgttgtttaagggtcaactgtatttcattttggtgccccattgccctctggataaagtccaaatttttggactaacttaccaagatctttcttcctcttctcttttatactctgggctggagccaaatggagctgcttcaaatcctgaactggcctttctctctactgtttcctggcctatgtatagactgttccctccgcctggggttctcttgtgtgtcttcctccttccacgtaccctcccgccttgctctctctactatttggctacctccccctagctaactcctattcaaccttcaagtctatacaaggattctgcagggaaccctttcctcatgcctcaggtctgatgcagcccacacagccctctgctctgtgcttacttcagcctagcatgtatcttgcttatggaacctgattgctcatccataaccctttctagaatgtaacttccttaagaatagaactctgccttattctcagttgcaatcctagcacctagcacagagccagacaaatagtagatagtaaatttttactgaatgaatgaatacacaaatataaagaaaatgtatatttgatattatggaaataaaacataggtatgaagagaaatattttacctaaaatacatatattttagggtaagtagacattatttttgtgtgttacattattcatatcactgttatcctacattaagaaatacaggtatattactttagatatcatttgaagaaaacatagactccatgtaggaaggcttggtatgtggaagatatgaagtgtgattttttttctcccatgggaatcaatacaattattgatgttaataacaacaagaacaaccattaataatatgttcaatacatatgtagtatttttggttggaaaaatggaaaccaaaggtctcctgtttattgaaattataattttcttctagagtttctacacaggactaggcatcagaaaacatatgttccaaaagtgtgtcaagggtcaccatggaaaccacagggcacaacatttgtgtcccaggcttctggaacactaaggaccgaaagaacgtgagtgagagcaggggaatttaggaatccattgaggatgcctgaatggggttgttggccctgatcacactctagagacaggcatatcatcacaggcaatcagaaatgaagaaggacattaacttgtaccctgtggaattgtcttcagttgataaaaaggacttctctgtgagtgtatattttaattatgctgttagctaggagtcaattaaattacaatacctagatccaaatagtcgtattcatttgagacttgtgaaaattagattttggaaacaagttagtagttcttaatctatgcttaatattaataatatttgtatttattaatataaatgctaggctgtatttgtacagcatcacatttgtacacagtgtctagcatctcagcatgacactctcatttaattttactgttattcttgtgagttagaaattattataatttctatttaatatcagaagaaacagagtccaaaataatgcatacagttggtgggagagagatacctgaaaaccaggcttctgattacaaatccagcattttttccactactccaggctacaaagtaactgatttatgaatccagatgattcacatgagttcatctcctcacattttaattactcatttatttatacattctccaaatacatactgagcatgtattttgtgtgtttcctcatttataaaatggaaataataatatacctacctgataggcaaccaatgtaagaactgagatgtaaattgctgtgcttggttttaaatgaaaccgaactattaactactattattttcctgctagaaatatgtagagtagaaacattattaaatgtgcacatggaagtgaacattcaaaactttagattacggctgggggtggtggctcacgcctgtaatcccagcacttagggaggccgaggtgggcagatcatgaggtcaggagttagagaccagcctggccaacatagtgaaaccctgtctctactaaaaatacaaaaattcactgggtgtgggggtgggcacctgtaatcccagctactcaggaggctgaggcaggagaattgcttgagcccaggaggcagaggttgcagtgagctgagattgtgccactgtacttccagcctgggtgacagagcaagactccatctcaaaaacaaaacaaaacaaaacaaaacaaaaaaaacctttagattacaatgtgtagctcactaatatttctcagcatggctatggtggtgatggctggagaagagtggtgtggggaatattatctatttttggagtaaaaatgttcacttattttttctgtaaaaagagtatgaatggcgtgggtgcggtggctcccacctgcaatctcagcactttgggaggtcgaggcaggagaaactggctctagcccagaacctcaagaccagcctgggcatcatagtgggaccctgtctctacaaaaaattaaacaattagccaaatgcagtggctcatgtctgtagtctcagctactctggagcctgagatgggggaatcattcaagcttaggaggttgaggttgcagtgacctgtgatagtgtcactacactccagcttgggtgacacagcgagactctgtctcaaaaaaaaaaaaaaaaaagtagtaatgacaaataaatatagatggataaattctgtaaaatttaaaaaatgtattgagttgttaacttgtttgttaagtatagcaaactggacaataaattgactactctgaagtatattgacctcatggaactttcttttaccttctaaaactgcaccattctttattgactgcattagtcaagaaggagatgaatattgaattgacttgttttacttaatgttcactataccagtatttcttaaactgtattttgtagaatgctggtataccattccattaataaatcacagggttagaaacaattgaaatttttatagaagccacacaaaaacaatagcaatggcagataatgcaacatcttatattgtttcattcggagattatttcaatatttcctctaaatatcttgaagaaaatagttctagatattatgcatacattattattgacactttatggctaatgtgtaataatctataagttaaacaatgtaatttaagctcactagggaaaaattaagaaaaggttgttgatactacagcaaataatgaatactggtcttatttccaccagctatgtgagtttgggaaatcagttacctccttctctttttttctcttttattttgccatataaccttttataaaggaactattgtgtagaagccttgagtgctcatccactgccttccactcctacccccatattgggcctgtgctaaatcccttgagtttgatggagtctgtttgaaaactggaactagctgatctcccaggtcccttctggtttttacttctttgattctggtttggaattcttaaacaggcattggtgatttgtctgatacagaatgtggctgggttaggctaaggtcttatcatttgcgggcagacttctggaacagaaccgtttatgagtcatgctatctatttttggtattctggttctactgtaataacttttttattacatgtattttactaaaagctgcttaaaattatttttgggatcaaaaattgtcaaaatatgtatatgaataaataattcaaattaccttgaatttcaaattactcagtggcacaggtttttactacgtttcatacttaatctgaaaattaatttacagaaagaattcaaagtatgtattctatattttctttacgttctttggtaactttgtatcactactgaacaaacaactaaaagagtatgttctaatgatacattctaataagaaatgatgataattttaaaataatacaatatgtaaaccacacagctgtcaggcctttgacaatcttgagctcatttttccttgccctcttccagcaagaaagaatattttccgccaggtgcagtggttcatgcctgtaatcccagcactttgggagggcgaggtgggcggatcacgaggtcaagagatcgagaccatcctggccaatatggcaaaaccccgtctctactaaaaatacaaaaattagttgggcatggtggtgcacgcctgtagtcccagctacttgggaggctgaggcaggcaaattgcttgaacccgggaggcagaggttgcagtgagccaagattgtgccactgcactccagcctgggcaacagagcaagactccatttcaaaaaaaaaaaaaaaaaaaagaatattttccttttcttgaagctaaatgataaaatttaattcttttgtttttcatttcttttgctcacatctgaatcttccatccattcttttttctttcagaactgcttacaccagtttaaatgataaaatttaattcttttatgtttttcatttcttttgctctcatctgaatcttccatccattcttttttctttttttagaactggccacaccagtttatcactagtctgcatccagttctgggacccacttagtaagcaattggacaaatgggcagagactggactggaaagtgaggggcttgaagccatgtaatataagacaatgtagaagaaaatggagatatttatctggggaagactaaggagaaatggaaggtgttcaaggaaactgcctttgcatttttgaagagctgtcatgagtaagggtgatcataggtcctgcagcctccaggcagaattagaactagtggcttttgacataatttagagctgcctccagcagtgagttttctagaactgcaggtgcacaagcacgggttgcagggtagttgaagcagttttcaagcaatggttgaggagttagatttaaattttgtcattttcagggcgagtgcagtggctcatatctgtaattccagcactttgggatcctgaggcgggcggattacttgaggtcagcagtttgagaccagcctggccaacatagtgaaatcctgtctctaccaaaaatatgaaaattaaccggcgtggtggcgcacatgcctgtagtcccagctactctggaggctgtggcagtagaatcgcttgaacccgggaggtggaggttgcaatgagcccagatggtgccactgcactccagcctgggctacagagcaagactccgtctagagaaaaaaaaaaaaggcgttgttttcaaactcgacactttttacacttacctgctgaatttctgtgtgtaatattaccttccttttgtgcagttgagcgatatgtaaactctcttagtatttcctttatatgtgaaacgcctttattgtttcttaaaagtccattccttaagtttatatcaagtttcgtggttggaaaattttcttccattatcttcccttgtagactgtaaaagtatgcctttattatgaaactacaaccaacaggaactttgacctcaggataactgagagaataaagtgtttttatgatctcattagaaccttggtatgtattatacgtgtgctgtgtgtgcattatctagttcatatttttcttgtagaattttctataccatttagaatggcttagagagatttgattatactgacacttccttccatgcaattttgttgttgtttgtttgagacagggtctcactctgtcacccagagacactgcactgctggagtgcagtggcataatcacgtaatcacagctcactgaaacctctgcctcccggttcaagccattctcccgcctcggcctcatgagtagctgggattgcaggtgcccgccaccacatctggctaatttttttttgagacggggtctttctctgtcgcccaggctggagtgccgtggcactatctcggctcactgcaacctcccgagtagctgggattacaggcgtgtgccaccacacccggctaagttttgtatttttttttttttgaaacatagttttgctcgtcacccaggctgtagcacaatgatgcgatcttggctcactgcaacctccgcctcccaggttcaagccattcttctgcctcagcctccctagtagctgggattacaggtgtgtgccaccattcctggctaatttttttgtattattagtagagttgggggtttcaccatgttggccaggctggtctcgaactcctgccctcaggtgatccacctgcctcggcctccccaagtgctgggattacaggcatgagccaccgcgcccagacaagttttgtatttttttaagtagaggcaaggtttcgccatgttggccaggatggtcttgaactcctgacctcaggtgatccgcaggccttggcctcccaaagtgctgtaattacaggtgtgagccaccatgaccagccccatgcaatattttaaaaaacattaattacttacagagttttattatctttgtaaaaatgctaaggaaaaataaacattttcatttgaatttaaggacttgtatttgttaggtcataattcattcctcatgatcacaattttaagcaggagagttatataaaagatttttgtaaattcattttggaaaataacaagaaggtgttcaactatatctggcttctctgaaagtgtagattggagttcattagactatttactttgtgcaattaaaagtttatgaactgaatgagaactctgacttctatttctaacgcactttttaatgaaaaattgttggggaatttgaatttagattatgcaagaattttaaatcagcatcttcggaaatacaacaacatctttggatttatttagccttttaaacaaagtgggcaagtttatcgagagattcatatactttgtttttccctatctttcatataagaaatactagattttttttcaataaaataatttgaggcctggcgcggtggctcagcctgtaatcccagcgctgtggcaggccaaggcagggcggattgcttgtgctcaggaactggagacgagcctggccaacatggcaaaacccggtctctacaaaaaatacaaaaattagccgggtgtggtggcgcacgcctgtagatccaactatttgggagaatgaggcacgagaatcgcttgtactcgggaggtggagattgcagtgagcagagattgagccaccgcactccggcctgggtgacagagcgagaccctgtctaaaacaaaacacacattaaaaaaaaaaaaaccacaaacaaaacctgcaattggccctcgaagggctggttccctcagtcagctctgcacgggtgcgccccctttctccctagaggtcaacaagcgactgcgaaggaaaacgccgccacaagtttcttgctgtttctggagagacctctcagagcgcatgctcttcggatagtcggtctgtagcgccattttcgtatggaagggactgcactctgattaggtacagccttaggacgcccagcgttcaagttgttcaaacagtacgtagagcctcgcagagacaagtcaatggcctcttttagcgggactcctgcctggagcgcttcagctgagactatgtaaagaaattcctttgtgttaaccttcctccttggaccagtggactctcctctctctcctgttccctccgcgcccgcccaggctggctcagcggtctcgccccgcccctccgggaccggagcactgtaaagattaggcatctgtgatgcttttgcgctcacattggcggcccagatgagagggcgtggagaaccagatgggaaactttttgtcccgtgagaacaaagtacaagttatatcagagtctggtatgtgtagaggaaaccaatacatgtactgtgagctaggagctggtgcttctttttcaattgtattttttataaagatgcagaccccctcagtgttgggcgtggggggtggctgaaatgttagctagaggcgaggcagggcacggagatctgaggtttttacgagtgtgtgtgtgtgtgtgtgtgtgtgtgtgtgcgcgcgcgcgcgccctacaagagtttagaagagcatgggtgagtgggcgagaaagaaagagaatgagagagagagagaaaagaaatctggagtgggacaagacttagagggtgcagaaaagaaagggggcgccagcacatcctagcctccgaggccgcgacagcgcctttggcgatgtccactctcaaccccgccgtttcattcataagtttctggcctacaggccccgcccgctcccctgggccgagggccccgtttcctgaacagcaattggtggacggcaacaaagccttagcaaccggctcctagtgacccgcggggcgcctggtaactggggctgctgcggagaaaggagcggggctgtccctttaagggatggccgcggagtcgtgaaagtggagggggctgagggagggcggggaggaaggtctgggggcggacccagggggaggaggaggaggaagagtaactgctgaaaggaggtggcgaaggaggatccggagcagctgctgccagcccgcgggcactgaagtcctcccggctgccgctcgagtagccacgggcgcgatcgggaccagaagtctcctcctccatgatcactttggaagccgggggaagactttgccctgccctgagagctggtctgcgtttcccaggcgcggcggcggcggagcagcagctgcagcagccgagtccaaataggagcggccacagccaggggcgtgagcgccccgcgcggagcgagctcgggttcccctcggaatgtccccggggcgcccggcgcgctgaccccgaagccgcctccgccttcggcgcctgctgcctccctcggccaggcttgttgttcgggactgtgagcttcctggctcctgggcagtggggaagcccccgggggcgagtgacctcagctggccacgacccagccctcccccgtgcgtatctcgcttaagatggcagcggagtcaggggaactaatcggggcttgtgagttcatgaaaggtgaggagcagccgccccgcatcttccaacgctttcttgcccccaactcttcacttcccgcgccactgtccccaccttctcctgaggctgccagtgtcctgcagccgctgcgcgcgctctcgtcccctctagggactctcctttctccgaggaccccctgcttccggcttctctttcttgtgtcccttgctccctctgcagctccctcggatggcctctcggcctcgtaatgggacagcaccggcttctgcccgtactccggcactcagcagctcatggggagcctgctccggatgctcaccggtcacctttactccaccatcgcaggcttcggttttcgggacacccccaaccacaccccccaagtctctctcccttcctctttttcaaatctccgaagctgcgtcgggaggctcacctctttcttccccttctcgcagctgctgaggtctggagatttgggaaccaaacttgcacctccagttctgcgggtacccccagctcctgcctactctgctggcctgaaacaagggaaatgtgggtgctctgagccccgctgagttcctcggtcaggtcctcctcttgcctaactgttgtgctcttgagtctctagctttctgggagggatgaggtttctgcaagaattccacgtgttaatggggtctttaaattgtgatccttcgtatgttaccacccaccttcacttccacttctctacttctcatatgttttttctgtcttttaaacttgtctttcagatcggttatattttgctactttaaggaatagaccaaaaagcacagtaaatacccactatttctccatcgatgaggagctggtctatgaaaagtaagtttatgttttgtttttttttctcttggccattcagcttgttctttgacgaggaaacactatgcacttttatggcagttttattcatttcccccccaatgatacgagtaacaatatcaattttttaagactcaggtgcctggggagaagttcagagaaaattgacagaatttgaacctttcaacacttcagttcttttagacatctatctgttttagttcttcctaccaccacaacaaacagcaactggagattcctaacattccccagagtaggaccagggagacacactgtcattgccagactcagtaattggcctgtgaatcagtcactaagtatttatggagtggccatagggtacagggcagtgcatgtattacaggtgcttgagctttatagtttacaagacttctgttctatctcaggatgtttttgtttgtgcagctctttttcagaaagtgggacacattaactgcggggagctgtatcagagtcacatttatgactaacattttatctgacatattattgattcttttatttgggtaccccaaactttttgatattattttctttgcttctaaggaaatgatatagcagtgctgatttattttctttgattactttgcttctgtgggattaggatttgagagtgtaaaataaaagtagggaactgttttctgtgaaagaccactgatctacaggaaaaagatatcttaatacttcaggcatagtaaaacattaattgaagagagataaatctttattcagtaaaagtatcagataataagaaataagaaggctgaattgacttggttatgtacttttatgaaaagagctggtgtttcagaggagtctaatatattctattttaaacgtttaaattacttgttatctttaccaaatgtgcagataaatgaacatagttaaattaatcataattagcttccttggacttgtcttgttagaaaggttattggcagttctgcctaaggatttgtgggtactaccaggtcttcgaagagtaagtgttctggaccttcaagagcatatcttttatttgggggaaaacaatctttgtcacttcatcatagaggttcttgaaactgaggtctgcgacatttctcttagtggtgctgggaggagaatgcttcttgaatggctaaagtaagagtgggaatgaaagagccctttgctgctgctcatgaatgcccagagttgctgaggcaaagaggtctgagtccctggtgtcagattacagctctgcttctagacaggatggagttatgtgcggctgtgtacctggatgatgtcactgccagcagtgtttattgagtgttcactctgttgttgggaatgtgcattgttgtgcctctgtttttgtgattttaggttttgggggtctctcatgagtctgagagtggggatggtgtatatatcattatgttcaattctacagtacagtggttgttaatatgtcattgaatgagctctagccatggagatctgagtcacttctcttgggattgctaggtggtagatctagcagaaaattaagccaaactaaacactgtgcatgatggctttttgattttaatattgatagatgagggaaatttttaatgtgattttcatgttggtattttgggataggcctacaaatcatattcctcttatagtctactgtttttctggtatcttataaggaaagacttgctggagaaaccatccaatttatattgtgagttgggattgacatttgaaatacgatgaggacttcagcctgggcagagtgtgtacttttcttagtttgaacttaccctactgtgccacagtaatggctgtggctctgacacctccaactccatcttttttgttaccccaacatattacatggtgctaggtgatgcagagaataaaacaatgttgaatgcatatgttaccttcaaagagctccaagcctgtagggaaaataacagaactgcagtttgaggtataggaaagatacctgcccaaagagaaatacaacctctatgctaggagaggcattcacaggcaggtaggggcacatctggtggaagggttcagcaaaggcttcgtggaagagttaagattggcttgaaggatggacaaggtcttatcaggcagagacatgagaggagggatcttggaaaacagcaagtgtgaggaggggagaggcttgggacgtgtgttcagggaacagtaagtcctccagtttgcctggtgtgtattcagggaacatgtaggggatggagaatgtgaaattgagatgttggctggggacagaatgaatgtcagggtgagaaacctgcagtttctttggtacaccatgggactcttgagggatttggggcagccatggtatgacttgatttgtgctaattacaaacaatgggaaacatttattgagcatttaaatgtgtgccagatgctgttctaggtgctctataactattaattcattgtgttttcacaacaattctgtgagacaggcactattatccttattgtacaaaaaggcatagagaagctgggtcacttgcccaaggtcacagaagtaaaagtagcagagctggagtttgaaaccaagtcatctagttgcagaggacatatatccttctcaaaaaattaatacagtagcatcatttaagaggggttgttaaggagataagagcccacttaaaaaaattcaggggggaccaggcatagtggctcacgcctgtaatcacagcactttgggaggccgaggcaggtggatcacgaggccaggagttcaagaccagcctggccaacatgttgaaaccccgtctctactaaaaatacaaaaattagctgggcatggtggcgtgttcctataatcccagctacttgggaggctgaggcaggagaattgcttgaaccaggacctggtaggtggaggttgcagtgagctgagattgcgccactgcactctagcctgggctacagagcaagactctgtctaaaaaaaaaaaaaaaaaaaaaaaaattcaggggaaagaaacaagtacctggattaggatggtgacaatggtgatggaaagaagcgatctgaagccatgtgacctggcaacacaggagggtggcgtggaggggtgctgaggaaaaagagggatcaaagaagtccttaagacagcttaggttgtggtgagcctactggagctcttaactgaaataaggaaggagggtggaataattggctttggtgggaagatcaggcattccattttggccagattgaatttaagaaatttaagggatatttacatcactgttagatatcacatacatttgaggttcttaaatttgggaattttcccaaagagactaataaagctgtgagaatgatgcgatttctgggaagatagagaaggtctcaaggtctgtatttcacaagtagaaccaggatgggaggagcaagggaaggtggaagtacgcaacaaagaggtggacaaacactgaaggggaaaggagaaagggagaaggactgactccatctcgtcagctccactttggggaagtatagaatgagagagactgcaaagcccctagaaggatgtctagtaacccgggctctgtctggaggacgtcctacagcgagaaagattttgactatcacatcataatgtgcatgtctctgaggagaagaatatatttatattcattatcacacaggcctttgtactgtgtaattatttgctgaatgtttaaattaaatgctgcttttccagctgggtgtgcttgtagtcccagctactcttgaggctgaggcgacaggattgcttgaggcctgcagttgaactgaaaagccagcctgccagcctgagcaacatagtgagaccccatctcttaaaaaaaaaaaaaaaagaaagaaatgctgcttttctggctaaattatcaccttagaagcgattgtttttgaatcaggaagtagactctttaaatattaggctgtggatattctggccacagctgtgttttgcgcagatgtttctttagttatgaaaggaggacagcattccatgattgaaatgtcaaccttctgagatgctggtggagaaaatttaatgaggtggcctcatgaggtaaggctattaaaagtgaacgtttgaattatctgcttgattttttaaaacagaacttattactataaaggcctgggcagctttaataaaatgaggatgataagaaatcatcctttgtccttgggttatgatttcacaggtcagagttaaaatcaaagtataggctaacacactagtggtacaaaaatagctccacaaaaagggagcctttcaaagaagatttatctgcatttgattaagctacaaataacacaccactccctggaaaggcttgttctttggtattggaattgggccccgtaatccaaacaggcgcttacttttaataacttggcttacttttgtgtggctaaaaagttagtgaaatgaaatatattacttgttatgacatctgtgtgcccctcctagtggtggtcatgggtgtagggttggatgttcatggcatagaaagccagtttgctgggaaggatagtgtatagggtcttcattttcagcctgtccattgtcatttcttctctttttgagttgtgaagaaaggtattgaaagtgcaggaaagagctctttagggagaaactctagggactgaattttaagcagtttctgaagtgacttgaagaatttcaccaaatgttttagcatgttaagaatgagcagcctctaatgagaactaattagctaaatggaagatttaaataatttaaaacattcaattttcatttaaacttaattaaagcagcctgatattaatgcatccaggaagttttggataagtaatttatagaaaaatgatttcttttatcttgtctatagcatagttttgagtcaaaatgtgaacatagaatatttatgagagaagcatggaaaaactactcttgcctagaaatatttgtgggaatgcatatttaggttagaggtaggtcaggagaaacccttttggtttttaaatttttatttcaaattaaatgtatagcaagtaggataatttaatggaaggttgaatgccacttaagcatatacacacatacacatatatatgatctgatagagccttacggtcatcatttagaacctcaattctcattataaattgctatgatatagacagaagaggagatttggttgaacctcgagacaaatttcattgtgggaataataataaagccatagcaacaacaacagcagcagcagcagcagctaacatgtatagccctgtgccaggcagtgttctaagtggtttacacgcacacattaactcaattaatcctcagaacaagcctaggagttagatgctgttattatcactacttaacaaaggaggaagtagaggtccagagagggaagtatattgcctaaggtcactgagctggtaaggcagagcagggatgcaagccagaggcagtccaccctggagtccaggcatttcccagttggcctgagactgatgccaatggggagggtatgggacaactttgccccttcctgacagacttgatccctctaacttgggtggtgatggctcttgggggaaatgtgccactgacagtatatgcacaaactatgaccagctcctatctgggaatgtgtggtggtaatttaaacatttttctttgtaatttcacttttggggggtataattttgccttttttttcctatcagtgcactaccaaaaagaaagagaggaaagaaattgagttaattgtaggacacgtgaaaacgaaagaagcccagtttttataagcctatgataactgcttttgtaggctgtctggtgaaatgttctggctgcttacctggtgtaacttaaggtgatttttttttttaaggtattctccaaaaaaaaccctcagaaaactgtttactttctaaaagatggtagtttatagtttcttcccccctttttcttctcttcatccaaaccttggaaaagtaatattgttcagggctgctttttttcaccttcttctttttttttttttttttgagttggagtttccttctgttgccaggctggagtgcagtggtgcgatctcagctcactgtaacctccgcctcctgggttcaaccgattctcgtgcctcagcctcctgagtagctgggattacaggcgcgcaccaccacacccagctattttttttttttttttttgtatttttagtagagacgaggtttcaccatgttggccgggtggtcttgatctcctgacctcgtgatctgcctgcctcggcctcccaaagtgctaggattacaggcatgagccactgtgcctagcctttttcaccttctgttttgaacacatgacagccagtgttatgatgtagtatatgttaagaggaagtagatatatctgtgtacattcatagttagttctttttttttttttgaaacagggtcttgctctgtcacccagactggagtgcagtggggcaatctcggctcactgcaacctccacctccggggttcaagcaattctcccacctcagcctcccgaatagctgggattatgggtgcatgccaccatgccttgctaatttttgtatttttttgtagagacagggtttcaccatgttgaccaggctggtctcgaactcctggccttaagtgatctgcctgcctcggcctcccaaagtgctgggattacaggtgtgagccaccgtgcctggcccacagttcttaattctgtaatccaggggaatcaaatttaccttctagataatgatttatttaaatatctgctgttttgacctcttaggcattcggtgtagagttgatctctaatcttcataatgataaattattactctgttttttcagtttgcttgagataaggctgtgaaaacaaaaaatgtagccgaggtgctaaggagagttatcttaacagggctagtcataatcatgcagcctgagagagagctccaagtgggctgcaggagatcccagtggggagctgtcagccttccaagttctttctgtgccaggtcaccacagggcggcttcattattttgtttgaagtagattcctaagacatcagatgttctcatttgtaagttcataaacacattcccaagccagaagtaaatgacttttacttagccacagctcaatacccctttgtgcttaaaaaaaaaaaaacaacaaaaaacaaaaaacaaaaaaactaaaaactaaaacacaagcctcacaaaactcttgacacatttttatgggaagtgaaaagcataacttaaaactttcataagtggttgaaaattgctatacaagaaacttagtatttagatgggatagattttgatgcagaacactgtactaatgctttggagatatgtatttgtaaagaaggaagtagaaacacatgcagtacaggataatacatgaccaaagctgcaaatgtatgtgttaggagttcaagaaaggaagagattattgctacccagggtgataagcactgagctagtttttgaagggtgtataatagcaaagagtacattttatgatctctgtgaggaccagtactacctgtttttgctcaccattatgtcccaacacctagcactgtgcctggcatagatatggggctcaagaaattttagttgaatgaatgaatgagtgagtaagtgaatgaggaagaaaggaaagaaaaagatttcaggcagagtcctgagaaaaggcacaagaggtgtttgggaatagcaagattctgttagaggaggtgtaataatatttgaatggagaggagtcacaggtcacagcagcagtcacttagttggggactggattgtggaaaactgtttggatgtcagtaaattgtgcttgcttgtaaatggcagagagtgaccagggctctactttaggacgagtgctgccatcgctcgaaggtggggtcagttaggctatggaagaattggattagggttgcagcagtggggaaagaaaggccagatggggagaggctggaaagaattggttgactggatttgggactgagcagatgcgggtagggaggaggaagcaaaggtgaattcaaagtttctggcttgggtgactgggagagagggacacctttaagtaggtgaggtacgtaaatcagaaggaaactgcctttttgctattctgttttgttttgaggattggagataggaagtaaaaagggggtcattataatggagtctttgtcttttgtgatctttaagcggaaaatagaccgtgtctgtcctggatatttaaaatgtggggaggtaagtggcacaactgatctcaagttcctttctggctttgtgatttgagctgaattttttatactgaattgtgaaattcattgtgtcttagaaatattttttttaatttttcaaagaatattgcttttctacaatgaagaaattcaaacctacagtgctataaatttttaattggcataattttgtatatgcagttttaaatgctgatttttttaatcatacatgagcattgtaaaccaatgccatttttcaaaatcaccataaatgtctctatattaataatatttcggggaaaggatataccatactgtattgaacatttttctctctttggtcattttggttgtttcctatgtcttgtcattttaagttgttccaattcacattactgaagcaaagtagagctgtgaataattctttttaaagctttagtttcaatttacttaaaaaatatattggtttgttttaatcaacgaaatacttccaggagcaccaaagaattttatgtggattgagagtcatcaaaaatattgctctatttattaaaaatatgtaacatccccagttcttgacaacttgaaaatgaagcagcattgttgcctggggtaaatacccggggttcttcatctcatcgaagattaacaataggtacacgtgagtgggttaaggagcagagactttaataggcagaagaaaggacagaggagagagtagctctccctctcttgtgagacagaggagtccaaagggaaaagcgggcctgcagctgaccgcaacaggttttatagtctggcttgaggaagcggtgtctgatttacatagggcccgcagattggttcaaccaggtgtgacgtttacgtagtgggtggggaaggctgatcaccccaccctaatcttattatgcaaatggactttccactcggccagtgccgtcttgtctgctcctcactgtacatgtggctggcaaaaagagaagatggagctgccattttgaacatgcctagtcccaggtagtagtattcctactggcacaactgccgacattcacctgtgcaagtttccagcttgcttgtttacgtgtgcagctctcttttacaggctgctgtttgttaaaagagaaaatgattttagggctgcttttcattaaaaggaaacccttaccgagggctcccgaaccctcagtacctgcctaagtaatttctttttaactcgtatatcaaaaacatctggtaaatgatcacaattatttgttgttgacagtgaattcctttataagaaataatttgtgtaaactataaatttgaataagatatttcctttattgttaatttaattttttggtcttaaatattttcacatcctagtgacaaattgaagaatttgccagtttagacttctctttttttttttttataaaatttaattttcttttgagaactggaaaaggtagtttatttcaaatttggtccccatgattgatgtactttagtaatgcatttattcagttttgtgtatctggatatgtggcatttcagtgagacagcttctacagagaattggaaaattacattctgaaatatcaaagttttataatttgaataatttacggaaacctttctaaaatgaatatacatttctgccttcttaaagaatttactggccaggcatagtggctcacgcttctaattccacgctttgggaggccaaggtgggcagattgctcgagcaacatgctgaaaccctgtctctacaaaaaatacaaaaattagccaggcatgttccacatggctgtagtcctagctactctggaggctgaggtgggaggatcacttgagcttaggaggtcgaggcttcagtgaaccatgagcatgccacagcactcagcctaggtggcagatcaagaccctgtcacaaaaaaaaaatttattgatcacaatttactttttttctgtcatacacagacttcatcattatggatgatcatcttttttttttttaattttttatttttgagatggagtctcgctctgttgccaggctggagtgcagtggcccgatgtcggctcactgcaacctctgcctcccaggttcaagcgattctcttgcctcagactcccaagtagctgggactacaggtgcatgccaccacacccagctaatttttgtatttttttttttaatagagacagggtttcaccatgttggccaggatggtctcaatctcttgacctcgtgatccgcccgcctcggcctcccaaagtgctgggattacaggcggagccgttgcccccggccctgtgatcctcaccacaaattttagagtaattattttccttttgagagcctcagccactttatgaaatctgagggttagccttttatgtatgggggaatcgctcatcattctgttttctaacaaagctttgcatatactgtctgtatagctctcctgccttcagtactagccattgaataatggagttaatttacactgcttgagaatatttctgtgggagtgaattttaattttcccagtgcattcctgaagaagtctccttttgttttcgttaatctgagtctctaagggagtttttattaactgaccttctctaacgagggatgttagaattacagaccctgatactggaaggtttcttgataccatctggtctgttgtttggctttaaggcaaagtgaaagcactcacttattttacagaaacagcagctgacacctgacctgaccagtatttacctcgggttaagaaggtaataagtggagaatggttcctcaccctctggtgttgtaaacctgaactttcttagaaatctagacaatgcatcaagggacaggattgatagttgatattggggttctctccttcctttatgatctcaacaaatgtcagactttttgcagacaagtaagtaataaagatgataagtttcctaatacatgtagctgctttgtagtctgtgggtttgctttctggctgtgcagaaaacagtgaatttcatggaaaaagttgtgttcttttccttcctcaaagaggagacactctgagggaaatgttttctgtacccagacccaatgcactgagaggacagacagaacagagaacatcaaatagggcaagtagaccttgagaaacatttgaacagttgaatgggtttgtccaataaggataactagagtcatagactctgtagagtctatatagcggctagaactgtgatatatgatattacataagagctggaaagaactttaggagccatctaattcagtggcttcatttgatagatgaggacgtggagtcccagagaggctacgacaccagattagggacactgagtgaccaaattgggactggaaccttttggcacccagtgatctttagttctgcatcagactgctgtgtgtgtgggaagcttgttagatgtgcagcaactcttccccaagaagttggcatcagtgtgactgtgggtggttatgctaaagggcttgagcaaaaactcagactagtgccctcatctgaggttggtatttgttatgcagttaggacctttttaaaatgtgatcattatgagttcagccataataatcacgtctcatacagaaactttatcatctgactggaggggtgcggatagtattctagtgatagggaaactgttaggtaatgtgtggcccagaggcattgctgatcaatttcaacaaaattttacacacacacacacacacacacacacacacacacacggtctcattgtgttttggaggatactgctattttagcatttatcacattgtaataatgtctttacctgtcttctcagtagatagtgagctccttgtgggtagggactggtgaccaataggcttttagtaactatttgagtgagcaagtgaatgaagagacaaaaaacgtcagcagtgctggtaaaacattgaaaggttggcatgccttataacgatcttatagaatttattcatcctgtttttaaagcagttaattttttttgtattgcaagtactctgtgatgaatatgctaactagtaatgccttgctcagaataggtagtcataaattttgttgaatgaatgagtacttcttggaatgtagcttatctttttgctgaggtgttgggaattttcacatgaagcttctaatgtgtagaataaggtataacaatacttcaaacaatgattcctctgggaattgactcacttaaattatagtttattagaaaaaccgaagacaaaataatggtacatcataaacttcataaatctgtgagaagagctgcacatgttgagtatgacagcaaggcttttaggcccagcttctatgtcccttcaaatttgtaggacctgcacctgtggggtggtgggtgatcctacccttgtgaatgtttgctctgatccttgggctcctgtttctttgttctcctggtaaggagatgaacctccttcctcctccacttgcaggactccaaatgctccaattcttttagtttctttcctgtcaaaacagaaaagggtttgattttagctatttacacttactgaataaaaagatggatggaccgattttcccttaatagttcatgagtttcattgtaggcattgacccataatttgccaatcttcttagaagaaatctgcaaataggtggagagaatcattcgttcatttgttaattcatttggagatgaacgcacgggtactctgaaataataaaatgtccgtgtttttccctggccacatgagaccaaaagactactcccctctgccaagacaaagtggggacccgtgcttggctgtggctctggaagccttttcctaggaaatgccagagtggagaagactctgtccattgtcattaacttcaagtttaggagtgcactcagccctcagatttctgaatagtctctgaagtacttatttctaccatctcctcccttttcactatccccaggttgatgaccttccatttctcctcttccaccctgcttttgttccaagctgcccaaataaatctagcacatttgattattttcattgattatcaattaatttttattttgaatttccctctagctaatagtatgtattataagtatgttttcatttttccctcaactctggtgaagaaggttcttacaaaggagcatgttgttggaagatgtcttctttattcacagtatttcattataccaaagttggtgataacccagcatggtgtgaacaactatcagcaatttttcaatgatcttgacatttaaaaatatatttattaatagtaagctagaaaactatatgtataagactatattattttaaatacataaatagtcttacaagtgtaagtattgtatcaaatgaccttaagataagatagagcttgttggctttatatttgtgacaattctgacttttgaagacttgttcaaaattgctcttggttgtgcaaaacttttgactgaatttttttagtgtaacttgaagctcatccgtctttttgtgggatataaaggctggcccactgagcttcaacatactgtggggtgggaagtcctctgggttaggattgcttattttttttctacctttaacctgaggctcttgccaaaagagaggcataacttcttcattgttgctatctttggatagcagcctactcttaaaacagcctgtctttttgagagacagtgaaggagggtgggaactagatcctcacctatttttccattctcttatgttccaagtcccaactggctttttggaaatatgaccctcttgaacaaaacaggataaaaattaccagggcctattctcactgttgggaaataattgggcctttgtagggaaaggatattgtcttcaaacattttatctatacttcgtttatggtacttggtaatttcttttatcttttatagttattttgatatgtcttttcatcttgatcagtattgtccatcagtgcagaacattgttgaattctgtagccattagctacgtgtggcttttgaacacatttgaaataattgaagaatttttaatttgtttcaccttagttaatttaaatttaaatagccatgactagtggctaccatgttggagagtacagatcaacttaaggataatgtttgtatttgatttactttctcctgtgttattgtagtatgccaattttatttcctggtgtttggtgaaataggttcatatgtgaaccatattgctttcaaaagtacatgtggctaagccaatctgattgttagaaattgtacatctttgaatttgagtttgaagttggattgtaatggttagtatgaaactggaatttgatgacgaattcttttttaaaaaatttcaacttttattttagattcaggggtatatgtgcaggtttgtatacaagcatattttgtgatgctaaggtttggggtataaatgatcctgtcacccaggtagtgagcatagttcccaatagttagttttgcaaccctttactcccttcttccctccccacttcagtagtccttcatgtctattgttgccatctttttgtccgtgagtagtcaattgtgtagttcccacttataaatgagaacatgcggtatttggttttctattcctgcattaattcttttaggataatagcctccagcttcatccatgttgctgcaaagatagaacgatttattttcttttggatatatacccagtaatgggattgctgggttgaatggtagttctgttttaagtttttttgagaaatctccaaactgcttttcacagtggctggactaatttagattcccgccgccaacagtgtgaatctgttgttttttgacattttttttttttttttgagatggagtctcgctctgtcgccaggctggagtgcagtggcgcaatctcggctcactgcaacctccgcctcctgggttcaagcaattttcctgcctctgcctcctgggttcaagcgattctcctgcctcagcctccaaggtagctgtgactacaggcatgtgccaccacgcccagctaatttttgtatttttagtagagatggggtttcaccatgttggccaggatggtcttgatctcttgacctcgtgatccgcccaccttggcctcccaaagtgctggaattacaggcgtgagccactgcctagccttgactttttaatagtagccattctgactggtgtgagatggtgtctcattatggttttgattggtgtttctctgatgattagtgatgttgatcatttttcatatgttaggtgcttgtgtttcttcttttgagaagtgtctgttcatgtcttttgctcattttttaatggggttatttttctcttgttcaactgttaaattcctatggattctagatattagacctttgtcagatacatagtttgcgaatatttttccccttctgtatgttgtctgtttactctgttgatagtttattttgctgttcagaagctctttagtttaattaggtcccacttgtcaatgtttgctttttgaggacttagtcataaattctttcctgaggccgatatttagaatggtgtttcctaggttttcttctaaaaatttttttttttttttgagacacctaagttggagtgctgtggcataatcatggctaactgcagccttgaccttctgggctcaagtgatcctcctgcctcagcctcccaagtagctaggactatagatgtatgccaccacacctggctaattaaaaaaaaaatttttttttttggagacagggtctcattttgtcacccaggctggagtgtagtggcaccatcagaaatcactgcagcctcgacctcccgggctcaagcaattctcctgcctcagcctcccaagtacctgggactacaggcatgcactaccacacccagctaatttttgtaatttttaggagatggggttttgctatgttgcccaggccggtcttgaactcctgggggtcaagcgatcggcctgccttagcctctcaaagtgttgggattataggcatgagccactgcacccagcctaaagttttttttttttttgtagagatggagtctccctttgttgctcaggctagtctcaaactcctgagctcaagcaatcctcacactttggcctcccaaagtgctatttcataagcatgagccacggctcctggcctcttctgggacatttagtttgagatcttacatttaaatctttaatctatcttgagttaatttttgtatacggtgatagataggagaccagtttcattcttttgcatttggctagccagctatcccagcaccatttattgaataggaagtcctttccctagtgctatttctgttgattttgttgaagatcagatggctgtaggtgtacaggtttatttcggggttctctataatgttccattgttctatgtgtctgtttttgtaccagtaccatgctgttttggttattatagccttagagtagagttttaatttgggtaatgtgatgcctctggctttgttctttttgcttattgctttgactatttggccttattttggttccatatgaattttagaatagttttttttctaattctgtgaaaaatgatactggtagtgtaataggaatagtgttgaaactgtagattgctttgggcaatatagtgattttatccatattgtttcttccaatccatgagcatgtaatgttttttcatttgtgttgtctgtaatttcttttagcagtgttttgtagttctccttgtagagatctttcatgttggttagatgtattcctaggtattttagttcttttgaggctattgtaactgggattacatttttgatttggctcttagcttgaatattattggtgtatggaaatgctactgatttttgtacatgaattttgtatcctgaaaccttattgaagttgtttatcagttccaggagccttttggcagagtcattaggattttctaggtatatcattatatcgtcagtggaaagagatagtttgacttattttcctatttgagtgccttttattttttctttggttgcttgctctggctaggacttctagtactgtgttaaataggagtggtaagagtgggcatccttgtcttgtttcaactcctaaagggaatgcttccagcttttgttcattcagtatgatgttggttgtgggtttgtcatagatggctcttattattttggggtatgttcctttgatgcccagtttgttaaggatttttaccatgaacggatgttggattttatcagaagctttttttgtgtctttgagatgatcacattttaaaaaaatgtttaattttgttaatgtggtgtgtcacatttattggtttgcatatgctgacccaaccttgcattccaggaatgaagcctacttcatcgtgatgcataaactttttgaggtgctgctggatttggtttttggaggatttttatggataacttgaattatttttgctttcccaaaatttattcaaagtgagtttaaaaagctgaaataaccatagctaaaacttcaaattctaccagtgtcaatattcatatacaagtagaaaaaaaacaagttatattagtcaaaagtgttgcttccattaacccaaggataagaaaatctcttatttagaaaaaaggttaccttaatcaatactggtagatgcatatttatacacaggcatactgtggagatattgcaggtttggttctagaccaccacaataaagcaaatactgcaacaaagcaagtcacacaaggttttttggtttctcagtacatataaaagctatgtttatactatactgtggtctattaagtgtgtagtagcattgtgtctaagaaagcaatgtatataccttaactaaaaatactttattgctaaaaaatgctaatgatcatctgagcctttagcaagttgtaatcttcttgctggtggagggccctgccccagtgtgatggctgctgactgatcagggtggtggttgctgaaggttggggtggctgtggcaatttcttaaaataagacagcagtgaaatttgccatattgattcactcttcctttcatgaaagatttctctgtagcatgagatgctatttgatagcattttacttagagttttcaaaataggagttaatcctctcaaaccctggggctactttatcaactaagtatgtgtaacattctaatttttttgttgtcatttcaataatattcacagcatcttcaaaaggagtaaattccatctgaagaacccagtttctttgctcattcatgagcaaaaggtgtgagcatgataaagttgaatgagaagcaactcatcattcaagttttatcatgagaatttagcaattaggctctacttttaattttagttctcttgccatttccaccacatctgcagttacttccatcactgacatcttaaacccctcaatagcattcatgagcgttggaatcaacatctttcaaactcctgtgaatgttaatatgttgacttcctcccataaatcttaaaccttatgaaccaacctctgctaacttcatacttttattctgcagcttcctcacctctcttaaccttcatagaattgaagagaattagggccttgctttggatgaggctttggcttaagggaatgctgtggctggtttcatcttctatccagatcactaaaactttctccatatcagcaataaagctattttgtttttgtatcattcatatgttcactggggtagcactattaatttccttcaagaacttttcttttgcattcacagttggctgtttggagcaagaggcctagcttttggcctatcttggctttcgatacaccttcttcactaagcttaatcatttctaccttttgatttaaagtgaaccatgtgtgacttttgcttttacttgaacactgagaggccatgatagggttattaattggcctgatttcaatattgttgtgtctcagggaatagggaggtccaaggagagggagagagatgggggaatggctagttggtgaagcagtcagaacacatatgacatttatcaattaagtttgctatcttatttgggtacagtttgtggagacccaaaacaattacagtagtaatatcaaagatcactgaccatcataacagatacaataataatgaaaatttaaaatattgtgagagttaccaaaatgtgaaacagagacatgaagtgagcacatgctgttggagaaatggaactgatagacttgcctaatgcagggttgccacggttcttcaatttgtaaaaaaatgcactatctgtgagcatgataaagtgaagtgcaataaaatgagatatgcctatactcttcattttggttcttttgagttagtttttgttgacttgtcttggactggtcagtaaggggattataggtatagttcattttggattcgtgggtattttgtttacatttacaatacaacaccacactgggaagttaagaaatgagtctagaacttttatttcaaatcactgctgctttctttctttctttttttttattattattatactttaagttttagggtacatgtgcacaatgtgcaggttagttatatatgtatacatgtgccatgctggtgtgctgcacccattaactcgtcatctagcattaggtatatctcctgatgctatccctcctacctccccccaccccacaacagtccccagagtgtgatgttccccttcctgtgtccatgtattctcattgttcaatttccacctatgagtgagaatatgcggtgtttggttttttgttcttgcgatagtttactgagaatgatgatttccaatttcatccatgtccctacaaaggacatgaactcatcattttttatggctgcatagtattccatggttgtatatgtgccacattttcttaatccagtctatcattgttggacatttgggttggttccaagtctttgctattgtgaatagagccgcaataaacgtacgtgtgcatgtgtctttatagcagcatgatttatagtcctttgggtatatacccagtaatgggatggctgggtcaaatggtatttctagttctagatccctgagaaatcaccacactgacttccacaatggttgaactagtttacagtcccaccaacagtgtaaaagtgttcctgtttctctacatcctctccagcacctgttgtttcctgactttttaatgatcgccattctaactggtgtgagatggtatctcattgtagttttgatttgcatttctctgatgcatctctgtgttcttctcatgaagcctgtgtaaagggacagctaaatttggtgccacctgtaatataaatttcaaaatattaccaacctgcctaatagggatgaaatatacaaattcagcattctttatttatctaaggcaagtggctattggcagattttatgtaatgtaatgacatagttatgatagtgtcatttgggtggcagcaaaaaaattaaatgactaattcaaaggtcttttggggatggattttggaaatgtgttggtatttagtaaatttgtggtctagactaaattgaacttaaagcattaatgaacaaactatttcataatgaatacttgtttctgcttttgtattacctgtaggacattcttctaatcataagtatatgatacagtccctgacagagagacttacattgtagttgattaagtagaatcaatacttaaaataatttgcaatatttagtagtatatgtagtagactaaacgaatgactcagacggtaagttttgaaaactttgagagaaaggtgttccctaggatgattggaaaggcttcatggagaaggtgggatttgcactggactttgagcaaggtagagtgtagcagaaagaaaaggaggacactctagacaaggaaaccgatgtgagtggaggcttagataaagaatacatttagaatatttgggaataaggaatggacatgtttgttggaatgcagatttcctatgggacctctcaggagataaggtcagcctggaagctaggggaatgttgtgtaaggctttgattgctgggccaaggaattattctaaaggcagtaagaaaccattaaacatttttgaatagtgggaggatatgtgagaactgagactttatgaagactaatatctttcttggaatacaggatgattgggaaggggagagagattttaaaaagtacaggcatttctcaaaagaagacatttatgcagccaacagacacatgaaaaaatgctcatcatcactggccatcagagaaatgcaaatcaaaaccacaatcagataccatttcacactagttagaatggcgatcattaaaaagtcaggaaacaacaggtgctggagaggatgtggagaaataggaacacttttacactgttggtaggactgtaaactagttcaaccattgtggaagacagtgtggcgattcctcaaggatctagaactagaaataccatttgacccagccatcccattactgggtgtatacccaaagaattataaatcatgctgctataaagacacattcacacgtatgtttattgcggcactattcacaatagcaaagacttggaaccaacccaaatgcccatcaatgatagactggattaagaaaatgtggcacgtatacaccatggaatactatgcagccataaaaaatgatgagttcatgtcctttgtagggacatggataaagctggaaaccatcattctgagcaaactatcacaaggacaaaaaatcaaacaccgcatgttctcactcataggtgggaactgaacaatgagaacacttggacatgggaaggggaacatcacacaccagggcctgcctgtcatggggtggggggatgggggagggatagcattgggagatatacctaatgtaaatgctgagttaataggtgcaacacaccaacatggcacatgtatacatatgtaacaaatgtgcacgttgtgcacatgtaccctagaacttaaagtatatatatatatataaagtacaggtgtgagatgaaaaggatctggacttctgttggcaaaataggaagagaaagggaaaggatgaattatagtagtagcttgtttgatatatcagaattaaatatttatttgttggcctactgtgattgagagatttaatgcctgagtgactgggagaagcaaagtgtttttttgtctggagggatgatgtgaaggaaagatgggttgagttttagatattttgagttccaggtgacggaagggcctgtagatggtggacccagcaggtagccgagatggagaagactgacactggctctcaagtggaagagacatcacttttccatagggtcgtcagttaaattcatgatgttggctaagagagaagatctacagattgatgactgtatcctggagatgttaggggatgaagagagggggaggagccagtgtgtcttataatacagaaagttcatggagaacgaaaactgaaaaaataccactggatttaagatacttgagaattgtgagctatgtttgagaggaatagttggaatccaaagtacacaagtaagattatgactaaaatatatgataaagaaataaaagcaagtagtacaggccatgtacttgttatattcctgttggttctttctttgcctgttctttagtgtgtttacttaaatggtctggcaggcagataaaaggaggtggaacttaaaactgtccaattagttctgttttttttttttttgcgatggagtttcactcttgttgcccaggctggagtgcagtggtgcgatctctggctcaccgcaacctccacctccacctcccgggttcaagtgattctcctgcctcagcctctcgagtagctgggattataggcaagcaccacactgcctggctaattttgtatttttagtagagatggggtttctccatgttggtcaggctggtctcgaacacctgacctcaggcagtctgcctgccccagcctcccaaagtgctgggattacaggcataagccaccgcgcccggccactagttccctattaagagactagttagagtaactagagggcattaggacgaaaccattagttatttggattataccatggatcagattagttataagataattgaaatttgattgtaaatttaatgaaattaaagatgaacattgatgttactgaaaattatactttgactaaatactacgttttttgtttttcttgtatcttagtttctatgcagattttggaccgctgaacttggcaatggtgtacagatattgctgcaaactaaacaagaaactaaaagtgagtattgtagtgatatttataatttggaattaaaacatttgaaccataggatctgctcagtggggttggtgtgcacaaaacatttagtcaggtgatcttgatctctggaaatttatgtgagtagttcacctagagtttgaaagtgatcctcctgattataccacaaaggacatgttaacctctttcagttttcagaatgaattgcaatatgagctgaatgaagtcactggaatagtgatctaagaaagaaagcacaaatccttttaggctgttgttaatgagtctctatcaaattccctcctaggataatttttctgaaaccttcagatatgcctgtagaccctgtttccaagtgatgaacagggcttatcatggctggagctgtgtgcataacattttctgtttggtcaagattgaaattttttgcatgtttcttaaatgttctgtgtagttaacagccaggtgagattgatgaaccagcagcaacagagaatggaatttacctgagatgatagaattctggtcatacatttagtattcatctatagttttgatttcacatgggtatctggtttccttttctgtacttttatgtggattttggcatgtggctttttttttcttcttcaagcatatgaggaaactcatctatatacctagttttagtaaacttattttatcacacagaaagcaatatttatctccttgtcttccaatttctaaatgaagatctttactatttcagtttgaaagacaaaatgctatacagaggactcttaaggataaatactaaattatattgctcaggtattttgctctttctgctgggtaaaatgttactggtgttacatagtacaatgccttggacatattaactgttctgtgattattttttgatttgattggtttttaatgaacttaggtataaaaagcagtctgatagagaatttcctgtagaatatgttgtatccttatgaatttacaaatttttgccattgatttcaaagtgagaggtggacatggaattataccaaaaagaatcaataatcatataacatattaggttggtgcaaaagcaattgtggtttttataattacttttaatgttaaaaaccacaattacttttgaaccaacataataaaatctgttttactcaacttttgtaggaattaacttacaaagttgtctgacttgaaaagatacatgtaaattcctttaattaagccagatctgtttttaagaaaagaagccagtattttagaaagtaaaatagaggtttttgcaatcacctaggaagtaaataatatcctttttatagaaaatgaacttttaatggctgagtaaacaagaaaaggataattaataaataatggaagtctatttttttcttttgaagaccaaggaatttctttgctgtcttgattagtcattagtatgtagttggtatgaattgggtattataattaatctgggaaccgagtactatctagggtagccaaagagaaaggagtcattatcaggaaagtaaaatcactggtctgactcagtgttctacttatagcagttgcagaagagtagatgggttgagttgagagtattttttctaccattttctacactgaacagtatggtaagtatatgtatgtaaacttgtttctatttgctttcatttataatgctgtgtttcgacattattaataaagtttaaacactctccttggttcattttagtggtaaggtaatctgttggttgtctggaatgacatatgtagctttaggacaattaatgggcactgcattacttgctgaatgattgaattttaaaaacccaaatgttgataagtcatgagttgtctcaatgaagcatactacatagaatctctaattaggagaaaaagatttactgtaccagtccaaagttggaattgcttcagttttgtggaatcttagtttcttcatctgtaaaataggaattatagaactgtcacagggtggtggttagtattatattagaaaacatgtcttagtctgttttgcattgctataaaggaataccagaggctaggtaatttataaagaaaagagttttatatagctcatggttccacaggctgtacatgaatcgtggcaccaacatctgcttctggtgagtccctcaggaagctttcactcaaggcagaaggtcaaggggaacagtcatgtcatatggcaagagagggagcaagggagaggggagggaggtgccacactctttttaacaacaaaatcttgggggaactaagagtgaaaacccactcaatcccctcagaatggcaccgagccgttcatgagggatctgcccccatgacccaaggccccacctcttaacactggggatcacgtgagatttggagaggacaaatatccaaactatatcaatatgtaaaagctttgtacattttaaagtcctatacataataaagttaccaatgtaacatttgtgaattctgatagggaatataataaagacagttcttctacaaaatcgatgaacacctgtttctcagccttaaagctattgtttatatatgggaaagctgtccaatataattttaggaatctaaatgaccatttagtcaagactcagaaagggaagcctgggaaaggtgtgtgacttgcccagtgcagcaggcaaagtcagggctagatttcatggctcttgaccacatttttcctgttcttctttccaccttcagtaggaaccatagcctctggtttacagtcatcctttgttcactcttagcattgccccagctacctgaccttgttgtcccacgctgactttgaggctcctctgcctctttcattccagtaagtgttagggccattctgtctgcttcacttccacgaacccagactccagattctcccacttggaaaatgcctttgttactcactttgcacattctgtccctctcacactactgggattgctagaccttcagtctccctgttctctcagtccactggcaccctgctgatgtctcttgcctgcagcccatggtcacttacttcagtaaggtcttgggtactttgctttcttgtctttctgccttgccagctctcacccttgttgttttcccagtggatgatttcatgcactaatttactgggaagcagcagtacccttgccactcccagccttgcactttactctaccataccagctgttccatgcatttgctcatgaagaccagtctgactgggatgcccttaccctctggcttgatagctcttcattctttaataccttgtccagccaccaccctttaggaagcatcttcttgtccttttggactggattgagggtgcctcccttgttttcccatcattctctgtgcagatctgtatcgttgatgaattgtaattacctgtttgcacctgtcattctcactagactatgagcttctagagggtggaaggtggaggatgtcatgtatctttgtgttctcagtgcctagtgcagggacaacagacacacagagacttcttttgactttgtcatgatccccttcatttgcagatccccctttctccttttgcttccagaggtttcagaagaagagcctgcctccatccttcctgtgtgctgatttcttaaccctttgttatctaacttttgccttccctactctaccgaaactgctctaataacgtcttaaatgctgaatctgatggcacttgctggatcctcaaactcctttacttctctgagtaatttcgcactgtgttaactagtaacttcgtcttaggattcttctcttgtgtgatttcccagttcttttaggcacatttcattttttagtttggaaatttttattccttccaagaaagcttgtgtgatttttcttcctcattctgtgctttatatagataggtaatattttgctgtacattttattccaatcccaaatttctcatttttgaaatgagaagatgtttttttccagttgatgatttgagttggtgatttatcgctatttttgtgtttctgtgtctatatgcattctattcccaatgtccttattttaattatgtcaatcagaatggaaaattatcccatcaaacatatgcttagattaaaaatccaaacataaaatgcatcatcaccaataaaaaacctgctgcttatttaaactgtactttaaaaaattgtcagtactaggaattaggcagtaataggttgctgtttggtctttcccctaggataggggaagcaatcaaaagagggaagatgcattgaagtgagaacaatttgttaaactgtgtatgttatttaatgttaaatgtcatcaatgattgatagccttgagctggaattattattctggtaattcaagggatccataaacccttgaaattatacaattttgtatgtatttacatttttcttctgggaggattcatggctttttttcaggttctcagagggatccttgacacagacatgctaagaacactgggctaaagtcttctgaaaaagaagactttactaacaaaagacaaagttgtggtattttgaaaaaactgaataccttcctctattcttttttttttttttttttttttgagagggggtctcactgcgtcacctgggctggagtgccatggtgcagtcatagctcactgcagcctcaaactcctgggctttgatgattctcccacttcagtcaactgactaactggaaatataggtgcacacttctgcaccccacccagctaactatttttttttttttttttttttagtttttgtagaggcagggacacactatgttgatcaggctggtcttgaacttctgggcttaagctagcttcccgcctgagcctcccaaagtggtgggattacaggcatgagccactgtgcttggccgtcaatacagttttaattattgatttcattttcctctgagaaaaataaaacctgagcttggagaaaaaaaaagtctctgaaaaaaggggacattttctagggcagtggtttttcttttttttaatacctgctgttatgaatcaacaggataattacagtaatcttgaggactattttaaaaaaggattaaaggagtattcacagaaatgtaattttaaatttacaaaacatcccatatagccctttcagggtaaaaggggaagtgggtgggtatcatgaaaccaaccattatattgaagcattggaagtacctggcagatggtggggcttagggaatgtccttgttgctgaatgaatcagtgccataatcctatcctgtaaaccaggcacctgccaccctatcgggggttatatacaccagaactcttttgatgtaatgactagaccaccctattataactacaaaaacatgttgagatttcttcatgtggttcttttctgtttctggctcataggtttgtggggaagaaaagcaagctacattctggagatagttcatgtagtttaaagaggttctaggggctccaaagcaatgtcaactcccataggagcgagcatataccgagtttgcaaggcaagaaccccttatgcctgttaggaatcctcaggcaggaagaaccccgtttatagagaatcccacgtgccttcaattattgattattaacacgatgaaatcatcttcatgagcaacttttctctgacattttgacttctgctttaatcaaatgtgccatttcattaatgaaatgtattgggtttgaaacaaagtgggccacacagagacacctttttctttttaaagaaatgattcgatctatttcatcttggcactaaataaaaaacataaaccatattttgttttgtacagccaaagaacattttccagagtattcctttcctgagaaagttggaggtaaaacttgtaaaggtcatggctgctcacaggaagacctgctcattttatcgcttttgcagtgagatgaccactgattgctatggagatgctgattgctgcggccattactgggctagcctagccacctgtaagagaatgatgccttggtcattgcggtccctgtgctgtgatctccttaatatgaccatgatcattgacagaacttgcatgtttaggaggtgcatgggctctatttttattaaagagcatattatccaggctgcattaatgtcttccttagctcagtcagactgattcatacagcttaattaaatacagcattctaaccaaataacttgaagattttacttttctgtgtttctttaaattgacctttaactcttttttttttttggctttggctttgagcctaattgcatcaccttttgttattgaatggttaagtagtttgtgctctcctgactgaagctgaacaagtgcatgatttgtgtttgttgccataatccaagtgtagcctgagctatttgttatttgtgcagcttgtcattatttttttctctctccaagttgctgtggcttgtgttttacaaggagtgatcccactagaatataacctttcacatagcttttctttccaagatagaaaatgtctggggtcaatacccttatcttaatttgtattgttctatcatagcagtcattgtactttggtttataagtaccattaagtatttatgatatacacttatgatttacataacaggggcaaaactttgactctcaggtaagcaatacagaaatttctataggtttgattatgttaattgatagtcaatactaaattccaccttttatctactatattttttccttgttaaatgaaacacttactgtacctgtaattagtatcattttattggtccttgtgtgctgtaaatgcatcctatacagttattctcctctgtttttaataagccttggccaatattttgcattaaatattcattagcctttgaggttagagagtgggtttcttctccccttgtcactgcattgctcagcaaagtgtttgacacacaacagctactcaattcatgctgatggaacccatagaaccttcttcagccgcagtatcctggcacccagatttagcaaattggtcacctgtggcctgcattctgtccacagacatgttttcttgagcttaaacactgtttaaaaaattttaattcatagtcaacatctgcagtttatgaaagcttcaattttgtcttcttttaaatattgcagtatctgaccattctgcacccagattccctcacaagagcagtaggttggagcttactgcactttggatagggaatgcttttcttatttaccagctgccccacttcagattcttggcacctgagaacatctgaatttggaacttctggaataatgacatttaaggcagcttaattacggaatcattaaagggacttgttcctaaggtgttatcacctggaatgcatgaatttacaaattgtaataaggtttgctgaggaatctggggaaatgtgttttttgtaaaatgcttttaaaaggcttattgcatgatttagaattcctttttaagagaatgtagagttctttcgagactacttgaccagatggacagtgttttagcttcatataaaagattcccaggggtgggaccagttacatgtttatgtagtgcttctccaaaatttagccatatcttagagtagtggatttcaatgtgtggtgtctggaccaacagtgtcagcattactggaaaacctgttagaaatgtaaattctcaggccctactgaatcagaaattctggaggtgagacccagcaatctgtgttttaataagccctgcaggtgattctgaaccaatctgttaagagaatgaaatataatacaataataatataatgtggtttagagttagatttagttatttctgaaaagtcttagtactattgaccaattcaacctgagaattattcaaattctgaagcatgaaacttgttatggcctcataattaagatttacacaaattatcaggctctgtgagaaagttttggactgatcctgcttactactcttactgtgtaaatgttcgtcaaaggccctctctgactctgggcttatgttctccttgtaaaacacagtgtgctcattatattttagccttgcccaggacccctagtctgggagacgttatgtgtctgattaaactggacccctctggtgccattcctattgctttggataatggtggaatgtcacaagtgagcaataaatgcgagctgttgttgcggttattatagagggctggctatgtccacttcagtttagaaagttcagaagggtatttgctttgtaatccccgcactttgagaggtcggggtgagcagatcacttgaggtcaggagttcaagaccagcctggccaacatggtgaaaccccatctctactaaaaatacaaaaattagccaggcgtggtgtcacctgcctgtagtcccagctactcaggaggctgaggcatgagaattgcttgaacctgggaagtggaggttgcagtgagccaagatcatgccactgtattccagcctgggtgacagagtgagatagtatttaaaaaaaaaaaaaagaagagtatttgttccagtttcaagatagaaatctaaaacataaggtggatagtggctggctgcagattgtgatttgtaatgggtcatgtgctgtgctgctacagagctggcaaatagtccagaggtctcagtattctttctgtgaccctctctattttatatttacactgtatttattggaattgaccaattttaaacttcactttgctatggcatacagtgtttttgtaacctgtgagcttcttgtgtaaagcagaaaataatctgtaatagagcaggtagctcattgaaagcctgtggctatgatgtaaccttgcaagtgttctccttgaagggcccactcatcatatttgctttgtaatccctgcactttgggaggctggggtgagcagatcacttgaggtcaggagttcaagaccagcctagccaacatagtgaaaccccatctctactaaaaatacaaaaattagccaggcatggtgacaccttcctgtggtcccagctacagaggagacagaccagagtaaggaagaggccactgtccaatttagaggcatgatattctcctgatattagggcagaatctgagaaaacattgactgggctcatacatagagtcctgtcctattgtctccaaactgtgactttgtctgcatggtaaagttcttccatgaaagatctcaaaagagaagttaatgttccatagaaggtacttcaatcatcgatgtctccactgggtgttagtattgcttcttctagggtgctttgattatgtaatagtattttttaagtgggggacatgcttaaaatttgagaggaaaaaacattaaagagttttttttttttaaatcagcccactcatataaaacatcagctaaacaacggacaaaatattttgttacccctcaaatttttattccaataccaaagtatcttctctgttgaacagcatcactggtagaaaactgtgggccaggatgaccataagagggaggcccagttgtgaaaaggaaagacattagcaaaaggcctaattttgatattagcaaatttgagattaattagaaaattaattaggaaattaggacaaggtctaattttgagattagtagatttttctctgctctcattaactttgaattcgttttgattcctcgagtgagagaactcacctctcagtgatttgacctcggagatgctggccaagcttcgctaagcaggaaatcatttcttggctggtgtgcttttgaaacttaaccgaggaaactgaattccaaaaatacctaagcaaagtaaatgctagcagctttaaacattttcctaaaaatcaggcagaaagctctaaaaagaagtcagttatgtttgcttcctgtggggagtttctcataggaaatattttaaaataaagtttctaggaagattttgtgaagatcattctctatctgatgtaatttatgaaagcttataaagtttaagcattcttctaaaatctttaaagtgttaatttgtattatatttacttaaataatatttatagctatacagtgaaaagaaagtcttcctcagagttctgtcctttagttttatggctcatgttccaggataagtctctgtattctatatactttagaatgcgagagagaaaaaacgaaaccaagtaaacacaaaagattctactccccccaaccccctccaaaaaaacccaaggaagaaataagcatcagtgatgaaagaacagcactataacttgtccctttcagcaagtagatttgtaaaataaatacagtttcacattattaaccaatagcagtagtttgtcataaaacctaaattcttagtagaaaagagcatcaaaaatgataatccagacttgaagatagactgttgatattttcttccccacaggtattttagggaattaggaaatgtaaatagggagaggctgggagccataagagcgtcgagtccctatgctcagtctgactcatgtttattgagagcctggcctgtgtaaggcagtatttagatatttgcaattcagagatgataggagatgcttaggtctgaagagcctttatttcctttttggtaaatcaaacataacttattgatggggaacaaataagtggcaaaaccaaccaaccacccaacagacaatgagacaatgaaataaaacagaaaaaggcaatgttcaggcagtcagtagttccaaattgagaaagcaaagaatcaagtgtcagcaccattggttgtaacctttacatccctaggtaacttcaatgcatcaactcaactgagctgaattaaatgctgtgcctttgttctctctttatttcataggagtatttgtataaacctgtcaggaaataagggcattggcaataagatactttctttgagtcaaatactaattttttttgtttgatttttgtttgtttgtttttgagacaaattcttgttctgttgcccaggctgtactgctgtggtgtgatcatggctcactgcagcctccatctcctgagcttaagtgatactcctatccagtctttttgtagaactgggtctgtctatgttgctgggctagtctcaaattcccagccctaagtgattctcctgctttggcctctcaaggtgttggaattacaggcatgagccatcacacctggccttacatactaatttttaaaagtttaataaaaagggcactactggctgggtgttgtggctcatgcctgtaatctcagcactttgggaggccaaggcaggtggatcacttaagcccaggagttcgagaccagcctggacaacatggtaagacctcacctctacgaaaaatacaaatatttgccaggcatggtggcatgtgcctgtggtcccagctactcaggaggccgaggtgagaggatcgattgaggctgagaggtcaaggctgcagtgagccagatcatgccactgcgctccagcctgggtgctgggtgacagagcaagaccctgtctcaaaaaaaaaaaaaaaaaaaaaaggtaaaagataaaagggtacagccattttcagataatgtgattctaggagttcgagaccagcctggccaacatggtgaaactctgtctctactaaaaatacaaaaattagccgggcgtggttgtgggtgcctgtagtcccagctgcatgggaggcaagagaatggcttgaacctgggaggcggaggttgcagtgagccgaggttgcgccactgcactccagcctgggtgacaaagcgagaatctgtctcaaaaaaaaaaaatatatatatatgtgtatatatatatatgatttttggttataaaagaaatgcctgacttggagtgaagatttcctggctcattggagggatacactttctgtggttacatggtaaagccagagtgttgcagtttcatcttagaacgggcttcagagatggaagagtttttttttaatttgtagacaatagcaggatcaagaaaagtacatagttgagctctatttaccttttttaaagaggttctaaaagcagggattttctgtgtgttgtagtcaatgtataagatagaaaaagctgcttttatagtcaatgtgaatttatagacaaatactgaaatgtacttttgtgcctgtgttttttttgctagctcattaaagacagtttatgtacctatatttagaaaatcaattgtcaaaatacataaattttgaaaagtgaggaaatcaagcagatttcattgagttacattgtgttctcattgtcttatacttattcgagttttgattaataatttgatttcattttaccagatctttttgtcatttcttttcatgtttagcatgtgtacaacataccatgttgattattttgaacttagttaaatacttgagcatgcagcatattgcctggcatataacaggtgcttaataactgtctgaattcatgaatttaatagatggctattgtaatgtgttgtattaagatgtttgctgatataattttttaatggtatttttccattaaccaagtattttcagatattaaaagggggttgttatataacatcccagaaataaaatactaatattggtcttcaaaaatacgattttttggagatcatagtaaactggttgacattttaaaaaattgtgttatatgaaaactatagataatattcctgggagttggagtggcatgtagggggtaacaaagtgtgaagagactttctgtagaagatttagaataaatagtcaaaaatgtttccagttaatagagatgccaatattttaattattttccaccatattagtttcttttctgggagagaaagatattaattatattgttgattcttacattatgattgggctgtacaaaatctgagctagtaattctctaaccctcaaatgccatagaaattaaagttgaaagttgttaaattttatgggttgtagcacatcttgaaggttaagagatgatgtttgccttctgtatatgttaactttgtctctatggttacactaactctttttatctcctctttctagtcatacagtttgtcaagaaagaaaatagtgcactacacctgttttgaccaacggaaaagagcaaatgcagcatttttgataggtgcctatgcagtaagtaccttcttcatgattattttctataatcaggccagtgaaatgctaacactgtcaaagaaaatccaaaccagtttttcagtgggattgagagacggtggagattattagcagtttgggaattgatctgtagtgagaaatatggactagcagtggtggaatgtttactctttagattttattttctactagttaatgagagaatcttgaaactgcaatatgtagcttgaattccacagttatataggtattttaataaaaagaatacctaccaaggacatttctaggaaaaaaaaatgtgtgtgtgcatgtgtgtatgtttaaatgcatgaaatatgatattatggaagattttaaaagacttgacgtgttcgttttttgggagaagaggaaaccttagattgcacaggggaggattgttattatttttatcaatccattcattaatttatacaattgtttgcagtaggcaaactgaatataaatcctgcatatattatagcttccctaataactacaagagacttttccaaaactaatttcaattagaaattttgttctctgcagacactaacatgtcagtatgaattccacatgaccatgctgtagagttttaggtggtgattctggaattttctatatatgctgtgattgggcaaaagcttagaaagcagaaaccatcagagctaaaacatacttgcagggatatgtgtgatatcagctgggaatatgctggtttaaaggcagggagcagagaggtatcatttcccctcatccttggggagggctcgtgctcctctgaagccatggaagcaaccctgctgagtgacttttcaagggcctcattctaaggaccttgagggaagagggcaccagctactagacctcaaactctgccccatcaacccaaaagctctaggggaaaaagcccagcagtattgctggaaaagctgtcagctattgcagggtgcaggctgagaagagtggcagactgtcagccaggctgtgggctggggccttgcttgtagcactgaggtgcccagccctgcccaccttttgtcccttgatgtagctgcaataaacccttggcctaccccttgtggcagcattctttcttgctctgtagatagcatggtatagtacaaggaatagtgtctaagagtcagaaaacatgtttttcatcttgaagggctctgtgatgatgcactttatctctctcagctttatttagtttccttatccgcaaaatgagagggttggatgtaatgacccctacatttcctttcagttcttaggatactgagagtatttgtagtgccagccaggctattgcttttattttaagagcatacatgaaaagctggcagttagcatgaaggttcagtgaagttctggtaagctgaatattttttaccttacattgataatgactactcatttgaaattgatgattgacactgtgattgaaatatggaaaaagactgtactaatttctggattcaagccctgtaaacaaacgtgtttttcctgcagggttttgtgatgctttgtaagcgtgttatttgtggatcctttctcataaaggattgccatcaagaagaggtcatttgccactcttcgcacgtctttcttttttttttttgtgaggaccaaatgatttttattcatattcgtctggtttatctacccaaagtgttcaggacagtgttcagcacatattaagcttgatatagcagttatctatgatgatgatggtaacgatgactctgtatagtcactgtgtttctgaggtcttgtttggtaatcaagaatgtgtttagaactatctctttattagacaaggtaataaaccaaaagtttccaacttcctgtacatgttgaaagttttgaataaagatccttggatacaaaacatggcccacatggctcaaaattaattctgtgacataatattattctgaagtcatacttattttgaaagcctaaaggtttttcttttttatggctataaaaatatcaccaagctagacattttaattctgttgagatatacaaatagaattaccgcagcagcccacacattctatgatttctaaacatttaaacatcaatggttttgggaagttgctgttgtccttaacagttcattaaaagttcagatgccttttgtgagagcccaacttttctacccgcgaaattgtcttttcagaagtcttgccggatgttttctttgtttgcctttccatgttgctgtttaatttgatagatttcattttctagttgaaaaatagtccgttcagtctcataattcttactacagatatccaatttgactccatttctctcaatttagatccagctgtgagttgcatgttctttctctgccagtttaaatcttgaatatgttttcttaacttctgaagttctttctgtgcatgttcaatcatatgaactagattttcattgtatactttccaggcattacatccatgctgtgacattagtttcagattctcagttgtaactgcttgatgctctaactaggccatagaattgtttacacattcttgccatgcagtaatgccatttttttgaccagaggaaggggctggaagttcatatcgtttcatactgagcaattcagttggttgtcgagcagccagtctctcaaattcatttctcatcatgtcagtttcaaaagcagaataatccaggactgtcaggtatctcaggtagttcatagtaggttggtatctgcgagtttacttctccaccagcactgcagctgcttcctgcacaccagaggcttcataaccttgatcaaaatatggatcaagtggtcaatatcaatcaagcggtggcacacgactgtaatcccagcactttgggaggctgaggcgggcggatcacaaggtcaagagacggagaccatcctgaccaacatgtctctactaaaaatacaaaaattagctgggcgtggtgatgcgagcctgtagtcccagctactcgggaggctgaggcaggagaatcgcttgaacccaggagtgggaggttgcagtgagccaagattgcgccactgcactccagcctggctacccagcgagactctgttccccctccccaccgcaaaaaaaaatatatatatatatagcagtgcatccacctcaacctctccagccaccaaacctgtgcctgccattctggggacctcaggtttgccctactcttctcatttctttacccctttttccctcccttgcatcttctctctcttctttccttacttatttatttatttatttattgagactgagtcttgctctgccccacaggctgcagtgcactggtgcgattgtagaccattgtatcctcagactcctgtgctcaagcgatcctcctgcctcagccctccctagaaggtgggactgcaggtgtgtgccaccacagccagctaatttcattttatttttgtagagacagtgccttgctttgttgcccagcctggcttcaggactcctggcctcaagtgatccccctgctctggcctcccaaagtgctgggattacagatgtgagacaccacacccaacctcttctttcctttttaacacctattcttcctgttttgtttagtgtggttcttcattttagcagggtgcctctagaactttgaaaggattaaattagatgcgttgagcttgtcacaaaatactctgtgacaaaatatgtcttctgatggagaagtttccaccactttaaagcaaccaaaaggggaaaaagcagtcctagcatggtggaagaagtgctgagtacagcatgagcttgtcttacacactagttacagtcttgagaagcagtgtgaagtgattattcttgaactggtcatgtcccaattgatttttctaattttgtaactgtattccccagagggctttttgacacaaacccttaatacacacggaactaaaaattggcagtggatccttaaagagaattttatgcctttcttcgtattgtttgtatgtatttacttgttgacagtcttgtaagatagtcaataatatccattatacatatatctcagttaaaatttacatatattaaatgttgctagttggataagtgtccgttttctgggggaatcttctctggatacaaaagacctttaccttcggagcagccatgtaacttacatgaggcaagctaggtaggtaggtatattttatcaaacagaagtctttaagagtgaaggtgttcctgttcctaaaatgtggaatcggccctctgttaagtggcattgactgactaataaaagtattttgtactaagacaaacctttttctcaaagccttagttttctcatttgtaaaatttggataatacctgagtttccttatctgcttcacaggattattgtaaagatcaaatatccaactgcctgtttgatagctccatattatacatctaaatgatacctcaaatttattgtgacaaaacagaagtttttattccttctctccctaaatgtatttatttcccaagtcattccctttttagtaagtggactaccatcagtgacttgctaaatcaaaagagtagtcattttgatttcttttgttcgctcatcccacattctacttattcgtaagtttggtcagctctacctctaaaacatattgaatcagaatgtatctttccatctctgttgctatcacctagcccaagccactgtcattgttcacctggattatgaccacagctttatatgttgtctcctttttatattcttgcttcccattaatttagttgccatacaactgtcagagtagtcttttaaaattgtaaattagatcacgtcattaccctgtttcaaatctgttattgctcactgatcttggcataaaatttatccttaccaatgccattaagatcctttctgatctgaccctctctacctctgtggtctccttgctcaagttgctcccctcatgctggacttctaactgaaattccatgcttgttcctaccaaagagccttgatatttctgttctatctggaatgttcttacttcagacctctgcatgcctggctctttctaatgttactttctcagagagattttctcttaatttctaccctgttacctccacccctagtcatcctttagacctttgttgctttattttctttacagcatgctactatttgaaattactttgtttatgcatttacttgcttattatctctttcccagactagagggtaaggactttatctgttttgttcgtcgctgtgtgtggagggtgataaaatatttaacaaggggttaggccgggtattcacccgttgagttggaagctgggacagggtcctggaggcttcttgctttgctgaatcttggggaagtctagggcctagggggtgggcgtgggtcccaaggaagagactaggatggccagtgtggagtggagtggtgtgctgtgggctgcagctatttaccaactggtatagaactatttcagtatttgaacactatcaatttagagctgtgcctggtatgtaatgggtgctctgtaagtatcttttgagtgaatgaataatgggatgacaaaacatgaaagaaagaaggtaatatatgggaaactcctgaaaataatgaagttggacgtaaggtataaagtggtgtcttcccctttaccagaatatttgtagtcatgactgagccaactttggtttttaaagatacagaatcaaagtaaagagcatagaccaagggtagtaacaagtatacaaaattacatcactacctagcctttttttaaaaaataaacttgtattttcccaatttttttgtggtaaaatatacgtaacatgaaacttgctgtcttaaccattttaaaatgtacagctcagtggcattaactacttttcaactgttgtgccacaaacaccatggcttacttttgagtgtgccatcttgtggcacttttggtttctctgttagataatgacttcaagtatttcacagcttttgtgtttctatttccttatatctaagtggggggagactttttatgctttctctcatagagctgtcataaggatcaaaaaggagataaaatatagaccaagcttgtttaacctgcggctggctttgaatgtggcctaacacaaattcataaacgttcttaaaacattatgagattttttttttttttaaagctcatcagctatccttagtgttagtgtattttatgtgtggcccaagacaattcttcttcttccaatgtggcccagggaagctaaatgattagacaccctgatatagaccatcatgttcagtgatcttaaagccagggttgctggaatgatgtgggcactggagaccacagtgacacttagcagatgctaggcacccattttagggatgcctctactagtagagcatctcttcaccccctgcattgtgacattgtgctccttgagatggaaggctcagatttaagaagagaccagctttgtcagaaaggtgtttcccttccagggcaacactcagtgcagttttgaagttaggatgtttagatcattgtagcatctaaaacactctgatatgagtttgaaaaagatggctttttaaaattatgagtatgaattaattaggttcttgccatgtgcttaaagaccaagtcttcactagtacctgtgttactatattgttttcagttttgcaggcctaggtcaaggagaatttggatcaggtcaccgtgactgaagaattggaaaataatatgtatgagaagatgttaaaataagtgtgactgtatagcttagaaaattaagttcagagttaaagaaatacagtttttttttctgttatgtggaggatgcttaaacagaggtggtagccacattatatactttccttacccacttgttaagtctttgcattgctaaattagaggtctacattgtggattaactgagactagcctgaaccagatgtcatgtctgaattgggaataacaagcctgaggtttttagactgtctaaccatgtctgtgttggctatttattttgtagactacacttaagacctaagtagttatactctactgctaagtctgtgactaattgcaaagaagccattctccatttggcttagtggttgtgagcaatgactttaacatagccacaggctcactgggctttgaatccaattgttagttgtatgccctgagcaagttaacttatccaaactcctgtttttttcatctttaaaataggcataataataccctattttacttgcggtgaggactgaaggaggtcatttatataaaggtgtcatcggtgcagtgtctgacgttgtatgcacttaggaatgtctggtggccctggcagggaagctgtgtggccttccacaaagttttctgacccagtctcctacttcctatcactcacttttgtgcgtagaccctttgggctacctccctgatgatcggacagctacttcccctctttctgtctgcccatcttcctcttgtccatcatatttttcacttaaatacttccttggctcagtaacaacactcatatggttgttaatctgattattgcttagtataattcactggaaggtaggagtatatttctctccaaggatgttattttaagggaatattttgtttaaaccaaatgaatttgtgagatctgtagtcaggtattcattagttcagtaaatctttgtttagctactatgagcccttcctagcactatggtaggttctagggaataaaatatatatacatataaacaatgcctagcttaaaatgtgggacaggtgagcaataaacaattgtttaaagcgggcaataggtacaattgggtaaatatgaatttatctaacaaatgtttttttgaggtattttcatgtaacaggccttgttcctggagttgaggatactaaggtgaatgactccctgcctgttggtgtgggtgtggagggctgggttcagacctggagagaggggaggttccaagatggtcaatcccagcaggccaggttgctgaggaaccatcagacagggagaatagcatgaaggtgatgatgctttttctggtggtaggggagtgaagggaggctggaagaaaactagttattttaaatttttaatttaattttattttaaatgtccgttttgaaaaggggataatctaatgagaagataggggtgtttttttcccttacaattaaaaaaactttaaaaagtggagtaaccacattgtagaagaaatgtggaaaaattctctcgcagttctaaacctgaattatttattaggtgtgattgcagtgtagttttttgagccttttaaaatttagcctatgtatgttttgccattttgctattcaggtgaccaaataatatttcatttagagagaataccattgtttaacattttagatttctttcaaaattttttataatgtaacacatctctttctatattataagtgtttcttttcgtggatttttgtctttagagtgccagaaatagggtaaataattttaaatttcagagtttttaagactcttggagcatattgctatacttaagcaagtttatactaaatttggtattatgtgaaatctccaatttcatgtaaactttgcatattgggtatgaacattacagttttagaaatttaattggtgaaaaatgctacctcattgttttagtaatcatttttttgattaatgaggttgattattctcatgtttttatttatagatttattaactgtttgaaaactttgtgtttttatatttgtttcctatatttagaccattttagagtggataagtgctattagcctccattaaaaaagtaagttagccaggtacagtggtgggagcctgtagacccagctacctggagactgaggctggaggattgcttgaggccaggagtttgaggttgcagtgagctgtgatcacaccactgcactccagcccagaccctgactcaaaaaaaaaaaaaagatgaagtcattttatctgtgtctatttgtttcaatagatacagactactagaaatcatgcccatcagtccaagtttctgtaaaaaattaggaagtccatagacctttcctgctgttactcattagaatgtcagaatgctctattaaatacttctgtatacctgaatataaatgtgcttaattggaactgctgataatggacctattgatttttgaacattaagccgtctgctgagtatacagaaattttaacagaacagtattatttaaaagtggttagagtgtgtgtgtttaaatcattggacactgatatacccagacaattaactgtgattttgtttttgtttttattgtttggaccaagtatattattttgcttatattttgactcacaattctgtaaattctgatttcagaactactttacattgacattaaaaaactgtagattaaataaatgtcatttaaaatgtaggtaaaattatcaaaaagttggttcaaaataataaaggcatttactttaaatatttattgaaccaataatatattagatgtcagctactagtgttctgtcatccttctctgtggcttgttggtaaatctaacggcagtgtttgcttctgcttatagaagttagtggagaggaagggaggggaggcacatggctggggctgggcaatttcctgtttgcagttccttccttttgtagtttgataggcaactcttttgtgatgttgcctgtaaatgggccagtcttttatctttgtaggcttgtatttttggtggctttgaaacagatcaggctccttaaactcatacagcattttcaatttcagactctttgagactggacattctgttagccttctgcatatgggtagagcagtgtcacctcttaacttttcttgcctgtttcatttagctgtgggcgaggaaaattagctgtttgcttttcattactggaagatttatcaagttaaggtgcatcaatcttttcagtttttttttctttttttcttttggcatcctgataataaacttcctttgtgttgtaaataagctctcaaatttatatacacatacacagctgcacacacaggcatacatactcactgcatttagtactatatatttagtagggatgcactgtgtatgcttacagtaatttactcacaaatttctgaatcttatcagtagctttggaataacatatactttctgtgtgaagaagctaacatccatttgtttcattttaggttggtgcaaaagtaattgcggtttttgctacttcaaacaatatatactgaattaaggggatgtacttttttttagcacttgaaattatttatttaccagtttattatctctccctttaagggaaaggactttgtcttattttccacaatagccccagtatctagaacaatgtctgacacatcctaagcgttcaataagtgtttgtgaaatgaatgactgtttaattgataaataagtcttggttgacttccacagttttgtggaagtttaatatggagtaatttaaaacctgtgatgtgcttaaagataaattatgaagtcggtactaattgtaaaaataacagcaagaatcagtgttgcaaagcattaactaattttcttaaagttactgagtaaaacaaagtgtgttatatagaactgaaatgggctttgttaatactgtacatacaaacatttgaaattaatattgtggataataatgttaattttactctcagcattgtttctgtttttctcaataggtgaaactacttatttatacatataagtatttgctactaagtgtcaacgatttttttaacagccatccttgcagtctcaggataatttccagttaagaattaattcatggggccggccacggtggctcatgcctgtaatcccagcactttgggaggccaaggtgggcggatcacctgaggtcgggagttcgagaccagcctgaccaacagggagaaaccccgtctgtactaaaaacacaaaattagccaggcatggtggcacatgcctgtaatctcagctactcaggaggctgaggcaggagaatcacttgaacccgggaggcggaggttgtggtgagccgagatcgcgccattgcactccagcctgggcaacaagagcagaactccattaaaaaaaaaaaagaagtaattcatatgcttgaaagaggaatactagaaaatttttaattagagttggatcttgaaaatttttagctgcatgcattcattatgaaaaaaaaaaaaatcggaaaggaggtactcaaagccctgaagacattatccattatcagagtgtgacttgaaattgtttgccgtgcctgatatgagagcatgttctgtacatgtctacctaggcttcacctggcatttacccgagtgaggactatcagtgttccattttatacaaatatctgaacagagcaggctcacatttagacgtattccccatgcagagctacaggcttccaatcaatgagatgtttactagaatatatacagaaactgaaggtaattctttaaattttttgaaaaatgaggttatttggctgcctggtaattgcagcatggtaaaatttgatattgaatgtatttgattgtgtttactgttttcttttagttttaaaaataaacatcttaattagaaaaaaaagacccacttttgcaagactggtgaagtatctccacagaacactcactaggaagaacccttctgcagtcctgctttgtcatatttcagttggagaatctgaacccagagaggtcgagtaccttgtccaagatcaaacccagctaatggagaaggactagaaccccgatccctaagtttctagctgggagctttatccagtcatatagcatgtcaccgagcactgctggtcttggtatattatactacatctaaaccataatagtctgcaaaaagattagaaacagcatgcagtgtggaagagtagaattttctatttagaaagcagtgttgtagtgtttcaaatacactagtcatacagtttcttttccaggtagcttctgagctttgattctggctaatggggctaacactgccaaaactttcgtgtaccaaccagggacaatggtggttgttctcatgtttactttggtgatgtccatggatgtgttggggtaggtctaagtgcaaggagtgatagggggataagagaagcaaggaatgatataaagtaggttgggctggtatcttaggacagagttttccaagctttattcactgtaattcaccataagaaacacattttacattgcagcctagtacacacacatacacacacgccattcacatgtataattgaaacaagaggttcatgaaacaattcttacaaggtgtaaagcatactgatattttatattctgttctattttatttaaaatatgtctttacccatcaaattgacttcactgctcactaatgggttgtaacctgcagactgcaaaacatagccattggagaatctacttactgtgcttagatccagaaggttcttgaatgttcttagggcattgatttttggcattgaatgagcaggtgattgtttgattgctctgcatctaggctagtttgcaattaacatgaatggcttaaggaaaactgaaagtattctgaagactgctctctctaaacatcaagatgcatacctgtctctggatggtttttattcagttggtacttgactttttgggaaaatctgagtttgttttaagccttcaaataatatgatttatcttttcttatctcactttcatttgaatcactgtgttacccttaaagccctctcatactcctcccttcttcctggcaaccaaaatgtgcattgattcagtttgggagaaccttgattgagaagcctgtagctaggtcaacgttgtgggccctgaggagccagcgctgagcctgccttactgggtctgtcattttagtatctcattgggcttagtttctaagtgtgggctgaaaagttatataatgtcccattcacctcaagacatcgaatcttaaaccttaggtttataagggttttcttgattgaataattttaatttatgtaaatttttatttcaagaaatgttttctatttgatagagtgagtaaaattgtggcctttcccctattttggaaagtgaataaattcattaaacccctcttcatgagcactttctgaaattttaaataaaagaagagctaaccgcttgcagtgagctgagatagcgccactgcactccagcctgggcaatagagctagactccgtctcaaaaaaaaaaaaagagctaactgcaactgctgttgagtttgctgtgtgttcagttatttctaagatttttagtgttcaaaatagggttgccatgctaaaaaacagactgtggccatgtaaactactaggttcccacgtcaccaacactctgtctctgtgtctttcttaattttcttccttgttgctcttctgccttagctttgcttttcctgtgcctatcttcccaaacccccgtaacaaatgcttgtaggggctttgaattttcattatggaaattcaaacttttaattgatgaggacttaaagccaggggtgtagttatacagcaaattcatgggtaataaaactaaatagtgggatggctggcgtggtgtctcacgcctgtaatcccagcactttgggaggctgaggcgggtggatcatgaggtcaggagatagagaccatcctggctaacatggtgaaaccccgtctctactaaaaatacaaaaaattagctgggcgtggtggaaggtgcctgtattcccagctactcgggaggctgaggcaggagaatcgcttgaacccgggaggcggagcttgcagtgagctgagattgagccactgcactccagcctgggcaacagagcgagactccgtctcaaaaaaacaaaacaaaacaaaacaaaacaaaacaaaaaactaaatagtaggactgggaaagtgtaacctcagcctcaaagaaatattttaggagggctgcagtacctcatagagttatttaataagaaataatatttgtggttcatagtttcaaattaatgagcagacagacaagcctttccatgtgaatatacatactgtaggatgaatcagacaattctttcaagagtgggtgtacgagtcatttagtgggcctgctttgggaaatttcttaatttaagaaaccataattcccttctctgataaacctttcctgatgttttctccctagtttttctgcctacccctcactctctgcctcccagctcttcactgtcattttcttactatctgacttagaacatggctcatttatagcttttcttacttcattttgcaattaattgcacataatatgatctactaggatgagctccttgtacttacttgctttgcacactcgcccttgtaagaatgagctttttgagtaaagggataactcttacatatttttttttcttcaacttttattaagttctggggtacatgtgcaggatgtgcaggtttgttacataggtaaatgtgtcccatggtggtttgctgcacagatcaacccatcacccaggtattaagcccatcattcattagctattcttcctgatgctcttcctcctctgaggcacagtgtgtgttgttcttcactatgcgttcatgtgtgttctcatcgtttagctcccacttatgagtgagaacatgcagtgtttggttttttgctcctgtgttactttgctgtggataacagcttctaactccatttatgtccctgcaaaggacatgatcttgtttctttttatagctgcatagtattccatggtgtatatgtaccacattttctttatccagtctattattgatgggcatttaggttgattccatgtctttgctattgtgaatagtgctgcagtgaacatacacgtgcatgcatctttgtaatagaatgatttttattcctttgggtatatacccagtaatgggattctgggtcaaacggtatttctgcctctaggtctttgaggaatcgccacactgtcttccacaatggttgaactaatttacactcctgccaagagtgtaaacatgtccatttttctccgcagtctcaccagcatctgttgttttttgactttttagtaatagccgttctcactggcatgagatggtatctcattgtggttttgatttgcatttctctaatgatcagtgatgttgagctttttttcatatgtttgttggccgcaaatatatcttcttttgagaagtgtctgttcatatcccctgctcacttttcaatggggttgtttggttttttcttgtaaatttgtttaagttccttacagactctggatattagacctttgtcagatagatagattgcaaacattttctcccattctataggttgtctgttcactctgatgatagtttcttttgctgtgcagaagctctttagttcaattagatcccatttgtcaattttttcttttgttgcaattgtttttggtattttcatcatgaagtctttgccccctgcctatgtcctgaatggtattacatagattttcttctgggtttttatagttttgggttttacatctgagtatttaatccatcattagttgatttttgtgtaaggtgtaaggaaggggtccagtttcaattttctgcttatggctagccagctctcccagcaccatttattaaaaaggctgttctggccaggcacgtttgcttatgcctgtaaccccagcattttgggaggcagaggtggatggatcacctgaggttgggagtttaagactagcctggccaagtggtaaaaccccgtctctactaaaaatacaaaaaaaattagccaggcttggtggtgggtgcctgtaatcctagcttctcaggaggctgaggcaggagaatcacctgaacccaggaggtggaggctgcagtgagctgagatcgtgccattggactccagcctgggcaacaagagcgaaactctgtctcaaataaaaaaaaaaaaaaaagaaaaaggcagtcctttctccattgcttgcttttttcaggtttgttgaagatcctatgtttgtaggtgggtggtcttatttctgagttctctattctctccattggtctttgtgtctgttcttgtaccagtaccatgttgtttggttactgtagccttgtagtacagtttgaggtcaggtagcgtgatgcctccagctttgttctttctgcttaggatcatcttggctattcaggctcttttttgattccatatgaattttaaaatagtttttttttctaattctataaagaatgtcagtggcagtttaatgggaatagcattgtatctataaatgacttcgggcagtatggccattttcacgatattgattcttcctgtgcgtgaacatggaatgtttctctgtttgtttgtatcctctttgatttctttgagcagtggtttgtagttctccttgaaaagatccttcacttcccttgttagctgtattgctaggtattttattctttgtgtgctaattgcgaattggagtttattcactgtttggttctctgcttgcctgttgttggggtataggaatgctagtgatttttgcacattgattttgtatcctgagactttgtggaagttgcttatcagcttaaaaagcttttgggctgagatgatggtgtctcctagatataggatcatgtcatctgcaaacaaagataatttgacttcttctcttcctatttgaataccctttatttctttctcttgtctgatggccttggcgagaacttccaatactatgttgaataggagtggtgtctcactcgtatttgtatctccagtacttaacatagtgtctgtctgtgctattttaaaaatttatatttatttttattttttaagttgacttcgtaattgtacatattcatgggatacatactgatgtttttttaaaatgtacatgtaatgcttttatttaaaaaaatcttttattttaggttcaggggtacatgtgcaggtttgttgtagaggtaaatttgtgtcataggggtatgttgtacagaatatttagtcacccaggtactaagcctagtacccaatagttattttttctgttcctctccctctgccagcctccatccccaagttggcccaagtgtttgttgttcccctctttgtgtccatgtgttctcatcgtttagttccagcttataagtgagaatatgcagtatttggttttctgttcctgcaatagtttgctaaggattatggcctccagctccatccatgttcctgcagaggacatgatcttattcttttcaatgactgcatagtattccatggtatatatgtaccacattttaaatatccattctaccattgatgggtatttaggttgattccgtgtctttgctattgtgaatagtgctgcagtgaatgcacatgtgcatgtgtctttatgacagaatgatttatattcctttaggtatatactcagtaatacgattgctgggttgaatggtatttctgtttttaggtctttgaggaatcaccacactgctttccacaatggttgaactaatttacactgccactaacagtgtataagtgttcccttttctctgcagcctcaccagcatctgttatattttttgactttttaataaaaaccactctgactggtgtgagatggtgtctcattgtggttttgatttacatttctctaatgatcagtgatactgagctttttttcttatgcttgttgactgcatgtatgtcgtcttttgaaaggtgtctgctcatgtcctttgcccacataatgaggttttgctacatgtgatatatagtgatcagaacggatccaggcaatcagcatatcaatcatctgacacatttataatttctttatgttggggacattcaatatcctccttctagctatttgaaaccatatattactgttaactgtagtcatcctacagtggtatggaacactagaacttaccctatctattaatagctataattttatatcctttaacaaatatctccttatcccctgtattagtcctttttcacactgttgataaagacatatctgagactgggcaatttacaaaagaaagaggcttaatggacttacagtttcacatgactggggaggcctcacaatcatggcagaaggtgaaaggcacgtctcacatggcggcagataagagaagagaacttgtgcagggaaactctcctttttaagaacatcagatctcatgagattcattcactatcacaaacatagcacgggaaagacctgccctcatgattcagacacctcccatcgggtccctcccataacatgtgggaattcaagatgagatttgggtggggacacagccaaaccatatcattccactcctggtccctcccaaatttcatgtcctcccatttcaaaaccaatcatgccttcccaacagtccctcagagtcttaactcatttcagcattaactcgaaagtccatagtccaaagtctcatctgagacaaggcaagtcccttccacctatgagcctataaagtcaatagcaagttagttacttcctagatacaatgggggtacaggcattgggtaagtacagccattccaagtggaataaatttgccaaaacaaaggggctacaggccccatgcaagttcaaaatacggcagagctgtcaaatcttaaagctccaaagtgatctcctttgattccatatctcacatccagtcctgcccttgactcctgtcaccaaggttgcagttgcaaggctttcaatttgaaatcaactgcttgttaaaacataggaatggacccatcctgttcaaagaatgtaggaatatgtgataactctcctaatagttatcagttcctaataggaactggagaatccttgaatctcatcagtttgaatgtggtaaagtatttatattcccttcaaaaatgtctgaaattttgagaaattcatcagtacttgcaagtgagttggagttttagcagcaagctatgtattttatccagagtcaaattttaagtttttagcctgggacctgggaaacatagtgaaaccttgtctgtataaaaaataaaaaagaattaaccaggtgtggtggtgcatatctgtagtctcagctacttgggaggctgaggcaagaggattgcttgatcccaaaactttgaggctgcaatgagctgtgattgtgctactgcactccagcctgggtgactgagtaagactctggctaaaaaaaaaaaagaaaaaaaaatttttattttagttttttttccccaagaaacatatctttgaaatgtaatgaaaatagtgacaaaatggggataacattttaaaagtttctaaaatcattttttttccaagacggagtcttgctctgttgcccaggctggtgtgcggtggcacaatctcagctcactgaaacctctgcctcccaggttcaagcgattctcctgcctcagcctcccgggtagctggattacaggtgtatgccaccacgcccagctaatttttgtattttagtagagacagggtttcaccatgttggccaggctggtctcacactcctgacctcgtgattgcctgcctcggcctcccaaagtgctgggattacaggcatgagccactgtgcccggccagatatataaatttttaacaaaacccaaaaacatttggaatatcctggcattgggctgtgtttaaaaagtatattagactttacacatgtgtactgatgaaaatattttacttctgaattaatagaggaaattaaagttgttaagatccttttattacaattaaaatttgggggatttaaccacgatggtgatcaccgaattctcgctattaattcaatttaaaaaatttttatctctctcctgctcctttttattaaggaacattggttgatctagacctcaggttaagtacaagaacttcaggatgagattggaggtctctgacttttactgtgttactctagcaatgcggagaataatttctcctctgaagaactgctctggtagagctgtatagtgatttttttttgttcagttataggaaccgatacatcttagagaagatctctccctgacctacctaaccagcccacccttctccactccccatcctcaccatactggtaaacctggataaattaacttgtcacaggaggcagaactgacaggcccaagagcctcctatattattggcattccagtcctttgcctctaccttcgcagccctcagcttacttcgacacccatagtgcaagggaacactgttgtgtgaataaccgcttacctcttttctcctctatcactctttcttgttgtctctgtgtacctttccctctccatttttgtttttgtttttcctactggttccatctctttctccttcctgtgttctgatcacttctctcctattgctttaaaaagttttttttcttcagacaagaatgaaaggaatctcctattggtttgtttttccttccttttcctcctttcttagttggctgtcggagttttttgggtgtgtgtaacagaaattgactctgacttactgaagcccaaaacttagtaatgaatttcctggaagtttagtcaaaagagggtagtagagggctgctgtggccttcccttctaataaaaactctttcttcattttaatgggaaatagtattttcctctctccttttgtgtgattcatttgttcattctttcattgaacaaacagtcattgagcacctgggccagacaccccttctgagctctaaggatatggtaatggacaagagagagaaaatccctgtcctgacagagcttagattttgctgggagaaacaaacaaataagaggtcagtgataatggcaagttggtgatgtgctggtgactggctggctacttcagattggaagttcagagatgccctctttggggtggtgatgctgataaagaggaagaacattctaggcagagaacaacacatacaaaggctttagagtgggaatgaactaggaaaggctgaggaaccaagacaaagctgctgtggctaaaaaggctataatgcaggcgatgaggccaaagtctctgctagggcttgtatgtgagagcaagttcgaattttattcttcgtgacctgtgggtctcttagggagctgaaatgacctgacgtacacttaaaaacactttaaaaactcaccttttagaatgtcacttgaagctctccatggtacagttatctgtatcgttccgatttctcttatgctactctgccataatgctctgattacttaacctttaaaggtttttgtgaggagtacttaaagtgggggatctcctgggattagatctgaaatgatatacaagggatatgccatgaggtcaggaacatacttgctttgttcttggtattatccatggtgcttggtactggtaagtctttgctgaatgaagaaatgaattacctggtgtgtagaactgtggaaagctctctgtttttctccttttccttcctccttcttcattttccttactaccaggaaacctgccattcaagtcttgttgctcataggaagatgggggtgagaaattgctggccagggtgaaggggggctgttttctggaagtagtgaggtctgcctacagtagtgagccagaataggagggaagttcccagttactgcagggaaggtgggtgaacttcctgtatgttttatatatatatatatatatatatatattttatatatatatattttatatatatatattttatatatatatattttatatatatatatagtatgtatgcaatggatctgttgattgggtttaagttacttttatttaagctgtaattgtttcagttctgctgtttgtggaagttagtaagctaaagtatgtagggaacatgtttacttaaaaaaatctatgcacatttaagaacgattaattctgcagctacttgggaggctgaggcaggagaatcacttaaacccgggagatggaggttgcagtgagctgagatcgtgccactgcgctccagcctgggtgacaagagcgaaactgtcaaaaagaaaagaaaaaagaaaaaaggatgattaatttctgttatcttctcgaaggacaatactgtcatgtggcacatgtttgaacagttggggctaatgcacagaaaaattgccacagaatcttttctgcaaacacctgactgatgggcaaaactcttgtttctcctgctttctctaagcaacaactcttgtaaatactggaagagaacaaccagttccttgtttgtgtgcattgttagttttctattcttcagtgagttcaaagaacagtagcttacaagttactatgattctagacctgagatttagttcacatgctttgtggcttttgtgttagaagtttggataacatctcacctgtaaacttcctgaaatttgaaaaagaataaaatgactatatatgaaaaggcttcttaaaattttaattttaaaaacaattctatgtacagttccttaagtatatactctagttactaaaataaatacattgggttgctggtctaccaccttctctcttcgaggagatcacagactgcctaaagttgccataagtacatgggaagcaacccccacaagtttggttccatccctggcaagtttggtaggcttcctcctgttattcccagaaagtttatgatctttcttgttcacttttctcctcaattactttccttccagtgacagcaagaaaatttcctctcatatttgccctgctttccactgcctcagatttgaaatcagctgtaatcacaatgccaaatactgaggaaagttatgcattttgaagcagaattgtatataattaagtaccaatcaaaacattagaaataattcagggttcactttaaagccattatagatgtattccttgatttcttcaagtttttctaatttagctttccctcaagtattagcattgagggaagataattaacttaagaaactaacacacttacttaattattttagttttaattttgaaaatagtgtcttctactacattttattttagatatatgattttaatgataatagtgaatatattatcatgtttggactagcttaggaaacttaaaatcctaagattttgtctttgggaaaatatttccagaagtcaaaatattatccttggcaaggcacaatggctcatgcctgtaatcccaacactttggaaggccaaggcggtaggattgcctgagcccaggagttcgagaccagcgtgggcaacatagtagaccccatctctactttaaacaacaacaacagaaaacaaaacaaaacaaaaaaccgcatattatcttttacagataaatgtttggagtataatgtatttgcaatttaaagactttctataattgctaacaggtgttaagaggatttaaacatccagtcctggtctgttacagtggatctgcatcaccatcttcattacaaagttatggttccttgccttgtaaacttgatccaattcagtcctgggtttaaataacatacttttttttcattttctttcttcatttggaaagttttatgaaatgaagctcatgatatacccagaagtaagcagtgaaactcagcaccaggagtttttaacatgaaaccattcagtttgggagtatgtattattcaagtgatattctggagtgagtctgtttttgcgttttatataaggactaccttttgatgatgaatgataaatgttctacagggttatatttagctgcatgttgtaacataacagtattttgctcagcttgcgtaagactaagggactgaggttattttggggcgacacattttctcctttcccccattaacgtgtccttttaggtttctgtgtgttaagaacattggcttggtgtttcctttgtttgctttataaggggttggactagtttactgtcacacaaccagctcagtgaggtctatgctggtacatgaactcacctcaggcagaagagaagcattgtgtcactgagacaatgctagcaagagatgtgcatttgtgctggctgtagctgtcagttctggaaggatatctttttaggctgattatgaaaattctggttgtaatcaaattagatgggaagacacacatggctaatattgtctgccattctccctaaattgcccatcaaaaagctcccactggtttcactctaattatacccatgagaggggtgagagagtatttctattctaaacgaattgtcaaataaataaagtctgctgtttgttgactgtatgttaaatcccagcttcaaattaaactgtaaagagatgtcacatgagggtatttcagagcaaacagcacctcaaacaaaaaacatactcatttctagacctcattctcatgaggattcaaatactgaaaattgttaagtatttttagggtagaaataagtgatgtctatagagacctgatgtcaggttctgcttaacttctatgattagccttgcctccatatttgttaagcaggtatattgtcttatgctttgctgacttcataatctgtgatttataatggactcaaaacttgaagaacaggaagaatgactttattttacaacatgttcaaccaaagactgtaggaaacaaaagacattcattcttactctgttttaattagactatttagcatgatagatttaaaatagactgaatataatacaagttttaaatacagttgtgtttctgatttgtaatcagactgactttcctaattcatatgtgattaacattgaatatttctatttccacaagcaattagaacaaagtggaattgtttatgcatttgagaaatgtataactttttcctatttttaaaaaattataaagttgaatgtagatattgttttctgagtcactggatataatgggaggaaatgattaagaaaataatgttgctaaaaataacaaaattaaacaatttgtttgtgtttgtgtatcacaattaatgctgtctttaggaaaaaacagtttataaattaagtgccctgacatttaagaagtctgagaaccaagttttgggagccaaggaagagactttaaaagttttatgtttcagctttttgcagagttttttgccttgcagtgcatttttatgatggacttctgtttctatgctggacttcttttcatggacttgtgtggttcattctttgcaggtaactggtgagtgctttcctttcctaaaaacaaatccaacttgggaatctaattcttttgttcatgagacattcaaatagaaaaaatgaatacagtgctagtaacagtaactcgcttcttatttcatgtactttgttgcagaaagacatggcccacctcagggatcttctgatattttgataatgggtttggtaaagcagggaccagtggcatttattttatggatgttgatactaaggcatcaggagactagggaggctgtttaaagaggcagaactgagagtaggatcaacatctgtactctataatcagagggttgaactaaatcatggtcttattagggacatttacaacctcatattctgatgtttgtatacatagacgggctttagggtgaaggtgtgagaaataataacagtgtgggtccagattcacccagagacagatggtggaaaggaaaaaaaacattttgggaccaaagtttatctcctttttgttgtcccttgctgtagaagagctatgtgctagatataattttgagcactttacatacattattaattcatttattcttcccgacaaacaaccttatgtgatagttacaattattatcctcagtttatacctaaggcaatggaagcatagagggttagtttcatgccactaatggggaaagaacctgtgtctatgtcatgcttcccctcgtataaaacgcccactatttgtgcaatcgtccatcattttttgagtgtgtgctacatgccaggcatagtgttgagtcctgcagataaaaaagagatggaaaccttgctgtcattagtcttacagcctacttggggagacaggctcaatcaaataaccacagaaacaaactggtatacgaatttgaaggagaaggcagagagctttgagaacataaggcaggggcctgatcttattgggttgccaaaaagactgtctcactttagagctgtgatcccaaggaaacggaggaggtggcatctaaacactgcgatgatgcaaggtaggctcaggttgagtctggtcacttcataggccattcccagccccctttagagtccttgaagtcagtgtctttaagctccataatggagatttcagactatctctgtgccctcgtatatgtgcaggttcctgtgcaaattgtaagcgttaagtaaatatatatgctgattgaattacagtcatctgtggtgatttgtgctctgttccacctcctgctggctgcgttgtatcccatgttggaagtggctgagtgtggcttcagaatagacacagaggaagtgggagagtgaatatttggatgagggagtatgccttgactaaatactttctataagcaaatacaaatcatatgacctagagcttttattttttaaaatcagtctattgctttctcttgaagcacatcattggtgaattgactctatttggcttgatgctttcatacaactgggctgagaaagttcattttacccctcttttgggcattcccactatagttgtagtgatatagtcttttaaaatctcattcaccaattattaattaagctgaattaacccttttgggtagatgcattcttatccttatatgtttaaagtagctgttcattaaacataggttttttgctgagcatctatctgacaggaggcatctgaaggtttataaaggtatgggaagcttggttacttgagctccagaagctttccactttagtctaaaggaaactaattacaaaagagctgtgaggggcccatcaggatgtgcttatgagtttctatgagggagccagactgactgtgtgaccttgagcaactaattctcagtgcttttcctgtaaaatgaaaatgggaataataatggaacctaactcggggtgatgtgaggattaatgaaccaagttatgtacaatgcctagaagagtgcctggcacatggtatatactgttaactttttgtttttattgttgtcattattgtgatcattatcacctatagttgagtgtcatattctggagtctaaagggtaagggaaaaggttctgagttggagaagaaaggcatcatgggacatagtatttgagtttaggtctaatgaaatataggtctaataggtagaaatggtgaggaaagtattccagaaaaacaacaacaacctcaaataccagagatatcaggtatgtttagggaagggtgaggagtccaggctagcgggtagggttcatttgaggaaaaatgacaaatttacctgaaaaggcaggctgggacgatatcttggtgaagggttggcagtctggactgggctttttgagcagggttgagactttccgagccctgctctggaactactggagtaggcaggaggtggaggcagagagaaatggtgttagtcctagagtacggtgataagggtttggataagggtttgaaataacgtgatgatgattgtcatggaagaaaggtccaggtagttcactgcggaactaatgaaatttaagactcagggccttttcttgcttagttccgtctctcaagctgttgaagggaaaattttttgtaaaatatgaaaagatgtttgtatcctccgtctttgctccccaaatgatgtgtttcaggctcccaaacctggatctaccccataattgaaagagactgtggatggccaggagtggtagctcacgcctgtaatcccagcactttgggaggctgaggcgggtggatcacttgaagccaggagtttgagaccagcctggccaacatggtgaaggcctgtctctacgaaaaatacaaaaaagtagctgaatgtggtggtgtgtacctgtagtcctagctacttgggaggctgaggtgggaggatggcttgagccttgggggtggaggttgtagtgagctgagattgtgccactgcactccagcctgtgtgacagagccagaacctgtctaaaataaaataaataaaaagagagagactgactgtgactgtgaagagataatcagtctgggtattgacttgatgtggctatcacgtgatggagaggccaaggtcaaagatgacttttgagattctgggtctggctgactgggaggaacccctcatgagaaagggggatgttgggagcagccagttagggtgcggtagtttcaagccaagtgagtgctctgcactggttagcttcaccagtaaaagaaacattttcttcttatatctgcccacccccatcctcaattgcagttttgcaagcatgataattgtaagttacacagtgctaaggaaaggactcagcatttctgctgattaatgggcttcagcccaaagcacacatcatagtgatgtctttgtaatgtccacagttagtattctgtgtattctaaacctagttgtctgaaacttgtaaatggagtctctccttttttggcataagtcttccacatttggtaaatcatagtgctttaagactattttaaagttgtaacatcagttttctggaaattgtattttgaaggaatttaattgactaagacatggttgaaatgttaatttcaaagctatcgtgccaatgttccagtggcagcacctacctgggaaaggctattgtcagcatttgtttcctctttttcacacaagtaaaatattaaacaaataaaattgaagaatactctttcagatggccaaattgaatcctcaagagtattttcactttccaagtcacaaaatataaatataattaatgtaggggcacagatttcacttttaaatatatatatatatacatatatatatacatatatacacacacacacacacacacacacacacacacatatatatatatatatatagtgtgtatgtgtgtgtgtgttatgctttgctgaaaaggtttttttttttttttttttttttttggaggaaaaatagcacctaaaaacaaagctaaaaacatagtaaagtttgaggcaaatgtccccagagaaagatcattagcaaattcatgacccagagtctggttgagacttctctatgaagccatttattgttttaagaatctccccttgtgtatcagagaggttgaattatctgagtagagaaatacagttgtaaattccaaaatgcttcagaaattcacatattattttggagcaggtattaaggatttaatgactgcaggatttagtttaaaaaaatgatttagaagtatttgcagatgaattctaagaggattctatataacttctcatgttggtctggtgttcctctataaaattagtacagacttgatatttgttacattgtttctcacggtgtagtaaacacaaatatttaaaattataagagttatgcattttaatattcatttatgtatagactcagtggcgggttttcccatttatagcaatgatataaaacattttacatcaaattgatttaagtcaaaagtaaatgtgtgtttaaaaagaatgaatggtagtacatggtggtacctacggcagaagttgggaaagtgcatgattaactaatgggcaacattggcttactggtaaacaatataaattgtgctggtttgtagtagggtaaattttattacgctgtttaataaaacctcatagctgttgataatatatatgttaagatactggctctttaagaagcttttattaaagaaactaaaagttatttaagttcttggtacctggaagttaattaaacagaaaaaagtcactttaattgggtgactcctgctcagttaaaaataaaagtatatgttaaatgctatattattaatatggtttctaggacttcttggcaaaagtagggcaattttatcaaagtcgtgcatgtaccacccactaaaatgatgtggtacaccaaacattatctgtgcaaatgcttttgttaagttgtattagtcaaaagtttggggaaagttctggtttgggtttatatatgttaatacctagcgagaaaagtagacagcatattctttctttccccttaggagcacaagagaaaaaatcaagatatttagaagatgctttgaaattaatttcattcagaaaatatttttatgattctgctgagagaaggcaaaaatatttttagaaatattagaatatctggcaacaaattttcgagcattaaatatggattttatttttagaaagagtacacatttgacattgcataactaatttacttacttcacatttaaaaaacagatttgtgtatgtctgtgaaaaagacaatgtgttgatagtagaactataaggtagaaagttcctctttctccttctgatccttcccctgcccttttcctcaaatgtgactacaaactgttaacagtttgaagtcccctaagttttaaaatcaaatggaatgaaatggcatttaggaacttggaagagtggaaaccttttttccagacctatgctaccaactgagtttatattttcaggcagatatgatgaaattgctgtgggctttggagtcagcccactgttcgaattctgttttcatcctagagcaacaacgcgagtttggaaagttccttacctttcttactaaatgtcacttttcttctgagctttaatctagcctagtctgtctctctcctctctctctttttaataagcagacatgtctaagaagatctggcataagaatatgtgacatattttgtcctggaaaaatcgaatttggtattttaatgacccagcatgcattcatgcagtaatgcactcactcatcaggagaacatttccccactttgcccaaatacctaccttcaggttgtgaaaggtcaacctgtaaaagatgccccaggaatcttcctggaatttagatggcctctgttgggtttcactttgcacttattaataattgagcactgggataaaaataaaaacaaagggtctcatcttgcagtgtgagaacatgggccatgtgtgctaagtcatgcaggtaagatgaggagcaaagccctgtggggtagccaatctaaagaagcattccatgtgggctggtgcctccctcttgcagaatgactccctccaaattaaagggaattaacgtaattgctcctggggaggaaaatgcatttttgcttttcaaaggttgttgtctaagctttaattatctaatccacacacagaagctttctacaagcagccctcccttttagcaaccagtcacctttcaaatactgcggcatctttaggcttaagaaatcactgcattataaccaattctgttatataacctaccccttagggtacagtaaaacctgttgtaatgttggttactgaaaatggtctttagagctagtgttggtttaaatggagttttgtaattatttgagctgcaactagagtgacaattctccatttttagaatctgtgcctcttgtctggcagcacttttagttatttcctttctattgctttttgtttcacactcaataagctttggttggtgtgtgctttatcagaccttcatgtttacttgccaaatgaatatggggttttgttactaaagttagtatttttaatctatttattttatttttctttctttagaaaactcagaatggactcgttttctagtcctgaaatattaataagtaaacatgtaatatattcctagtgaaatagcttaaagctcaaagaaggtctgtaagtagaggaaaaccctactgttaagaaccaagactctgccattcttgtcattgaaatgcatagggttttgatgttgggacatactaaggaaatagtgccactaattttaggtagagaagattgtaggaattaagctcgtttctgactatagaggaaaaggaccaagaccatcggctcagaattaaaaaattaaattgctcttggaataaaattgagctctcccagtggtttgtattgctcttcacattccggccactgcctggctttctcccgccccctgtcctcttctctcagtcctagccacactgacctccttttcctccaacttaccaagctctttcccacctcagggaacttgtctttgtcattctcatgcctggatagccattcctccttccccttagctcttcctgtggttctccccatctagagtctagatcttaccctgaacatcacccagagacccctccctgactaccttgactcaggtagctgctttccaggcccctgtttatttacttttcagcatttaccttagactgtatttatttttgttgattattgtctttgccccacaagcataaattctattaagggaggtgccagtacctgatacagtgcctggcatatactatatactcagtatctatgtatattacctgggagttgttcactggttttaaggaatccttttttgtttgtgtctttaagattagttcatcttgtcagactagagggatttaagtagctttggtatcaaaatccaagataatatgttttccaatactcttacccatacacattttcacccattttattgtgattttattgagtgtctagagagcaacactggctttcctcaagagtaggctgaaaattcagtagataccccatggatattgtgctcactgtgagaagtctttcaaaatttaccaggcactgaaataactcacctcaggtcttcgatgaaggtcagggaggtgtgcgttggtctttggtgagcacacggtatattatgagggtacaactgtcgctgccattgtgtctgttcagtgtgcctttgtaaagagcctgggatggcctcttcatggatctgccctctgtctctaagcttacccatggagaagacaaaggctgctgcgcagcttcatgctgaaaaggaaatgttggcaagttgttgctttgtaaagatcaacactatcaccgtaacagctgtcactcaaagtggaggaagtgaaatgcaaatttggtgagtaattagttttgtgtcattcttgggtgttctaaatgttactatttatctgtcttaggtaatctatttaaagaagacaccagaagaagcctacagagcactcctgtctggctcaaaccccccctatcttccattcaggtataactcctggtgagacttgggttaaacttttgctacagagctggacactttagagttgggttgtagtgttttttaattgtcttaagataataaccattatgttatatggaatgaaatgagatggtagtttttattatttcatttcgtagagttttatccccctagctagcaagaataaaagagctttcttcttgtaggaatttatttttttctttgaatcctttctatatctttacagtttatgtcaagcacaaaaagtgcctcatttataagctaataatcatgtcaagatttgttggatttcagtaatctacatcattgattcatccattcattctttcatttcataagcagtgattgagctctggtcacatgtcagaggccggggatatagaataagaccctctaagattcttcaggagcacctgtttagtggggaccctaaatcaccagtttggcacacaaatctgactggcatccccaggaagcctttctctcattactgtgttttctaagtatcatcaaaagaagatcttttaaaaatttggggtgaacttgagctcatttaaaaagtagaaggggactgggtgcagtagctcatggctgtaatcccagcactttgggaggctgaggctggtggatagcttgagcccaggagttcgagaccagcctgggcaacatggtgaaaccccgtctctactaaaaatacaaaagttagccaggcatagtggtatgtgcttgtagtcccagctacttgagaggctgaagtgggaggatcgcttgagcctgggaggtcaaggctgcagtaagctgagatcgccccactacactccagcgtgggtgacagagtgataccgtttctcaaataaataaatacatacatacatacagtagaagggaccatacatcaaaactcccataacacttacctctgctagaattgtgaatgattctaatatttttgccttttttgcttgtgtgtccaaatctgcaagcatgtgtattgcttattgcttattattattaccataattaaccaacacaatgagcgaaaggaatgggagtgactgagaagactctgcttgtctgtcttcctcattctgctgtaaactctcagagggcaggccccagtgccttatacttaaaagcacttttagtgaatatttgaatgaatacattaagactaaatcccttaagagtcaagggattctcattctgcttctgagatcacaggaggtagctgttagggtaagacatggggagggaagaagcaacacctattgtgcttaattaaagtgaagtcaaggagtaaggcattgggatttggaccctgaggggaaaatattctgaatcaacctagagtctgaggtaatcagccgtggaagggcaaataaaaaatggcagataatgtagatgaaagttttaatggtgaagacaaagcttatttttccttccacttctaatggctcctatactttgaaagtcctttgtaaaatataatcctattttttcagaaaggggtaataatgctgataattctaagttctaagcaaagtggttaggagtatatactttggaggcagagaaacttcaagcagtttgaagcctcattctgcttcttgctgtctgtagtaaataagtatctcggacaaattacttatcctctctcagccacagtttccttatctgtaaaatggcttcaggtctaaactaaggatcaaatgaagtaataaatttatccttctgcctagtgcaatgtttggtttttgtttttcttgttgttagcattatactattattactgttagtaacataattaatagtagtagtaattattattacagggtcttactctgtcgcccaggctggagtgcagtggcacactgcaacctctgcctcctgggttcaagagaatctcctgcttcagccccctgaatagctggaattggaggcccccaccaccatgcctggctaatttttgtatttttagtagagatggacttttgccatgtctgccaagctgctcttgaacccctggcttcaagtgatccacttgcatcagcctcccaaagtgctgggataaaggtgtgagccactgcacccagtcaagaactagaattttaaaataataataccagaatagaagaaaagatagtaagataattaatactacttaacatagaattgatttcaattctacataaatactaaatttatagcctatttttcaaatatttttcactcaaatacttttatgtaaatatttgaaaatataaatacattaacatagttcagaaatttaaaaaatctatataggaaggtttaagtgaaaattatccctcccatccttgatcctcatctgtctagtcctttccaggtaacttctggtattagttgatttgatatcagtctagaatttctttatgcacgtataagtaaatgaagatatgcacccatttcctactaaaagtatgcctttgaatgtaactctaagttctatctttttgatatcttaggataccaagagttgtatttacattaagcttcatttctaaatctagaatcttcataaaccatacatttgaaacagaaaataccacaaagtagtacatttataatttagtgaagaatttagttgaaagaatactactagttttctggaaacttaatttttttattatgctaagataagatgtgagttgtttttagtctacagttcaggccaactaagactaatggacttctatcaagaatcatcctcatactaaattctgggcagccatcattgcgttggccttcattataatctgggttttattatcaccaggtttaaaaaaaaatcccatttcttatgaaattacacttttgtcttcattgtctagattttttcaactgctgatatattaacacttttaattaaaaatgagaagccttaaaggaatttctatttggatgtaattgttttattatttaaaattttttaaaaatgaagatgattttgaaggcttgttgaaggtgtggttggtatgttcatatacacttttcactgaaatgtctgtgttcccatttgtgctatatattttagtttctttctaataaaagagttttatggctactgtgaatttaaataatgctgtttttcaaatttttttcactttgcaaacatttatctgagcagtcacttctgtaaagccttcctcatttttctggagaggcttggcaggtcctttgcctgtgattccctattacattttatgtattacaaggctacatacaacgttaaagcaaacaccttgtattataattatttgtttgcatggctgactcttctcttgagggctgtggttggttcttttcctattgtgtcctgagggagcaagtatactaaaatatatttattgctttttcagtgccagtcactgtgatagtcctatggatcaaaagatgtttaggacaacttggtacctgctgcaggagagctcagtgtatagtctgtatacatgtataggtgtgtaaaacagttacagtgctttgttagaattaggagagaggtgttatgggaatactgaggaaggaggtttaactctgaaatgggggggtaggagaagatgttaggaataggccccatggaatgcctttcatgttaggatgaaaactggagaacagcaattcaggcactgattttaggtgctaattttatttattcgtatggcataggttgtataatggtatgttaggtagtatatataatacgaagttcacagtatgggtacattattataaccaaaagaatgatctgattttattcctacttagattctattcacctagttaaaattaacaaaaaacgagaattgtgtagctttaactgcctattcttgattaaattaagtatagttgactttagagatagttgaatttctggcttgtgtgacagcagtgagtgttgtgatgtcacttgtgagtcagtctcaggatgttctgttgaattggagggtaggtgtgtcaaaaactgtattcacttttactgagaatagccaatgtgttgattaagagtgactttaggtgaaaatcaggggaaaggggtgtttttcatctaccttaattctttgagtcatccattttcagtgttggcttggcagttagccttcaagggaacaagaggcctttcagttctggggtcagactcagcagagtttgaattgacaaactaggtatgaatctttttaggttctcttcctttcagtgtactactaaattatagtgtatactattgagcaaacaaagtcgtattaatctcagcttgtctaaaaccccaggagaccagtgacccttagtggaatgtccagattgttttcatggcagtcagtggcagtggttttcaaatctacattgttggtgctcacaaaacagtatttgtgaaaatttaaagtcccgcaaaacattgaaaagataaccaatctaaattgtacaattcttatttaagatgtctcttgtgcttttaaattcattttatacttatttctttgtttattggtccatatgtatcaggttggtacgttttttagtattggtgataattcctaaatctcctaaaagccagtttttaaaatgacatataggccgggcgcggtggctcacgcctgtaatcccagtactttgggaggtgggcgatcacttgaggtcaggagttcgagaccagcctggccaacaaagtgaaaccctgtctctactaaaaatacaaaaaaaagtagccagccatggtggcatgtgcctgtagtcccagctactcgggaggctgaggcaggagaattgattgaacctgggaggcagaggttgtggtgagccaagatcgcgccactgcactccagcctgggcaacagaacaagactccatctcaaataaataataaataaataaataaataaataaataaataaataaatataaaataaaatgacatatacaattaaacagggaataaaattatgctgacaataaataacatccagggatctagttctgaagacatatccagagagcatggcatgaaaaataatgactaagtctggaggtaaggttaggtagggtaatgtgctgacagtaatggaataaagctgtgaacattcgatgtcttatccctttagttttttcctaaagcttggagaagaggctagaatttacaggtgtttctcaaagttatgttgatcctcaaacttatctgcatacgtggggagctttaaaaaactactgatccctagattctgtgcccagaaattttgctgtaattggtcaagggtgaagtcagagttattgggattttgaaaaactgcatatatgatgccaatatgtgtggtcaaggttgagaactcctgctctgtaagatgtaccatggcaaaatatatatatatatatcaagtatatttatatatatattatatatatatcaagtatatttatatatatattatatatatatcaagtgtgtatatatatatatcaagtaaatttaaaactctccatcttggagatttacaaagcaaatttctgttttaaagattctgaatggttctgagtaatgaagtaacctgtttagctctgtataacccagaattttctttcttctttttgtttttttgagatggaggtttcactttgttgcccagggtgggcttgaactcttgggctcaaatcctgtgtagttgggatcacaggcatgcaccactgcatctggcccagaattttacaaagtactgattttcttcctcctgccccatactttccattaatatccagcagaactcctgttctgaaacactctgaggcatatttcctgatccacacctgtgtggaacaaaaaacatctcttgggattaaaataatatgctagcattttgtggaacattttttttatgctgtttcctgagagtcttggaaatagatggcttatcaaatcatggtattttatttaatgtgaacaggaatatccaagttttcttgctgttgtgaggccagacaatcttctctaacagaggattcacacccctcccactggcaatccttttatgacatctgtcattaaaatggatgcataatgtttgtgttgagggaggtgtttgttgtgttttgggggatgacccttagtgatatcccagttgctgagctctgtggctgagtcttaatgggaaatctcaaaagtaattattttagatcttctgggcatgccagaacttgtaggtctttaaacaaaggctcaaaagggtcaaccactgtaggtctttaaacaaaggctcaaaaagttggtcaaccacttaggacttggcatcaggctgccttctttttcataaagtaaacatgtgctggtagacgttagatgtaatcataaaatatatttccttacataaaacattgaaccagatttttattagcttaaatatgatattgtgatttttgtcgaagtttgtttagcaattaactgtacttcaaagggaaagttctccttaccgtgctttcctcttgagtatcaaaactgtggaaacaatattttatcctcttttaagatgttcctttcattctcaacttttcctcgctgtttctcagtcttgatctttggggtcatttctgccccatggatctttagtaaacttttgcttttggtgcttggtataatggaagctaattcgcgttagttttgactagtggggatgtgccaatttcctgagtgttgaaaatagatggcttttccagtccaaactgttgaatccattcttaacagctggggcatattttgaataagtgtacccccatgaaaaaagactctttgtcagagttttcttgttaaagtgctaagtaagctccgctatacaggacctgagaagagaaacaagtgtaagtgtctccatgacccattaagaactcacatggaggtgagttatattattctattttttgtctgctggaacaagaaggtgctttggtgatttgtgttgcgaaaattcgctcagactactttttttttttttattcctacctttagggttccagatcagttttaccaaacttagtgaagtagggtaggtgccaaagtttttgtactctttacggtatatttccagtagccttagttgataaatatggttttgaataagattgcagtcatttaccttaatgaacatagtaatagttattattttgttgaatgttatgaaaagctcttaaatacctgagttaaaaccaatttgccattatttttatttttaaagaaaaattgttggccgtgtgggtggctcattcctgtaatcccagtgctttaggaggccgaggcaagaggatcacttgaacccatgagttagagaccagtgtgagtaacatagtaagacctggtctctacaaaaaaaaaataaaaataaaaattagtcaggggtagtggcacacatctgtagtcctagttgcctgggaggtttaggtgggaggattgcttgagcccagcagtttgaggctgcagtgagttatgatcgtgctgctgtgacagaatgagtccctgtctctgaaattaaaaaaaaaaaaagaatagaaaaattactggttaaatgggtgtcagtcagatgttgatgaaatgcccagagtacaggtcttggtctgtttttctggtgttattgctagttctagacagattttattctgctgatttcaggtgaccttttaagccatgactttagaattgaattttcatgtatctctgtttctttagatgagtaaaatgattcctgtatagccttatgttaaatctgaaaagctgagattctgtttttttgttgttgttgttgttaggtacaggtcacgttcaactttgggccctgcctcctgaggcatgtggttttgctctttcatgaatgggagatggttttgtcctccctactaattctcaatacagtttcgtcttgtaggtctcaatgatataagctctttcttttattgtagctggtacatatatgtcatagatttgttcagaggctggaaactaggatgtactttggacaactgtgtaaagtattttgggcattgtctagctctgaagtatacggacaatatagtctgcagctgaactgtccagtatgttagctagtagctacatgtgttattgaacacttgaaatcagtctagtccaaactgagatagactgtacatttaaaatacatattggatttcaaagatgtagtataaaaggcggggtgtggtgactcacagctgtaatcccaggctgaggccaggagtttgagatcagcctggacaacatagtgagaccctgtctctcaaaataaaaagatttaatataaaagaaaaatgtaagatatcttatttataattatgttcattaatgctgaaatgagaatattctagatatattggatgagcaaaatacactactaaaatttacttttttcttgttagtttattttaatatggttataaaaaattaaaattatacatgaggctctcttttgaggatggcattatatttccattggacagtgatgatctagagtgtttttgctattgtacatagctcataattaaagattgttctatatactttctcctttatttatttgttttcagaaatagagtctcactctgttagcaggctggggtgcagtggccaaattgtagctcactgcagtcttgaactcctgaattcaaacaattctcctgcctcagccttctaggtagcttgctaccactcctgtctaattaaattttttttttttttaaatagagaaggggtctccctctattgtccaggctagtctcaaactactgggctcaagcaatcctcctgccttggcctctcaaagggatcacaggtgtgagccatcatgcctggacacatttttgcttcaaaaggtcaatagttcttagccaccagaggtgttcaggcataagttgaatgaactcttggtaatgatcatttattcattcctgtattaattcatttagcaacatctataacatactaattttcccaacactgtactatactctgggccaatagacataaaagacacgtttcccgtccttaagaagctcatcttcttgtggaggttgtgaagaggggattcagttcagtgcttataagggttcttagatgacctttatgatcctttccaacccattgctctgcaatttttgcatacctcctaactacttgttacccagagaatttagagaatcaaggacttaagataattgtagatcacagtcatttccaaaatttcttagtctcttttctatcagctctttttgtattttttaatgtagtctccacattgtagacactgtgcttctgttctccattctttcttcttcgagtaacttcattattcataataagaaatgctttcttattttgtgtaaatatgttctttcatctctggtttcatctcccattattaatatttataaggttgcttcattctgagtgatttcttagattctcaggttacaagcagtggtatgttggtaaactggctctataagtaaaaagtatttgctgatttccatggtacaaatacttttaccactgctgatttgggctctcaaaatttctgaatatttaacagttcactcttgagagcctatataagacagtgctgggacaccagtgaaacaagctctttaacatttaattgtggatgttgattctagttttcttaaacttaatttttttcctgctgtttttctgcaaaataaacactaaacacaaaataaacaacaagtcccaattgctccttctatttaaatattattcatttagtttttcattcaagaactatttattgactgcaaattcttcctatggtcatagttgtggatttttataaccactgtataatagctgtatagttcagttgactagtatgccagaagtcacatttagaaagatagaattgtggccaggcgtggtggtttgaaggttgaggagggtaagtgggaagatgagggtgagagggaagaacatgtgacttgcagatgtgcaggttctgtaggaagagcccagtggctactggggagctcagggaagatggggccagatacccccaggccttgtggccacagtgaagatttgaactttcccttgagagcaatgggaagtcagtgaggggttatagctgaagagtgatcagattagatttgccttttaaaaatatcactctggcttcagtgaagaaaaccattaaaaagttttaagagtgggtgtaggaaggcagtggcaatggaattggcaagtgatgcattcaagagatatttaagaggtgaaaccaatggtgcatagtgagggataggataaggggaaagaaaggtgagacttctggcctgtagcttgagtgactgtgggagcttttacccagacagggagcgctgcaagactggattatcgttgcagttgtttttttttggagtgggagcagattcaagagattcttcttacatagtgagtttgaggcatctttaagacacccgaacggaaatgccatgtaggtggttggctgtactatttttgaagctttaagaaggagtttgtgctagagagatttgagggtcattggcagatagatggtaatttatggagatgtctagggcagtgattctcaaaatacatgcctttctagcggcagcctcagctccacctggaaacttgttagaaatgcaaattctcaggccctgcctttggcctactgaattagaaacttgaggtggggcccagcagcctgtgtctgtggaactatccgggtgatgccaatacacactaaagttttagaggccctggtctagagagagagagtatggagtgagaagaattttggtctagagttgaaccttgagaaggtttgacttttaaagactgggaagtgaaggatgactttgcaaaggaggttggaagtagtgtttagagggtagaaggaaaatccaggaaccaagagaagagagcaaagtagggagttacttgttgctgacatattaggctaagatgatgcatgcacaatgttctctgggtttaaaataagtaaatccagacagacagaaaataaattagtggattgccaggggctggaggaaggagaatggggagtgactgcaaatgagtccaaagtttctttttggggtagtaaaaatattttggaattactggtgatggttgtacaacattatgaatacaccaaaccccactgaattgtacactttaaaaaggaagatgagactgggcgcggtggctcacgcctgtaatcccagcactttgggaggccgaggtgggcggatcgcctgaggtcaggagttcgagaccagcctggctgacatggtaaaaccctgtctctacgaaaaatacaaaaattagccaggcatggtggcaggcgcctgtaatcccagctacccgggagggtgaggcaatcgcttgaacccgggaggcagaggttgcagtgagccaagattgtgccagtgcgctccagcctgggctacaagagtgagacttcgtctaaaaaaaaaaaaaaaaaaaaaaaggaaaaggagtaattctttagagaaatcttgttttagagaggagtccaaaccgggtggaagctgaaggaagatgtggagcttggaaaattttggttggcttgttctttttggagctagtagggacctgaaaatgtttaaattctgttggaaaggatccagaagagagataaagagatgaccaatggtgttgtatggtggtaaaacctcagagtaggaggggacttttgggttcagtagtctgctgttttcctaactcctgacctccatttcatgttataatgcaggtgaaaaaaattccttagaagggatcttccaattccaagtttgaacatcatgtggggcaggtatctttctgtctcccagggccaaccattagatggtcccgactatattggtgagttgaggaaaatcaacagggaaaattgacttacaaaatgggagggaatgttgcctcttaaatggactttcaatcttattttagtcatttcctttatcctcacttccaggagaacacagtgctgccaattcctaagccttttgagacttacctggtattaattgtgttggttatcatttttttttttggtttttttggagatggagtctcactctgttgcccagactggagtgtagtggcacaatcttggctcactgcaacctctgcctcccgggttcaagctattctcctgcctcagcctcccgagtagctgggattacaggtacctgccaccatgcctggctaatttttatatttttaatagagatagggtttcactatgttggaccaggctggtcttgaactccttacctcaggtgatccacctgcttcggcctcccaaagtgctgggattacaggcatgagccactgtgcccaactggttctcagttttttcattgtcagtttagtattcagttttcttggtcttctaacttatttaccactcatctaaatgatttctagctttcaaaattttattgttttgtctcttctcttattctcctagtctttgttggtttccatttaaaaaacaaaagcctttaaaaattcaccttttggtcaggtgcagtggcttacacctgtaatcctagcactttgggaggcagaggtgggtgtatcacttcagctcaggagttccagaccagtctgggcaacatggtgaaaccctggctctacgaaaaatataaaaactagctgggcatggtggcttgtgcctgtagtcccagctaattcaggggctgaggctggaggatcacttgagcccaggaggtggaggctgcagtgagccaagatcataccactgcactccagcctgggtgacagagtgagaccctgtttcaaagaaaaaaaaatctccttttagtggggttcggtagatgcatgggttcaatcttccatctttatcttctctctttctcccccagagaatacataacatgttcttgtgtcccttcactgttatagtattttcctgtgactacgtatgagccacatgccacgattaagccatttctttcttgtccagtctttggggcagattttgagaacctgttggcactatgtggctgtcatgaggattaaatgcgctatgcatataaattacctgacacagtaggtgctcaaaaaaggcatgccgtttccttctctcaatctggaggatatgactaaattctattgcattccttattagatttcaatttgtaaacttctctgtgccttttcagcctgtggtgactgacttgcctagttctgtcggatggcatgttaactttccctcccaactttggaggcctgcagatttgaccaccgggtcaccagagctctccttttagtcactggtaacaattgtggctgtgatggggtaggaggtatcatggaagcctcaccatactttgcagacattcagaaagaataggcctggaactttttctggtagcttacattagtgacattgtttagctgagtctaggggtgggaagacatacttgaaagaataagggatacctctacatcttgtaattttttttttttactttttttaaatataaagaaatttttacccccttttaaaaaacgtaaagcagtagtttttaatctagggtctgtggaagagaattcagagagtcagtgaacttagatgagaaaaaaattatatctttatttttactgaccttaccttatcaattataaagttacatccaattataaatgttgtaaataaactgtagtagcattagcaatataagtgacaatttaatatcacttacagttattatttcttaaaatatttatgctcattccttcctcaaaattgtagtggcagttatcagacttgccactagatcttgttatataatatattaatttgaaaagtgcattttggggtattgcaaatttgtattttagtatatttaaaatacatatttaaactttatttaaatgtaattgaaatagttttctgttaatcctagtttatgcattaaaaacattattctgaggaaatgggttcgcaggcttcctcaggtcactgagagtccatggcacagagactctgaaccccaaagacaagtgtctgcaaaggaatttatggttgtttatataaactaatatttttcttagatccctagtcactcttttctctggcatagcccattaaaatttgctttctaacatatagtttacatttttacaagatatttgaaaagggggctattttattttttgctgacatgtgagttcagatgatatttaaaaacacaaaaacaaagatccctccttttgaaatgagacataaatatttggaataattgaagtttcaggacttaagcattctgttaagttgctttgctaacttcctagttttatgttaggctttcgggatgctgaaactcagggatgatgaagttacatttcacttcatggcttagcagccataggttcaagtgaccttgaatggttgtaaaagttggttttatgttaattataccttaaagcccttaaaggtctattctccccttggaacgtcttctggccccttcctgatggctgccatatgtgcctttcactttgtctagataggtgtctgcctgctctgtttcttgggtcagcagtggaggctgggcagagagcctggagccttgaggtcaagtttcctacctcggacaccttggaacactgtagtgttaaagctctggtgccagttcttgcttaactgacctgaacttgatactttagttttatgttgcctaaagcaggtctgctaaattgctctaaaaacttaaataaagtatgaagcactcaattttcaccacggtaggttcccactccttttgaaggagtacttcatggtgcattagaagctctcgtggctcccagtggctcagaggagattgtttggaagcctgactacattttcctgttttctttcttttcttttcttttttgtaggggaaggatggcatttaatccatgaaaacacctgctaggttctgttggcctacatacattgtctctcctatcttttaagcttgtttttatcatattcctgacaggaggttattcctctgccagaatacctcttgcaatgatgaatgttttacttaatcaaacagttcaattcactgttaataataagaatagtcataatatttatgaagtgcttcctatgtaccagccactatatgaaggactttacatattttaaaaaacataatctgacaacagtcctatgagtgatagctgctatcattaacttcatttcacagatgaggagaccaagattcagcatagaggtaaaataacttgcttaagttcctgtgcagtacctggttgaattggaagtggaactaaggcagtcggactcaggaacgcaggctcttaaatcagcctcttggattaaagcaatttcagaagtgcttcagttaagtgtggtagttaattagtaggatctaatgtattatataagtttaccatgttgatagctgtgaagccaaacaagcacatctccagctgactttggtgttatattttattatttgaatgttctaaatgcaagtttttaatgttgagtttatttatgtttatagggatgcttcctttggaaattgcacttacaatctcaccattctcgactgtttgcagggaatcagaaaggtaataacaattctccttgctgtagttgacacagtagtttaaaaaaatatgagaaaggaataatctcaacatccttatttgttattggagggaagaaaggggagccagtaagtagaaggcttttcacttcttgaaggatgattgatttgtaaaatacaaacaccaggaaaaactgggaggagggagtggcaggggcctttctttgtcgtttaaactatttgtgttccagggcagatttatcaccactatcagctgcagtgcctgtgacattgctttgtcacatgcttagcttcattatcaggcttgatcttggtgtgggagagtcaggaagttatctaagccactgtgctcctctgctgcttggtcccaccccagacccactaaaacaaaaactctgggggtggagccctgcggtctgtatttgaacaacctctccaggtgatttgatgcactccaaagtttgagaaccaagtcatagttatttaattatttctgtatataatggagaagttaaactagaagatttctgagagctctcggaacatgttttagaaacataaattcacaatctgagaagttatataagctatactgtaaattctaatgagggctcaaagtacataatctcgaacatataactatggtttattatcagtcaggaatgtacatattacataacctattgatcataggacatatataataatgtcacatggactataaatatattatcagtagcaattctagttcatttcttggatgtaatataaaactgatttttgctgtgttttgagttgagaaaattggtgtgataaatgtgctacctgttttatacatggttgtttctatttaatttaaaatgaatttaaaccctatcaaactttaaaatggttttcaaatctttttctttctacttaaacaactacagagatactctagcccactcttgcaacaatattaccaaggtgcatttccagtaatgccagttaagagcttctatggagacgttacccaacatataacagttgattatagcatttggaaaatatgcctgagggaaaaaataatttatttatcgtcactattattattttgccttttctaccatctgctacaggccatttgttttataacacttaaaaaatttagaaagttcacactggaatatcgctgcctgtaattatggtaattagtaactcagtatagaaagttgtggcatccttcctgttgtagaggaaaggtatgtaaacttgtttcatcaaatgttggggttaactcaaagacaaatgagattttggaggatctgatagattgtgcagcatgtctttaagcacctgagacatttcctgtaagttcattctcttacataaggcaccatattctgggctatttttgtgtggcaacgagtagtaccattccaagaacctatacagagtatggccacatttttgcctttttagggagcacatttctctgattttaatgtattggcattgtcataagtatagtttatattccatgttatgtgaactactatacatggatataagcaaaccctttgaaaatacagaggaaaaaaaagtgaatccttcagagagtttgtatatttttctcacttttttgtctggaaaggtgcatatggatgaactcagttttttttttttttttagaatggactaatttaaataatttgttctgcttattctgtaggggttgtttaaaccagtgttatcagaattttgcatttctaagaatcacctgggaagctatgctgaaaatggtgatcctgggccccaaccacagcaaatatgatttgatagttctggggtggggcccaggagtctgcttctttcatatgaattaccctaagtgtttctgatgctgatggcgcatgttctgtgttttgaaaaaacactgatagatgtactggagcttggcttgctagtttctttttctatttttaatgacttgatcatgtaacttttaaatgtacctgtggttttgtattctgttgtaatctgtatagcttcatgatttataaaataaaagattctgttctctttaaaatattagatctgagctagctggatagtttttaaaagttctaagtcattgtttacaaaactgagtatgacttttactttgtgataaaaatatgtttttttttttaaattgtaagagcagtcaagtataattctactttgtcagaaactatctcatgaaacagattctcccaaggtagagttttaggaacaaataagggcctattaagtagaaatattaagaaatattacatatatattatgtattgtatatataaatatactatattatgtattatatataaatatactatattatatatagtatatataaatatatactatatattatatataaatatatatattctctcatcaaatattattaaggacctattaagtagaaatattaaggaagaaaaaacagtaaaagatgcagggtttttttggggggctaaatatctccctatgataaaaggaagacaaaaactcataagaataattgatttttcttctcctaacaaagaagttaatcactatgatctattctgtcatagttaggtctagttcccaacaggttctaactataaatttgttttatttcattttgtatacatataattttacatacaaaactgatgtaaattagaaatcaaggcatcttttgtggggctttttcatgttattctaagtgtttttttagttccagtaagacagtcttaatgcagtataaccagttttataaaaagatttctagatatgcattaaacatcaaaggtttcaagctgtctcttcagattagtgaggatcatttctgtaagtaggagttccagaaatgatgagtagagtttatcaatttagcatggaaaaactaattcaaattctgcttttagggattacaacatggattttttgactttgagacatttgatgtggatgaatatgaacattatgaggtttgtacatttaattttttttacaaaacataatttcatgttgattaattttttccccctgtcacactcatgtattgcaaatcgagtgggtgctaaataaaagcattctggagttttccatagtggtcagttttgtcctttcagccttggttatttcctttgaatcaggagtcaccaaaattttattttggaaaaacaacatatctatatatattctctcatttatatacaatcactttgcacctttagtttataagaaaaatctagtagggtagtaaaattatgttacttttattttagaaatcaggttttatttaaaataaaactgaatttgtaccttttatttatttatttttgaggcggtgtctagctcttttgtccaggctgaaatgcagtggcacaatctcggatcactgcaacctctgcctccccaggctcaagctatcctcccacctcagcctcccaagcagctggaattacaggtgcatgccaccatgtctggctaatttttttttttttttaaagacaggatttcaccatgttgcccaggctggtcttgaactcctgagctcaagtgatcctcttgcctcggcctcccaaagtgctgggattacaggcatgagccaccatgccaagcccccttataatatttttggttgtataaattttattttgaaatatggctgaatttacttagttctaaaagttcactgaatttttttttccccatggcatcattacaagacttttgattaatgtcttgactgctcaaaatgcaggcaaaggctatctccaagctggtttgcgctgtaaggagatgttgaagcagagtaggataaggaggagtctagaagtcattaactttttctgaaagatgagaagcctgtacaatgtgagtaggttcaacattctcggaaggtgaactcatccgttgggtttccccagaggagtaatacaatttatctctatccttagtaagataaggacagccctcacatttggggccctagtctagaatagggctgtttggatattctgtttccatgttaaatgcaacatatctgaaaagaaactgatcatcttttacccaaacatggtcctctgctttgtgtgtgttaccacattgccatcctactgagcacccagcctcaaggctagaaacattgctgttttcctccctaacctagtgagtattcggatcacttctactggtgccacaggatgtattaattatatctgtctttcctctctgttctcacttccttccctctgactcaggtctcacgtcttttcctgtggacctttcattttaatagttctctaactgagcacggcccttctcctcccaggctgccttacacacacctgagtgatcctaaaatagagttctcatcttgcttgtcttgttcttggccccaaaccggctgtttctcccattgccctgctgaaatgtggataaactctcctgtcctggcattcttagctgtgatgagctccagcctacccttctagccccatctcctgttacttcactgtacgtactctgtgttccagctcctcaaactgcttagttactgtttcttgaatatccctgttgcttggctgaggttgctttttcccagattcccatccttttaacctcccgctcctccatttcgtttgtgttaaaatcctgcacagattacatctcacctctggagtactcttcttccctgccttcaatttcatgtgttacaatttgtactttccatttttcttatatcatggctatttgtgtacaagcctaattttccttattaggttgcaaattccctgtggatggaattatgaccaaatagaaaaacatatactttgttcttggatagaaagacttaacatcataaagctgctacttttcccaaaattaatacatttaatgcaatttatgaaaaaaacccaaagagagttttttttaataccataaaagcattttagtagtgacaaagtaagattcccctctaaaatccccaagttagaaacaaagggaatatgtacttataagaaagaaggtcagataacttgtagtacatctgaatcactgaatgttatgcagtcattttaaaaaatgaattgagctataccacttatcttggaatgatttctataatgtttgttgaagagaaaggatatggaagagtgctttaataaaatccatctttgtaataaaacaaacaatagtaagacactccctagcccacacatctaggtgtctacattatatgaccagaggtgacttactttgaagctaatgaagcttaaattttagagagcctcaccccctcaacttgtatgggcaccttttacagtcctatacccaattttgtgttaataattttttactctaagatggaccctcaaattaggtgagtttcagaccccaccaaaacctggatctctgccccatgtatatgaacatgaagaatgcaaatggcccattgtattaattattaaatatacagccaaacactaaagccatttcaattaaaggagagatggaggcaggagggggttggaagcggtgagagagaagaaggaacaattcaaggagaaaacttgtggatgttttatttattccttccttccttcctctctgtctaactttaatggtgatgctgagggttagttgaaaaaaatcttgaaaaacctgaagcagacagtgcaattttattcttggaaaccaaccagccaaacaaacaaaaatctgacaagaaggtagtcatggtttcaccttgacaacaaccatctaggtgatgggaggggagcagtcagttttggtgaagacttgatgttgtcaaacaacttcttttttttgagaatgatttatctgttctattataaagcctataaaatagaaaaccactattgtgattggcaggtggtaggtatttcttaatttttagtttcttaatttcttaaatgtttaaggaataaatgaataaaggaactcttttctgacaatctgtgggcccagtcatttcctgtcagatttctcttgctgtttgccctgttctagtgagtatgatatttggtgaacttgtggaatagctgaattcatacattttattagctccagtaaagtcagtattccagtgaaggcagtgtagttttcaaagcaaaattttattgttgacagcaatttgtgagactgtaagccttagatgattaggggatgttcaagatgcaacttttctttgctaaagtacatttagtaaatgatatggctcagaaaaacaaaaaacaaaaaaaccccaaaaaagcctaaaacaataagactgtatctctatgtgagattaaaggggaatcttatagaaagagtgctacttataaatgcttctagtgatgaggtcaacagaatgtgggaaatgctttgttgtgtaaagtctacagataaacctctgcccatcctgcaaaaggttatatgcatcttcctcctgcaattccagggtctaaagcagtgctgtccaatagaaatgtgaaagtcatatcatgaaattagttttaacaatacattttacttgttgtaaatatgttgtttacatatttagtaatatacctaaaatagcatttaacatgtaagcaatacaaaaattattaatgatgtatgtattttgcattttttttgaattaagcctcagaaacccagtgtgtagtttatttattttatttattgtgtttttttgagagagggtctcgctctgtcacccaggctggagtgcagtggtgcaacctaggctcactgtagccttgaccctctgggctcaagccatcctcccacctcagcctccagagtagctgggaccacaggtgtgtgccaccttgccctgctaatttttgtatttttttgtagagatggggtttcgccatgttgcccaggttggtctcaaactcctggactcaagcaatccgcccaccttgtctttccaaagtcctgggattgcaagtgtgagccactacgcctggcctccagtgtgcagtttatactatagcatatcttaatttagactagccatatttcaagtgcatagtagccacatgtagctagagtatggattctgtaaggacaggctagccaatgtactgtcatagtccatcagtgtgacatgaagcctaggttatatctccttgcttcatgtgatctgtggttcacatgagagttaatttcaaagccctgttctatttagaaagctcgaggtgagatacctcaggctcttgctttattttcatgtgacttaaaaatggcccattgtattaagtattgataaacaacaccaggtgttggcttccgtcttggaaaagtatcttccaaaatgtggtctttccaggtcctttagcaagctgttgtggaactgtacagttccttacatttgccccgatcagacatgaaatttgggcagctatgctgggaaggtccacaaaagtaactgtgagatggtggtccaaaaccttcctctaggaatcagtgtcaaaacatttgtacttctccaacagcttcttaaggtattctcaaagaatatgtaccttgagaaccttgagaacttttactcctttgaaatctagccatttcaaatctagttcagaaaaatgaaagttgaccttttgtcctagggaaaaataatgaagatgatagagcttgaacattcaattaaattaggtagctgtaggtatgtgaggaactatgctcttcagtagtaaagttagtggtgaatgctagtgtaggctgatactctgcttgtaagacctggaagtggcacccatatacagagtctaccttcagtcagctttcttctgtttttttggggggtagctgtccttaccaaacaagatgttgcccaaacaccagtgatcattcatgatgctactgttaagcagttattatttatcagagagaatttgaagttatgtctctagtttgttattttgcttgtccccaagggctttccgctatttaccaaaaggcttgccatggtttgatgatggaagtgtgatgcggtagcagtgtcctgttcttagttgggtttgggggaagaaatgcagagaaatggtgcttcagtggcaacatcggaggttcctcatcactgtggcttacatttattaccccattcaaaattcagcccatgcaatttcaaggagtctccttaaatatctatttggggattaggtggagataaaagttgaaaaatgacttcaaaactgagaaagtactttgactttttttctttgagctattttctagctgccattatctgccccctgccataactcattccttttttgggtgtgaaaaacaaaattatgagaatattttccagaatatcaagctattgtggccttgatcctatacttttaaatgtgaacaaacccaggccacttctttaccattgtcttgatagaagttagagccacatttggcctgcaggcctgatgacagaggcacctgttactgccttgacaacagtcaccgcacagggcttccttttgttttttcatcatggcatatggagaaaatgataatatttgctcaacaccctgtgatgatagctcatagctgttggcaagtggcctggggactctggctgctccagtctgcccaggcagctccattctggtcacactggctaggaagctttgttttacagaaataatgatgtgcagatgaacatttcttatttgaaagtcaagtagccacaccatgctccttatggcctcattctcatagcttttcagttcatttgttgaacagatattaaatgcctcatgtttgctccatatatttgctaggcccaatgtttctttttctttttttgttttttaggaggctaccagtaatatcatctctccatgtgtagggttaaagcctttgctcttgtcacctggtaccatagaatccatgtattcttgtgcctcattctgcagaagttgccatatttgagtcttgcttcaagcccctacttttatgcttatcaatttagttgtgatacaaaatttctcactgatccatgacaggctgaaatgtggactattttgttcctgagatattcaagcaattcacaggttatcattattgctatcttcacctaaagggtgctcttttggggaaagaccatttctattctagaaagtgatttcacattattttagccacattacaatgtagcgcatctgggaactgtttgtgaaaaagcatgggttcattctggatgcctgggattgagtctttcttggatcttgggcctcttcgatcaagacttcacattactatcagggtgtaggttttaaaaattaagtctgattatatcattcccctgttttatcatttccccttcatgggctccacactgactaaaggtgtggaggaaatgcagactccttactacagcacagaaggcccttcttgacatgggcttgtccttcctctccacccttgtccttttccactccctccccatacccaaatccacgcagcttacccggtggcggcttctgagcttttgcacatgctcttgctccctcctcctgcctgtcagctcttctttctggtccactgtatttacatggttgactgttaagtccttctcaaccccatggaagctcttctcatgtagccttgtgtggtactctgtttacacatctgtgtctttcctgtatctgcgggtacttttgggcagcaactttgtcttattcttctttgtttgaataagtaacctactagcacagtacactcatagtgggcagtcattatttgtggaatgaaagaactaatgagtaaatgtgtgaataatactaaaaacaggagtatagcacatttcaagatattttatatgatctgttttcagtggaaagtgcctaaaacatgttgattaagaatccattctgattttgcagtaatattccaagggacaaatttaccatggtagacaacttcttcaaatgatgtttcttttatcagcagccaatctatgctgcaagagtgaggttttttttttttgtttctaagtcagttatttacaacacagattgctagatgttttaatctaagaccagttctgtatggaacatcaatttagtttaatatgtgagtggggacctatctccaggttgactctgtcatccttcactgcataagtaaattttcagattgaccaggtggtgtagagtcctaacaattgctctttagcacctaccttgagaaatagtaaagtttgttaggcctcctgtctctcagcaagtcacattgggtcaagagcaggagtcaatattgttgaacactgaagttatgatgcttcaagactttgtttggattagaatttgtacagcaaactaaaatgtaatctggatgctgcttggtctgccttctttacatgttggtggattatggaactggaaataatgggactgccataggactggggtcaagcagtcctcagaatgcaagtatgtgggcatgtcctcaccacctggagcagttatggaagtacgcctcctgtggcaatttgaatattggaagaactattagaagaagcattctcctggagctgtctggtagtgttcattacaccactccaaagcctcaagtttaaggaagcaaaattacttcctggccaccgcaactgcaaaagtgaggggacccagtgtttccgtatctgttacacccattgctggttcaaagctcacgttggttaagtctataaaatgttttgagacttaccctgacctaaacaattccccatggcttttttttcttcctctttaatgattgtttggtatcttttccttctttaatctccaaacttcttaagagagcagtctcgactctaattatggtctggcctctactgaaactgttcctgctaacacaagcgttcgtaaaaccaagtggccatgcttgttcttcttcctacttggtttattctatggtcgctctctaattcgcattccttccctgatttataatgtgctgtcttttggatttctcctccctccatggctagccatctttctcagcctccctctcaaatcctttctcttcctttgcccaccctgatttgctggggttcttgaggacctcatgatttctggttatacacactttgtatgattaagtgcatccagttccaagtttcaacaactatgtttgtgctgctgactccaaatcatctttgcgtcttgaacattggagtggcatctgcaaatgtgcactggatttttgcaccctgctgttgtaccagcagaggtgttcactgatctggacttttggaatgggcctccacatgttttccaaccccactgtctccctgctgtagctgatgctagcagaggtgaagcagtcatccacatgggacactcctcttttgctccaccacaccgtctccctcaaaagcaagtctaaattaataatctagagtttgattattatttaaagccagatggcatgtcaacttaaaccaaataattcaaatatttactttgctttaagctcataaagtgcctgtccttacagcatatttgcatttatgtaatacaactatactgtcaacactgttttgttgttttagaagttagggaaatataaagaaggcactttttaaatgaattttaaaatgccactgtggttctaccttattaaatttcaaaatagtctttgtgtcactgtcattcctcttacatacttttagtatcgcatgttcaaagtgtaatgtgactttttctttaatggataaaacgaagatgaaaataacatctacctcatagggttgctatgagaagtaagttgtatagaatacactagtgtttaacacagagtcagtggtatccacatatttgctgccatttttgttactgttatttgtcattcccacctgcctttggactctgtaaaagcatagagaatgctttttattattttatgtttgacaccaagttacagtccttgatatataataaaggctcagcaaatgtctaaatgaatgttgaattgcgcttcaaaactgtttctgcatgttttcctagaaaacacatctgttgatataggaaatcaaccttgtaatcgtcaacctcaaagactatcttttctatcttattgtaggtttgttacagtagtaaaaaggtcaaatagttttcagtgtttggacagaaaaatgtatttgtgaccattactatagagtcacaaatgcatttcttagaaatcataaaaattggccgggtgcagtggctcatgcctgtaatcccagcactttgggaggctgaggtgggtggatcatgaggtcaggagttcgagaccagcctggccaacatggtgaaacccggtctctactaaaaatacaaaaaaattagtcgggcctggtggtgtgtgcctgtaatcccagctacttgggaggctaaagcaggagaattgcttgaacccggaggcagaggttgcagtgagctgagatcgcaccgttgcactccagcctgggcaacagaatgcaactccatctccagataaaaaaaaggaattgtaaaaattcatgttttttagtcaaattatattttgagtgcaccaggagagtgagttattcaaaagaaagctgtgaatcttttgtagattggagaatcctatagcacagtgaataacaacacctaaatgtatcactttcaggaattcagatttttttattttggatttttcttacagtgaagaacatctatagttttttttgcatagtatttggtaggtagtaggctttagatcagaagtggtaatatcatactcttgcctcatccttgcttaggtatttgtttacaaaatgtggtagggttggaaagtaccttaagttcctgtctgatctagatttctttgaagtgtatgtgtgtgtttaattagaaaaaccaacttgggtcatataaagtattttattattgataaacattgacatttgtataattcactatgaataaaggcacaaatattaactttggaagactaccaaagtaagcgtatattatattaggtcagttaaaagctgtaacttccttattaattttttctcagatttaggtctaagacctaaatctttttgtttattccatcagccttatcctggctgctgaatataacccaatattatctactatttatctttttgggtaggaggatttgcaaacatattcttttggttctgtgaatgaatgtatcttagggatccccttgcctctctccatatgattaattataaaaggttgctatttaaccaaatggatttctgtaatccaaataagcagatattgcagagcgtatttatctaacctacttggtggtcaaggatacagaaatagtgaccgtagaaacctgttttcttttattgttcataaagaattggttttagtctcttgatgattagtgcatacctttattcttggattttcaaatactgtgttaagcttaataattacttgagagatattggataattaatttgagacttttatttaaacaagcaaattttaattgccataattagattctttatttaagttgttataaatagaagctatgcttgaggtttaatttcacatgtgcaatcataacactcagggtttcttagattttacttagggcattttggatattttttttatttcctttgagacagagtctcactctgtggcccaagctggagtgcaatggtgcaaactcggctcactgcaaccttcatcgctggggctcaagcagttctcctgcctcagcctcccaagtagctgggactacaggcacacaccaccacacctggttaatttttttgtatttttagtagagacggggtttcaccatgttgccctgggtggtcttgcactcctgagctcaggtgattcacctgcattggcctcccaaagtgctgggattacaggcgcgagccgccacgcccagctggagatattatgtttattacaactagattaaatgcagttcagatgtttataagatggtatgcacagtttcacatataactttttataactgggaaaaaaatctgcattaaaaaatgacaattatattttatagccaagttttgattttcatggaaatgataatgggtaatataagtaattaaagtaatggctccagtttttttttgatggccatattccaatttgtttaacaaatatttattgtgttcttatggtagagtacagagtctatattgggtcagttttctactgttgaggtccttgccatataatggggggagaaagctttttatatggatggtaacggatggcccagtgaagagaacaacattgcttccctgccctgaggatggagacaaggagggcaagggtaggggtaggtggggagggggtggtggtggtaaagacagcgtaagtgaagaggtgatatatatattttgtgatgcattgcacaaatgccttctaatgactgcaaaatttggggtaaccttactcgtgccccagtgtcccatggttcggaggcacatggggaagggaagaaaatgggggagatgatggagccatgggaatgtgcttggctactttcttggtcttcttaagccttttctgaggatctcttagcgtgtttagactagaggctgataactggtgctcaaagtcagccaatgggcatgttttatttggtttcacaggagttaaaaacctaatttaaaaagtcaacattttaaaaagagagttttcacatgaaaattcagttggaagatcagctgtgttcagttggctttcctacaaggtgtctcattagctggagtggaggagcacctgactctatgtatgtcccttgcttgaatcttgttatcctccagagtacagcttggctgactctggtttgtggaatggatgcgccaatatcactcgctcctgccttttgccatttccccctctaaaaatcagcattgacaagagataacagccctataaaaagagaaaaaaaattggaagtgtattcatcaggagcttgatatttacagatgttttttcattgtttaaaatatgtttactacattcatggaaagttttcatatttcccattttctcttatttatcgccaagacaagcaatgtttgtttccatttcatttctttgcagtggccaggaaacaaacattttatgcaaaatacctctgccgtaaataaaagtttctaaacatttcatacagtctagacacaagtttttctaaagcggattgaattcctaaatagcattttgagaatcaggtgcatgtttttattttaagctatgtttgtctacatgtatgtctaattagtactaagagtgaaaagcagttttatttgtaagggtttcctaaattgtataagaattataaaatatttttcttctcttttcttacaaaattctgccagcgagttgaaaatggtgacttcaactggattgttccaggaaaatttttagcatttagtggaccacatcctaaaagcaaaattgagaatggtaggtttttttttcctttaccatccaaacatttattttgatttatctttctaagtttcttaacttcctcagataattattttctttggtaatattctccaaagaatatttattcataatttaaaaaattgaacagtagtaatagtgtgttaaatattgtatttccagtaggtggagctataatcactgttttagaacttaacaaatttttagcttgccataaataggatgttcactttacctgacccccaattattagagaagaatctgagaaacaaactggtcaaactcataagcagattgctgtattctttcagtggttctcagatttatttgttggtagagtgctacacatcaagatgttctttgggtaacaccatgttgaataatgatgatgaagacaatctgtcatttactgaatacttaggtgctagttacacagatcacagcatttatctcttttaacactcaacacaactctatgagatacagatattgttatctgcattttagggaggagtaaattgagccttattagtagagaatttgcccaaggtcacaaagtaataggcagaactggtactccaaaccagaggagggctcctaaacattgccactacactgatacacttagttccattgtgacaactaggtacaattttctagctgacagtggttaaactacttatttgcagcataatttattgccatgggcatacatatttaggaaaaaaataaaaacaaaactaaaaataaaccttttgaatgaaacatgatcagctatgcaagttttcccattaagacttattttgtacttactaattttttctatctactaatattccctagaaaacaagtaatgatagacaacagaggttcaagaataatttacaagagaagtacataaaattgaaaaaatatccatgaacaaaatatccccccccctttttttttctatctgatcatagaggtggaataccagtgttctgagggaacctaacttgaaacctctggtctagatttattcttcagctgggcatggtggcatgtgcctgcaatcccagcactttggaaggctgaggtgggaggattgcttaaggccagaagttcaagaccagcctcggcaacatagcaaaaccctgtctcttaaaaaaaaaaaaagatttatttttctttaatcatcatattctagaatctagtttcattgtatattgttattcatgcatttaggttttataatttgagctttcataaatatgcttatcatttcatacctgtgacatatttaatagggaactctgcttgaatcatgattttaccatgcgaatgggcaatccaggtctagagagttaagctcacaaacaggatacctctatggtgaagtcagaatttgatcttcttacttataagcttgctaaataatcttttttggtctggacattcaataattaacctctgtcattttgggttgttaggaattacatgttgagagcctgaggaaactgctttctgacaattggcctttcaagataagactgattaaacctgctttctgtgcaaattatctgactcaggcccaggaaatgttagtagggatattgtttcagtagtagttttgttgttgggtatttggcaaagtcgaaagactttcaccatttgtgattcatgtgtttgactacgttttcttaatgagaaattgagagatataattgtaaaagccatttaaaagtttttatgtatatagacattgtatattctatggatacatgcattttgaaaaaaatttttttttaacaaaagtggcatcataacatagttaatatcttacagccaggtttcttcacttaacatatcacgacttctttttatagcagtaaatgaagatccatgtaatcattttccacgactgcattgcattttgttctaccatatgactgtgccatattgtgttaatttatttttggtttttgcttttgtttatttagagacaggctcttgctttgttgcccaagctggagtgcaatggtgtgatcatagctcattgcaaccttgaactcctgtcctcaaatgatcttcctgcctcagcctcccaagtagctgggactacaaggcacagcccaccacacctggctggtttttttttttttttttaatttttagtagagatgaggtctctatgttgcccgggctggtcttgaactgctgggctcatgtgatcctcctgcctcccaaagcactaggattacagatttaagccactgagcccagcctgttaatttatttttggatgagatctaagttgtttatctcttattcttactctttttttcctttttaaatttcatcatctatttaaccagatgaagtttttcactttttaaaaactgctgtggttggcataaatgttcatacatctttttgcagctgtagtttcttctctaaattgttagaaatagaatcactagataaaaggatacgcaattttgtataataagttataagtgtcaaaaatatttaaaacaatttttggtcctatatttaatatggggaaaaaattatagccaccattcgcttacctgccaggaagggtgctaagcctcttgcatatacatcatctatttaatgatcagaacaaccctctggagcaggtggtatttattttatagaagagaagctggaggcttacaggaattacctaacttgtccaggttcataggccagtaattgttggcgtgtggattcaaacattggtctgtttaattctgaattttgtgttgttttaaattttattatagaggatgtacatgctcactctagaaaatttaagtaatataaagagtaaaactctttaaaaacatcatataatcaagaaataatcactttaagatatcgctctatatgcatattttattctatgcatgtattgtgccctgtcatattgacataaaaaaatctgaaagtacatttatctcacctttgtcagcttttatgatgcctagaacaatttcatttaaggctgccattggtaaaatattgctattttactggaatttccattttaagatctaatattcactagaagcttcactatacttttttgtaaagtactttaactttgtaaatgctttttgaagttgagaaaataattttgtgatggaattaataaacctgatccaattacagtgacgtcttggtaatttttttttttttttgaattgagaaacctgtgtttttctgaggaggctgaaagtcattttagaggctcgttagaaaagctgaggttttaaagaagtgatcaagtagctgttgctaggaggtagctaaaggaagctctaaaatcttgggatctgggcagaatgtattataagagccttaagtgtgtgtttgtgtcaatagggaacactaggagtttcttttagccattttgattcacattgttttgacagtggggaagagaagagccctacttttttttgttaaacatttttgaattgataaatgatggataacagcagaatgaaacagatattttggatttcagattttctgtaaaaatgtctcttaagtgtcactgtcattctcacttctatttaaacacacacacacacgcacacacacacacacacacacacacacagagagagagagagagagaaagatagcttcagactgagaatcccgaccatttgaggcatcagcctgctcctttaatgagagaagcccagtgtcccgtttagtaaagagcctgggcaggttgaagcctggctccattcctttttggctgcgtgaacttcagtgagttccacagcttctctgagcatcagttttcctatatatcacagtgggagaaatatgatcctcactgcaggcacctagtgaggattagagatgttatgtgaagtgccttgcagagtattgggcacacataataggcgtttattagatagcaggtattatggttacatttttatcattagctggcctaatcaacagattttatgtctttctacatttgcctgctcagtttgcagtttttacttttaataatgactgagtgaactagtcatttgactctgctgttcttcagttttcgaactttaaaatgagggcctgggaagagatgaataaaaacatctcttttgactctgataccgtgttcatgtgtttggtcagcttaactccaggactttgttgtggttcagtgatgccagcgcaccatcttgtggccagatggagtaagggtcggatgaaggctccataagttctgggtcggcacattatacacattgctaaaaccaatctctcgcaaaaagcactcacgtacatccgtaaaagccacaaacagttgttcacaggtcataggacatttccattgttcgttataatttattctaaacagttttaaggatttttataaaacctactcaccaattctaaccgctcatgttcatatcatgttctcttatttggagtcttaacagatagaatcaagttgaatcttacttgaaattagccccagcatgggtgttggaatctgactgccaggattgaaatactggctctacctcttactagctgtatgtgtacgggccagcttttccaggcaccagaaattgagtaattgtaggttttaatgagataatccacataaagcacttagcatagtggctagcatatagtaagtgcttgataaacgttaggtgcaattattgttgttattattatttcagtgccctgttgccatatttggacaatttctgtccagtgttttcttctcaaaagatgtatacatcgtttctcttaatagtctatttaggcatgttagctatgctgccatttactcatgatggaaattcatatatgaaaagagagattcttgcagcctttgttgcagggaggaaggggataggcactgaaccaattgctaacacaacgtgtgacaggtgctgtcatggaggtcccaggcatgctagcaacccagaggcagaagctctcaccagcccgccacaccagggcaggctgcccaggtgtttatgagcccttctcctccccattcctcacatgatagaaaaaccgttacttcttaatgccaactacagttctttttttgctttaggctataaatctgttgcagggaaataatttgagcaagtaaaccaactaggaaaacagacttgatttttgcagttagaaaagcatgttttctccatgtttgtgtaggttattgtttctacacagaagattttaaataagctctgttttacctgtttgctcaaaagcaacatagcctgtgaaaatcacatatctgagctgtggattaattggtcctgccttccaattctgtcttcatcctttgtgtgacctggccaagtgtaccagttatggctgtccaactctggtaaaaggcagtttttggaatatgttgggtagctcatagactttaagaaaaggctggagaactaggcttagaagatgaacaggacccaagtgggaaaatgggaaccacactaggcatttcaaacataaagcatttaatacaaggagtttatttcaaagaagactaaaaagtaaaaaggcaacactgaagaaaccagaatatgttggagaaaacagctagtacctttaaggctggggggacaaaagggacaaaagtggagttagcagaacctgctcctgttttctgctgctgaagtgatgctgccaggaggacaggaagaattcccttcctcctcctcaggttgaggtttagtgcctcccatttttacaaccaataggaagccagatagaaaggtagtctgggaaatgtagggcgtagtatatggactccagccccagtgtcacagagcataagagtcggcttggagctgagagctgactagcataacagggatccaaggcagcaagaaatacagccaagcacacagcgtggaaacagtctggttcactttgctggctgccgccacccctggaacctcccatcatgaatgggttccaactgagataattgcactcagctggtatgttagggttcagtgaattctgaatgggttacagatgtggccatcagtgtgctgggaacttagtcccctgaacttttggagctgccattgcaaggcctgcaaaggccaaagcccccagtggttgccttggctgattagctaaggctaggtctgtaacccagctgactgtgtagctcccaggaatactcacatgatggtggagccactcaaaaataaaaggggatttaaaggtggagcatcttcctccctcaaaaaaaggaagtgtccacaaaagttattgtttatttttaactaaaaaaatttatattttaattgataaaaattatatatttatggtgtacaacaacttttgaaatatgtatacatcgtagaatggttaagtcaagtcttacttaagtattcacatatttatcattttttgtggtgagaagacttaaattttactttctaaatgactttaaagtatataatacattgttattatagtcactatgttgtacaatagatctctgggacatactcctttctaactgaaattttgttttctttgaccaatatcctcccaacaccccctcttttagtttcttaatctgttaaatggaattagccatacttaagagatggttttgagaatttgaaatgatacgcaattgtgacttgtacatagtaggtgcttaataataattgcttctggggagcattgtactacaaattaaaactatacatatggcaaaaaagcttcagctgtagttgaaaactgtttgtcaagtagagaataaagctcaagagagaataaagtcaccattctaggtctgttatgcacatttgattacttcaagaatgcttttgtcttgggagtgggaagagtatgctcccaggattcgaatctagaggttgagattttgaactttaatgatgtattttcagtacttacagaagttttctttttaacctcctgtggtgcttacagttatgcagattgatgcttgtaggagcttgctgtgacctcttctctcacacaacacactttcctcccaagctttgttgagatttatacacttcattgttgagagttttgtatttctgggttgtggaagatgaaatgcatgccttttgcttactgctcctttgttcctttaggttatcctcttcacgcccctgaagcctactttccttatttcaaaaagcataatgtgactgcagttgtgaggctaaacaaaaagatttatgaggcaaagcgcttcacagacgctggcttcgagcactatgacctcttcttcatagatggcagcacacccagtgacaacatcgtgcgaaggttcctgaacatctgtgagaacaccgaaggggccatcgccgttcactgcaaaggtgtgtgcaaggcctcggtggtggtggctgtgcttatcgaaggggcgggccaaggaagagcaaataacataaaacaaaacctgtttagtgtcttagaaaaacaatgaggttttaaatttcagacaactgggacacaaactcattttaataaccccttcttaaagaaacgattgcttgggtgtggacaattggtggtggtgtggctttcttgatatgccagtttttcagaccttacctttccaggcccacgtgccacaatgaggggaaacacagtagcagtgtctttaggctgcaggaacacctttaaacaggtaaaattctcaagagacaagggttgttagttttcctctctcctttgttttttttcagaattgcccatctcttctccatcctcttgcactgtcgtggttctgttttatgacccagttatctggacccccattccagtctctgcttttccctcccctcctagtctttggcttcatggagcagagcgtcttccatgcctgttgctaggggcaatccgctagcttacaatgctgctgatgtgatgctgcctcatggaataaacttaaagagtttgttttgcaaaaatctctgatctctgggggtggatactttggggcaggaattgttcagactatagaaggtttaggattgccagatttagcaaataaaaatacaggctgcctaattaaatttgaaagttagataaacaatgaatacttttaaaacaaaaagtataaatatgtcccaaatattgcagggaacatgcattctgtattttatctggcaaccccatgtcagctactcagaaaatatgacatgccatttgctctaagcttgtttgacttcgaggaggcttaaaatccactccattccagatctttcggtatggataatactggaaatattccagatattttactgggtctttgatttcagcgaggagaaatcactagggccgccctgggctggagcctcgagttcctcatgtgcagctcctcctagtgtcgctgggtggtgctgtgcttatggttttgggtctagacccggtttccctctcattttatgctaatcatctagtaggtgttggggagggtgctgttcttttcatgtgcctagtgctgctgtaactgacttattcagacgagtatggctttggttctgacagaaattaaaatgccgttttgtaggcccttgtttctatgtttaagatttgagtaggtggaggtactttgtgaacatgtgagcaaaaatgggaagctgcggtttcccagagacccagagagatggaaatgagcagcacgtggcctgggtttggagcagggctccccatgccaggctccctcctcctgggtgggcagagctctccctccccaccctccccattagctagcaggatgggccctggctttgtgggatatcttgtctctggcgtggagtctgttaggaaggtgtcacttgctggctcatttgtgggtgctgctttcaggccacagtggggtgccagtgtgttggcttgtccccatgtgattcatttgcaccctgtttgcttttccattgcattttgttcagtattgcccaggtccaagaaaaagcccacatgtcacgtattttaaacagcaatagaacttgagagctaatgggaacgtttatatcaacgtttagcaggagataatcctatcttctctttcaaactttagttttgtgccataaaaattgtattttttcctgagattaatttggccttatttcttagttcaagtagttttattattactacgtcgtagagtttatctgtggattagccatccgtatcttggattgacacattcaaaggagaagaactgcaaagctttcattaaaactcagtgtgtttcttgatagtatttctcacctgagagaccttgtgcaaagaaaactctctggtgttaaacattcttattacagatattttctctatatccttgacctgtgaatgtttaccttttaaaaaatatatgtatttattttatattgcaaatttcttttcttttcttttctttttttttttttttgagacaaagagtctcgctctgtcacccaggctggagtgcaatggtgcgatctcagctcactgcagcctctgcctcccaggttcaatcaattctcctgcctcagcctcccaagtatctggaattacaggtgcccaccaccactcctggctaattttttatatttttagtagagatggggttctgctggccagaactggtcttgaactcctaacctcaggagaatgttggccaggctggtcttgaactcctgacctcaggtcatccacctgcctcagcctcccaaagtgcggggattacaggtgtgagccaccgtacccagtctgtattgtagatgtttttattttaaatcagaacctttaacattgaagtcagttcttgtataggatagtcacatttacatgtggtaatatctttttgagattgttatttcattttcttccacttgcacacacacgtaggattcttttataaggattacacctttggtttaattacagctgtattgcttttcacagcatacttatctactataggcttattaattattttgacatctgccctaattaagtcagcttagttttctgggaattcaagcagcactcagtcttttaattgaactaaaagaaggaaggagaaagaatcttatcctatgtcaaatgaactttggtggctactgaaaagggaatgaatatgtcatgcctcaacgtaaagtattttatacagagataaactagaaaccaatttgctggggattacatttcaatatctgcatttcactttgtggttgataaaagagatggctatgaattcttgaaattctctaccacaaataataatctaaaatacagcaacgttgtgatagtccagtatgtgattatcgatgttctatagggctttcagaaaatgcctggaactataaagcaattggtgtttgacttggtataaatagaacacttttcaacatcttgtcatgctgtgccagggagccctttaattacaaatgcttaaaaaattttgttaaagtttttatagaaacttagtgaaatgttcctattcagttcagttgtggtaagagctcctaactattgagtgctaagtgcgttctttttatagatcaaaattatagactcttttttaaaagggggaagctgctttagtttcagagaaattggaaaatttcctgcacctcctttttggttgtgagtgtgaacaggagcctaagtgagggagccatccaggtctttgcacagtggggagcagtgagagagagtgttgtctccataaggaaggcccttttctctccagatagacacccaaattggtgacttgaaggaagaactctggaaactcactgggctctggcttctgctccaggatgtcacctgtgttttatctatacggttgcctatagtcttgccaggcatctagggaattaacaacgataggcactgggtgaaatagaaggcaaattacgcagaaatcttaatcataaagggagagccccactgagaccaaaattaaacctcactcttcgaaagaacattgatgtttgatctggggcaagggttccttcagattaaaacagaacacacacacacacctcatctaatgaaacagagtatgaatacttcttaaaaaggaagggttagccgggagtggtggcccacgcctgtaatcctagcactttgggaggccgaggagggcagatcacctgaggtcaggacttcgagaccagactgaccaacatggagaaaccctgtctctactaaaaatacaaaattagccgggcatggtggtgcatgcctgtaatcccagctactcgggaggctaaggcaggagaatcgcttgaacctgggaggtggaggttgtggtgagccgagatcgcactattgcattccagcctgggcaacagcagcaaaactcggtctccaaaaaaaaaaaaaaaaaaagaagggttaatgggaaggaaatgtcaggcatctgtagacacaaaattgttgttttagtgggatgaaaaactttttttttttgtataaagcacagatttacataaacagatatgcagtctatctgtgacagtgaaatttcatggggactgattaggaataaaatatctaaagaggctcctggaaggaacaataatgtaaaaaaggttgaggaacactgatttaaagacatacatttttcatattttaacatttctgaagttagaatggatcttaaaattgatggcatgtcatagtttaattttttctttcttagtggaacttacatactacacgactgtagttttagatttgctgaaatgctgtgtgctcccaattactgggagataagagaagactacctttattgtttgatcagggaaagctgacaaaaggtcccctcaaaagcagaagattcttgaacatgtaaaaaatgaaactatcaatgtttccctactttgttttgttttacacacgcgcgcacacacacacacgcatatgcacacaattttttttctttctttttctaactaaatgttttcatggatgaagtcaacattgtaccagttttctaggtcagaaatgtcacttacctataactttccctgtgacccagtcctaatggatttctaattgagctttacatctttgttgcagttgctcaccctcatccctttccaccctcatcccaaccccccagccacccttgcttccctgccccagccttccatctcatctctcttgcttccatctctggcttttccactccagccagtaatgctgctgccagacccatttgctttttatcacatcactttcttgcccccaaatctatggcaccttcattttgcccttttcattgtttaaagaaaaattgggttttacatgatagcagttatgtttactagctgttgataatatcatcacacttgaatgcagagcagtttctgggcaaggtttgatttcagtgtttttgtggtagcatttgctagactttatatttcttattctgtttcattctcttacagctggtcttggaagaacagggacattgatagcctgttatgtaatgaaacactacaggtttacacatgctgaaataattgcttggattagaatatgccggccaggctctattataggaccccagcagcacttcctggaagagtaagtatattgtccccattaccacattatatcctgttcttgatcctttctacctcttgttcccctggttgtggaccatgtcagcctgtggttataaaatggctgcattgttaagagaagtgtgtgcctctaatagaatattgttgatttgacagctaatgcattctaactttgtaccttttatatctcttagatcaggtgagagtgagaagaaaatcacagagccatctctgcctaccctttttctgtcattttctatgtgtgatctggctacagtgcaattttcttatgacatcccacttggcacttttcattcttttcttttgtttgcatgtcttaaagcataatgagaaaaaaaaaaccacaattaaggtcactcagtgattttggtaagattgctgctctcctgacaactaactaactaaactgctaatgtaggtacaacttatgaatatacccaagaagttaccacagaagaaaaaaggaggagaactgagttttagttctggctctccactaactagctttatgaccattatttagaagaatacttatgtattcactcattcatttattcccacagccattcattcattaactttttgtccagcctcagcccaagagagagagatttaacctgtaggacacaatcctttcttcttagaatgttagaacgtatctcaatgtactcattaataaaacaagaagatgaagttagtactggttgatctaagtccagctctaaaatactatctattagtgatatcttttactgaaatttcatttttttttctttttatgctgggttgactctattttattttaattttaattttttattttttgtagagacgggggcctcactatgttgcccaggctggttttgaactcctgggctcaagcaatcctcccaccttgacttcccaaagtgcagggattacgggtgtgagccactatgcctggctgatggctctcttttgaatagcattcttttccatataattatttatttccaatttaaatataattattcctttccagttttaatgatcatgatcatgtgtgaattcgtaaagaaatgatcatgaatttcataggaagatgccataagtaaactcttagcatctgaaatgattaagaggatttgagcctgctgagggattacttactttagttgccagtcctagaggtaataactgattaagaagtgctgaaaaatgagtggttatactttagcttaaaagaatgatgcagatgtctaatgaatgcattagaaaaaatatccaaggacaggatcattacaaagacagggatttctctctttttacccgtgaggtacaaataagataattctgttattttggagctttattcttgatcagattctcattgtcttcctctatttctctgttttgcattttatgtgcctgtagcctggagctttgtgccatgtatctgccaggttctcattatactaattgctgaagttgaagaaatggtcttagggttaaaaaaccaaatactcctaagcctagttctttaagccatttaatcaatgtcttaaaattattgcttgtcatttaataggtattgctatacctattgccccaggcattctgctaagtacagctcgcaaggtgaggagatatagcagagaattctaccagtcaaggtcacctagctttctcagggtgtcagataacacagccctcatgtttcatggctgcatactccctccaacctccctattatactctttctctctgccatatctcaaaatagtaagagaagaaattagagttatgaggcaaaggcactctaggctgaagaaaggcttttaaatttatagatacttaagctgtatataaagaactctcaaaactcaagaaaacaacttaatataaaatgagtaaatgatttgaacagaaagtcctccaaaatgatatacagatggtgaatattcctcatgatcataaacacagagttcttaaagaaacattgcatatcaaatccagctgtataaaaaagatagtgcatcatgaccatcatggctcaatattagaaaatcaatataattcaccaaattaacacaaaaagtagaaaaattatatgattatcccaatagatgtacaaaaatttgacaaagtttagtacccatttttaatagaaactttcaataaactagaaatagaaggaaatttcctcattcagataaaaataatctatgaaaactctatagctaaaattatatttaatggtgatgcttttcctgtaagatcaggaacaaaacaagggtgtctactctcactacttctaatattatactggaaatcttaaccagtgcaatgaaaaaaaaagaaagaaaaaaaaacttagaactaaagagtgaaattagtaagattgcaggatacaaagtcagttttcagaaattttagcaaaattttaaaattctgctaattaaaagacacacagtatatatatctgacaaaagacttgtacacatatattaaaaagtataaataagcaattttaaaaattaatttttgaatgggcaaaagccttggccagatatctcatagaaggtaatatatgtatatgaaaagatgtccaacatcattagccatcagggaaatagaaattgaaaccacaatgagatactattttatgtcaaccaaaatggcaaacaaaaaagaagttttactacaaaatgctggcaaagatatggagcaactggaactctcatgtgttaaccaattggtgtataattgtttggccatttctcataacgttaatctatatttaactctatgacccaatgatttcatttctaggtatttaaataagggaaatggaaacatttgtctacaaagacttgtacaagaatattcacagttgctttattcatagtagcccaaaattagaaatcatccaaatgtccgtcaacaatttatgagtgaatatatcataatatgttcataaaatgaaatactagccagcaataacaaagaatgaattactgatatactcaacatagatgaatatcatattattgtaagaggaaaaaaaaagccagacacaaaataatacatgctgtatagataaagcccaagaacaagcaaaaccattctgtggtgatagaaatcagaaagcaattgcttctgaggtgtgtcagggaaaactgaccccccaaaaaagcatgacagaactttctagagtgttggaaatgttctgtatcttatcttgggttgtgtttacacaggagcacaatcagttgtaattccatatactagccttaaacaattagaaaataaaacctaaaaaattataccatttacaatgtatctggtaacttcaggttagagatgtgcaatatctctacacagaaaaccgaagaattttttttattgagagaaattaaagaagatataaataagtgaaaagataaagattatcttgaataagatcaaagctggaggatttacactcccagatatggattcattttaaaactgcagcaattatgatattgagatattggtgtcaagacagacaaattaaccaatagaatagaatataaagtgcagaaacaaattcaaaaatatacagacacttgatttatgataaaggtgacatgttagagcaacaggaaaaggtctttttagtaaattctgctgggtcaactggatatctatatggggaaaaagaagaaccttggctcctatctcacaacctattttttaaaggaattcctgatgagttgttgattcaaatgtgacagaaaaatcagtgaagcttctggaagataacataaaataatgtattcatactttgaagttaacaaagatatcttaagtggtacatggaaagcattacctataactgagttgaaattgtaaaattctcttcatcaaagacactattaagagagtgaaaatgaaaaccacaagagtaggagaatatttacatcacataataatgggcactgtacttgtacccagaatacttacactcctacacattaacaataaaaagacaatctgataaaaaatgtgtaagaaacatgaaaagacatttcatagaagagaatgtacaaatggccaataaacatacgaaaagcgattcaccctcattagctatttcttatcttttggtacagctatctgttggagatatacctgtgagtggaacagttgggtatgtgtgcattcagagttagaattattaaacagttttccaaagtagatatgcctgtttatgttctcatcagcaatggtttgtcagtctcttaaatttaagccattagattttttaagtgataacttgctttatagttttaatttgctttttcttgatgactaaggtcaatctttgtatattctagatactagtcctttgtctggtaaatgtttttcaaggtttttttcagtctataacttgtcttttcatcctcttaatagggtcttttacagaataaaagttttaaattttgatgaaatcccttttatcacttttttctttttgatattgtctgagactcttagtttagccctagactcaatgatttctcatatttttttttctaaaaagtttatagttttacattcacatttaagtctgtgatggattttgaggtttttgtttatttcataacgtgtgagacttaggtcaagcttctttttttttggcctatgcatgcccagttgcttcagtaccattttcgttgaaaattcagtttctccactgaattttttctatagcagcatcaaaaatcatttggatatatttgtgttgatctatttctttgttctctattctgttccattgacctatgtgtctccttccttcaatgccacactctcttgattactggacctatatagtgagccttaatattggaagagtgattccttccactttctccttgtttaacaaaatattcttagcaattccactttcttttccttttcatatacattttagagtaagcctgtctaaatctacagataatgtttctgggattttaataggaagtatgttaatcctctatatcgatttggggagaattgacatctttactattgttgagtcttctaatccataaacatgatatgtcttttcatttatttagatcttctttgatttctttcatcagcattgtgtagttttctggatgcaagtccttttttgttaaatttacacctaagtacttatttttttttagcaattataaatggtatttatgtccatatgttcattgctggtatgtagaaatacaattgatttatctttttctttctttctttttttttgagacggtgtttcactctttttgcccaagctggagtccaatggcacgatcttggcttactgcagcctctgcctcctgggttcaagtgattctcctgcctcagcctcccaagtagctgggattacaggcgtgtgccaccacgcccggctaattttctgtatttttagtagagatggggttttaccatgttggccaggctggtcttgaactcctgacctcaggttatcctcccacctcggcctcccaaagtgctgggattacaggtgtgagccaccctgcctggccacaattgatttttctgtttattttgtatcccgaaacctaggagttttatatgggagtgtgtgtgtgtgtatgtatgtgcaaattcttggggattgctttttcatccacaaataggacaattttattttctttctaatctatataccttgtgtttccttttcttcccttgttggacaggctaaaacttccagcgctgtgatgagtaagagtgataagagcagacatccttgtcgtgctcccagtcttggaaggaaagcatccaggcattcacctggattaagtatgttaattgaggttttctatagatgttctttatcaggtcgaggcggttcccctctatttctgtgtttctgagggttcttatcatgaatgagtgttgaatcttgtcaaatacttttttggcattgattgatatgatcacatgattttcttcttaagattgttaatatggtagattgcatcgattgttttttgtatattgaagaaggcttatgtccctggaataaacaccatttggtcatggtgtgtaattctttttatatattgctgaactctgttagttaaaaatttttatgtccatattcataagtaacattggtttgtagttttcttttttttgtctgttttgtctgggttttgtgtcaggataatactagtttcatgaaatgaattgggaattgttcttctctgtttcctggaagggattgtgagagctggtgtgaattcttaaaatgcttggtagaattctccagtgaaattatctgggcctggggatttctttttaaaattatgaattcaatttccttaatagatataaggctatttgaataatccatttcatattgggtgaattatggtagtttgttttttgaggaattagtccgtttcatctaaattgtcaaaattatgtttgtggagtgtgtttttttttttttaaagtattcctttatgtttgcagagcctgtagtgattttcttggcttcatttctgatgttagtaatttgtgtatttttttttccctttgtcagtctccctagaagttggacaattttattgatattttcaaagaatcagctctttgtttcattaattttctccttatatttttgtttttaatttcattggttcatgtttttatatttattatttccttctgcttccttgtagttttcagtattttggcaatgtgtctaggtgtggatttcattggaattatccttttttgaggtttactcagcttcttgaatgtttaggtttatgtcttgtcaaatttggaaggttttcagctattatttacttaagtgctttctcaaccctgtcctctttttcctttccttctggaactctgttgacatgagtgttaggtttttgttatagtcccacagctctctgggactctcttcatcattttatttttagtttattttctcttagttattcagattgggtagtttctactattctatcttcccctttacaaattctctcatctctccattctgccatttaacccactcactgaattttacattttggttatatgctattctaaactttctgtttggttttctttatatctatttctttgctgaaacttcctattttgtcagttgtttcatgtgtctttgtaattgtttgttggggcatttttatcatggctacttttaaatctttgtcaaattattctaacatctctgtcatcttggtgttggcatttagcgatcatctcttttcattcagtcaatgtcaatgtgagaaaatgttaacctggacattttcctagtatgttgagactctggatcttactaaaacattctgttgtatctggcttcttacactgcttcagcagaggaaggtggtggcagctgggttggggggcagggggttgccacattgctactaccaggtggaggcaggaatctggattctgtactcagcctctgttgatgtccaaggctgaggggcttcttgttgctggtgggtggaggtgggagttctagttttccatcgggtctgcactgacactgtgataggggtcaccttgttactgaagggtgttggtgaaagtcttcactctccactaggcctcctgtgacaccactccagctgacagaggagggttgctggtcactgcctggttgaggtggacttccaggttccaccattactaccttagtgaggagtggggccgaaattgggggatctcattatctgactcccaacttagccttctttgacacttctgtggcgagggattgacaaagggtaaaggggtgcctacctatagcctggcagcgtggaaatccaggatcccctctcagtctttgctggctggcagggttagggccacagtttatttcctgtggggtttggctggagaagagcagttgttgaaatgttttgttgtctactaggatacccttttcctgttcctttgactagacagagcaggcttttcttcgggctttaaaaatatcagctctgggctgggcacggtggctcatgcctataatcccagcattttaggaggccgaggcgggcagatcgcatgaggtcaagagtttgagaccagcctgatcaatgtggtgaaaccccgtctctactaaaaatacaaaaatcagctgggcatggtggcatgtgcctgtaatcccagctacttcggaggctgaagcaatcaattgaaccttggaggcagaggttgcagtgagccgagattgtgccattgcactccagcctgggcgacacagcaggactctgttgaaaaaaaaatcagctctattggcatttttgaatcatatcttcttcagccctaagactaggctatataaggcaaaaggaaaactcgaggaactcaccaccatttcgttacttaggtctcaaggttccaaccaatctgcctttttcttttctatttttcagagtcttgttttttttttttaaatatatataggattttaaattttacttatgggaagaatagggaaaagtacatctactttattttccagaaatggtgttattgccttatattttaaggtaattagtctgcctataattttcggcatgaaatctgctgtggcagtctgaataatgtctccccaaatacaggcatattttaatccctgtgaaccagctgtgaatgttactgtatatggaaaaagggactttgcagaagtgattaagttaaggaagttgatgtggggagattatcccggattgtttgggtgggcccaattaatcacagtgtccttagaagagggacccagggggagccatttagaggagaagccgatgtgatgactgaaacagattggactgatgcattttaaagatggagtaaggagccataagccaaggaatatgggcagccactgtaaattgaaaaaggcaaggaaacaaattatctcctcaaagcctccatatggaaccagctctgcctactgtcactgctttagctcagtgaaactgatttcagacttccaactccagatctgtaagaaagtaaactggtgttcttttaaaccaccacatttacggtaatgctttacaatatccataggaaattaatacatctgctttgtatagatagcaaatatgtacagcaggagatgcagatcctagtgatgaacatgcatattctgaacttctcttattcatcatactttctaatttggagtatttaattccaaatactccaaattagaaagtatgatgaataagagcatatagaggagtcgtgtgacttaagtgttatttaaggaagcttgagttgcaacaatgtgtaagatgaattgggtggatggagattggaatcagagaggctaaaaaggaggctattatcatccatctcagagagacaaggacttatcaaaagaggatagaagttggactgaagatttagagatgggtaccagggacatttcaagaaaaaagaaaaaaacaaggctttgaagactaactaatgatcagagagatgaagagtatgaagtcaatgatgacgcaaaagcatgaataagtaacgtgttcattaagcaagaaataagagggtaaaaacgttttctgttaggttttcacctgtcaaaaatgactgaacaagttaaagtgattgtattcttttaaaggtgaaaagtcaatcagtgctttttagagaatgttaattccaaatctctgactttagaaaggctggtttgtcatatcctcctagtccttgaggaccaaaatatgtccaggtgcttgattgccatgtcttaaacaagcagccctcttattcactggcagtaagagagatgtttattagcatccttttgagttgttgatgaatttacttattggctgacctctcctttgttacagtctgaaattttatatttaaacttttaaaggatataaagctctctatttgcaaaacaaccatcaggtgtttttcttctatttaaagctgaagttcttaaaccaaaaataccattctgaatcccaaatgtgtcttctatcaaacatcctcaaggttcttaaaatgatgtaaaaatacatctttttgtttttgagccaactctggactcaatgtcctccgagacaacctttagaagtataaaggtggagtcaggctgcttttacaacttggttgattctatttattgaacatttgctgtgtgaatgttcccctgaccttgggtatcattatctatctgtgatagataacctatatcacagatagatagatctatctgtgacagataacctatatcacagatagatctatctgtgacctcggggatcatcatctgttaaagctttcattcattataaagggatcattgagggactagtgtggggctcccacggggattttcagctcacggagatcctttatttatgggtctcaatatggcattgtttttgttttacatttccttctgagacagagagaactcacataaagcctaaatctggctcttgcaggaagttttggctctgtaaagcagagcttccattttgaatgaggttatctttatgaagcacagtattatggttgaactctttttcattcttaaatccataaatcaaaaattcccctgttctactttattacaatagatgttttcatcagcttctactgagttggatattttcagaattctaactttgttgcaagccttccattgtcttcagtgcttctcaaacatgaaaatgcctaggaattgttgggggatcttgttcagtgcagtctctgattcagcaggtctgaggtgagacctgagagtgtgcatttctaacaggctcccaggtggtgtgctgctgctggtccctgaaccatattcaataacaagggtgtttggctcatccttactctgtaaatatcaacttaggctacatcttaatttggtgccaatagtatttcgtaagtttcacaattggattgagctagatcagaaattaatagttaaaccattgcttttttatttcaggaattagcaaaaataagatgaaaaacatctgtttagaaaatggaaaatgcttgaaaaagtctaacactaatggtttgagttttagttgagattgacttctatcatttccttttaaaaaaagttaattcttttttaaatttcaatagcttttgggatacaagtggttattggttacatggatgaattgtatagcatgaactccgagattttagtgcacccatcacctaagtactgtacattgtacccaatatgtagctttttaatctctcttgtccccgaccccaccttctgtgagtctccatagtccgttatattcactctgtgtgcctttgcatacctgtaccatttccttttatggttttcttttagatacatgcagtaggtcaaggaatataggctaaaaaattttaattatttattttaagggtttaaaattttgtgtttcctaaaatacagaaattataatctgaaatactataaaaatcagaatttaacaaaacaagatacagtgttttattagaattacaagcatactgcataggtttgagtttacactatttactgaaaatgacatttttgtagtaacactcaattatagaattttctgattttcaacagttactgctgcattatctgatccatttgttgactgccagttgatactggaactactgactaagcaaaaataaaatcctaatatgggttcaagtattaaggataattaagtatgtatcagaatctttggcagtggttgcatcagaaatttattattaaatactcatgccagttattactctagatagaagactgactttttaaattaatgttttattatggtaaaatatgtataacataaaccttacaattttaaccattattatatgtataattcagtgactttatatatgttcacaatgttgtgcagccatcaccactatttccagactgtttcatcattccaaacagaaactttgtacccattgaacaataaatcaccattatctccaccccctacccaagtccctggaaacctctattctactttctgacattatgaatttgcctgttccagattcctcatataaatggaatcattcaatatttgtcgttttgtgtctggcttattttacttagcatatttgcaacattcatccatgttgtaacatgtatcagaatttcttttagaggctcaataatattccattgtatgtatatatcccattttatttatccattcatttgttgatggacgtttgagttatttctaccttttggttgttgtgaataatgcaactgttctgaacattggtacacaagtatctatttgaatccctagtttcaatgattttgggtatatacctaaaagtggagttactggatcatgtggtaattctatgtttatctttctgaggaactgtgaaactgttttcctcaacagctgtgccatttttcattcccaccaacaatgcacgaggggtccagtttctctgtatccttaccatgaatggtttttgtttattttgttttgtgtgctctgaataaaactatatgaaaaaggttagagatgggggaaaaggtattgtaagcagtaagaaagtaagcagtgatatattaggcttagttatgaagtttgcattttggcatgacactccaatgatctagcttctgattgtagggttctatacctaaactagatttagttagttgaatcttttggagaattcccttcctcagttttttgcttctagcttcattttctagtatgtttcacaattaactgccttcccttatgctttcagaaattctctaaacatcttcctagtgaatcttccacttgtaccacagcatttgaagaactccttgaatacctgttgccttcccgccccctgcatcttggttactgcttcccatctgtcttcctttgatagcaaggtagaccattttgttagcccacttctttaggccaggaactgtctctgtttccataatagctctgggctggtggaatagaaggtacacaaaacagattggtactcaagtcatggctagagtaggcctaggccaagctagagagtgggttatgtttctatttggagtgaccaaacagtggctttggatggactttggggtcagggttgagttttttgggaaaattgtccaggatggaagaaggataaagataaagagttcggttggtgtggagatgggattgggctgggcttagggaagtgaaggaggacaggtcagccacacacagaagcctgcacaacagcttccattgtgttctggactcagaactaggaatattcactataacagtgtgactgacttgaatttcattagaggaatattaaaagcagatgtaaaaaaagacctgtgaaggctctagatcagaatcaactgtaacttggctcataataagccaagttatttcgttattttcttatgtcccatgcctggctagcctaaacccaactaacccagggcaaggacatggctgaaaacaaggaccccagcactggctatacttcttaaggctctattcaaaccaagacacatctcttcctgtcattttaaagcacatgccctttttagcagagggtcagtaaatttcatgctgtcttagaaaatgcactatattcttggagaatgtactttgagctggtgtgttggcttcataagatttgatttttaaatactaaatgcttaaaaatacatgttttacttcttttgtttgagatgaggcttttagggagtaatagacaccacaataaaagctagcatggtttgcattttcaataaaaaggaatttgcgtgaagtgctgctttttctcaagaagcacttgcgtacagcattgcttagcaacacacaaatcagctctgacaccttattcatctttaatattcaggttcaaatcaagcctttccagagatgggacagattgcgtctttcaaaccaagcaagtgaaagttgtcactttgtaattttcatctttaagttggcagcagcatcagaattttcattttataacttcttttgaaattggaatttttttcaactagcctcttatgtccttctcctctgttctcactttgttttttgttcctaaagactcttaaaaggtctttcctgtatttttggtatcaaatttaaattccttaggatgacatgcaaggcccatctctcatagcctctgcttcagccaaattaaacaattcatgttcataaacatgctgttttctttgatatcactatttttccagcccacattgttttctttgcttggcaatactcttagctgggtaagtcctgctcatctttccagatacttctggaatgttggggaacttctttttgattccatcagattgagtaaggggcctcttttcctgaggtcctgtgcaaatcctgatcatagggtttataatatcggacttcatttgtttgcttttctcatcctaaactagaaatcccttcttgagagacagggattcagtctttcatccttatatcctgtcctacctgtgtgtttcatttatctgaatttcttactatttatgacagagctgaatcttctctttttttaaaatcatgatttttattcttttcaacctatctctctctctctgtgtatatatgtatatacagagagagatatcgaaagatatagatatctatatatatatttttttatactttaagttctagagtacatgtgcacaacgtgcaggcttgggaggctccatccgtgttcccataaatgacatggtcttattcttttttatggctgcatagtattccatggtgtatatgtaccacattttctctatccaatctatcattgatgacatttaggttgattccttgtctttgctattgtgaatagtgctacatgaacatttgcgtgtatgtgtctttatggtagaatgatttatattcctcaagatatatactcagtaatgggattgctgggacgaatggtaattctgtgtctcactctttgaggaattgccacactgctttccacaatggttgaactaatttacactcccaccaacagtgtataagtgttcctttctctctgcaacttcaccagcatctgttattttttaactttttgataatagccattcttactggtgtgtggtggtatctcattatggttttgatttgcatttctctaatgatcagcgttttaacctgaattttatgtgatatgtgaaatctttgtgagaaagtattactcaatcctgttgctttaaaaaatatctatgttcttactggtggcgtctccttgatgatgcaattatttcactagatgttgatattttttatgacgaaccacagtgtttttagtttaattctattctgtacagtgtgttataggatagaaataaagtgattttatggaatagtttatcttataggaaatgtatgaaggtgatcccaccaataaaaataaaatcctcagaatgtcattttgcttacatattttaaattatcttcatataactttgaaaacagttgtgattttgccttaatgaatgaaagaaagtttatacatgaacttcaaacacattttcttttctaaggacaatctaattgaggatataagccttgcttttagattctaagagtaggtttttaaagttatgtgtgagggcctttcatggtaccacccaaaagtaggtatgcaatacttttttgggtaatatctccatttaactcaagttctttcatgtacagttttgagtccagttattctctctgtttttataaataggcatatcaaattgctatttgagaaattgaaggtttcaaatttatatttaaaagacaaatgggctcataatctttattgctgtggaatttgttctaagcatctgaggacttcagcagtcaactatatagacaaatattggaggatgacatttgtgtttaatatagaatcttattttggctttttgaaagtgacttcattgttctttattctaagatatcataatctttctagtctgatttgtaaatgcttatttgctaaatcttttcctttataagacatcatacctttgagatgagagtagattgttttaaagataactttttcttgtcgttttgttttgttttgttttttatacagaaaacaagcatcgttgtgggtccaaggagacattttccgatccaaactgaaaaatcgaccatccagtgaaggaagtattaataaaattctttctggcctagatgatatgtctattggtggaaatctttcaaaaacacaaaacatggaacgatttggagaggtaagttttccctaggagattctatcttcttaaaactgatgttctgcatttgtttctcagttggacctatataacatagcagtgtcttttctctggatgccacgagtaccaagtttttagaagtagagccatccgtctatatagcaagaagcagaggaaagaaaccaattgcccttaaaaaaaaaaaagctataatttaaggagtaaattataaaggaggctactctggtaaggggtaatatttatagaaaggaaacagaaaagcaaactttctatttgaaaattaaaataaatatcaagaagaaaaattttaatgtgacaattgaggaaataatacataccacaagtggtgctttgaaagcctcaaattcatgctgatttctaaagtaagtgccaacttgaaaacatgattagggcacttttttaaaaaaaaattaaggctctactgtaaacaaaccactgtaaatagttgatatatattgtctgattaatattcataactacctggtgagttaggtaatactatctctattttataggaaggaaattgcatatcagagatgttctaacctcagtgtcaaacatggttcaatccatgtctgtctgagtccaagcttgtgtttttttatatcacaccctgttacctctgaataaaaatagaagtgatttactaagaattaggattatgagcatttttggaactagaaacaacgttgaaacaccatttgtttggttccactattgtagagacaagaaactggggtcccagaaaatttgtgatttgtgtaaagttccagggttgtttagtagtggggccactttgacaactgggcattcaattcctagtttaggtctttctaccacgttatacctgaggtgaagctaagtatctggtttatacttttatatctttaaaggagaaaaaaagaaaagaaaaaaaggacctgttcaaaatagtggaacaagctaggcagcgtgatgtgtgcctgtgtggtcccagttacttgggagactgaggtgggaggatgtttgagcccagtggtcgaagctgtagtgagctatgatggcgtcactgcactctatcctgggcgacagagcaagcacccgtctaaaaaagtaaaaaagaaaaaaagagaaagaaagaatatagaagcaacaagtgtagatttacattctattagacagtgacccattagacccggacaagggccttaaaccaaatactgtggctcaagcttagcccacaaggagcccagaatggaaggaacacatcatagctctcttaggttaatgactggcatcccaaacagatttctttttagcaagaaagatagccagagtgcttggagattgggagcatgaattttctttcagggacaaaggatggagaccgttggaagaaatgatttttaagcccagtgctctgttctccaggatggctgctgatgaggtgactaagtttacccattcgagtcatctgtcctgatgaaatgtacaccttatccaaggtcatgttgatgttagagcctttgttgacttttctttgtctctgtgttccagtttcacctattaagagcaaataaaaagaaagggtctgaactaagattttaacatgataatatagctaagcaagaatacctttttcttgctctagtcagcatttcctccccaggttgagtacaagtaaatagggctttgagttatgaactctgaaaagacaaacataaagttaatcccgttatctgagaaacatatttaccttgcaggaacatagtactttctatatcataatcttgattaagttaacatctggtagttagaacgttttattctcatactcttttaatccccaatttgttgaatttaagaaacttaacatttatgtatcactgtgagggtaaggaatgcaatatgattggaattttaaataagacagttttaaatataagtgtatataagtctactcccccgtcttagtccatttgggctgctgtaacaaaacactacaggctaggcagcttataaacaacagaaatttatttctcacagttctgcaggttgggaaattcaagatcaaggcatcaacagatttggtgtctggtgagggcctgcctagtggttcatagacagcaccttctgcatcttcacatggcaaaaagggcaaacaaactcttaatgccatcaccttgtggggttgggatttcaacatatgaattttgggggctacaaatattcagaccatagcatcccccatcattattttagttttagccattgaaatgctattgtttctgaaattcaagagcagaaatgaaagaattcagagatgccagagaatgatggtatggtgaatattttacacagcatcatgtatgggccctaggactactttattagctagttaatggctttgtgcaagtaactcttacaagcacttttctttccatgcttatctggtgccagctctggaatatcacatgaatatggaaaattcgcttactcaaaattggtcttaacagagttaatgatgtctttattattcttataaattgcacatgggaaaatagattgagaatgctgtaagaatttaatgtgtttcaagttgcatgtgggtaaaagtctatggaatttctggatttacttagtttgtatatatagaaagtgcaaaaaggcagtattcctcttgagattgacttttaaaaaaaagattaaaagcagagattctaaattattattttctttctaggcctacagtaattttcttgtgattagttactaggaagctctgtattaccagatttggagaattcgaatagagttttttaggccgggcatggtggcttacgcctgtaatcctggcactctgggaggctgaggcagatggatcacttgaggtcaggagtttgagaccaggctggccagcataacgaaaccccatctctactaaaaatagagaaaaaattagccaggtgtgatggcacatgcctgtagtcccagcttcttgggaggctgaggcatgagaatcacttgaacccgagaggcggaggttgcagagctgagatcatgccactgcactccagcctgggcaacagagtgagactcggtctcaaaaacaaaacaaaacgaaacaaaacaaaacaaaacaaaacaaaacaaaaaacaaaaatacagttttttagtgcttaggatgtaggtgaaaggaaaacaaccagaatgttgcaggtcatagtgatggactaagttgtggttttactgaatgttctttgccaacttagagttatgagaaataaaatagaggcttcacctttattgagcctggacttcagtgctgggctgggcactatgaaatatacacagcccatcctgtgggtctaggttaggctccctgctccctgctcctgccttgcactatacttttcccccacagtcctcatgcctccttccctgctcggtgatactctctaggaaggcagagacttttatttgtcttcatcatgattctgtttttggcaaaaggccttaataagtattatgtgaatggatgaagaaggcttatagtttcagagaaaaaaaaaggacagagacatgaaattggtaataatctaagctacacaagtgcattatgtgctcaaatacaaaatagtactagcaataagtgctcactttaacatttaggggcctatgggtccattatggcttggagttattttaaaagatagaatttaaagtactttatttaaagtgcaaatattaaatcaggatcttagcatgaagttactgtatgccagtaactgttttaggcacttgacattaatgaactctattaatccttacagtagccatatgaaataggcactgttattaggcccatttacaggagacatacctgaggtagaggtcaaaccatctggccaagatcttgggtacatggtgaggtggtcatttgaacttctgtgctctggctccaaagtttgtgccctcagccaccctcccgggaggcctctcactatactctgctaactctctatgaggtcttcattgtggctttagtaaattatgtacagtaattttgagcaaaactgtaaccattccttactaataaacttcttctggaattacaacggtttttacattttgtctttctactctagggctatagtccaatattagcataccaatcagtagatgctcttgacttagtgatattaattagatacaggtgctgctaatattcagccaagttcatacaaattgacaatcaagtagacaagaatgtagtgttttaattacatctttgagacattgtgatttataaaatccatcaagtactcataagcagggtacatcttagaaaaatctatgaagtaaaaattaaatctctaatgtcctgctttttaagcacctttctttcccccattatgacagtgaagaccagttctaatctgaatgccattgggatccaccagaggttattaagcaggggagtgacagcacacagaatcatggtgctgagagatcactctggctatggtgtcatatagggctgagggtggaaggccagggagttggtgatggggaggtccaggttttaaaggacccaaccagtggcagtgaatggggcagccagaagagagatgtgggcagctctgataaattcaaactttttattgatcagaagcagcttattataaagatgacatctttgcctttccccagcacttacatctcataggttcaacatctgagagctgaaaagaactctagagatgacccagccacctttcctagccaatttattaaaatctgctaaaaattccattctcatctttatcttccagttcttggacttctatttttactcatttctatttaaactgtctatttatgtcatttttctattaggactcttccatctttattccctagtgtgctatattctatctcatagatcttttcttaatgagactttccacagcctttcctatagcttactgtgccacgattttgtttaggttttggtcagcaattactttatctagctgaaatctgtggacacgattgtgcatagagaaaacaactggtggaataaaatatttattcttcatgttgttgtttgttctttcactaggtcatcactcatgttttttttttttaattgtacttcttttggtacaatattttagtttactaagtgatattactaaaatatcattttcttgccttcatgtagggcagcccagtatccaaaaggaagagagttgctgcttaatcctccaaagggcagtggggcatctgagagcagacccctttcctgtgggggacaaagataggagggtcttccctggactaggtagggttcttcattgttgccagcatcagccaagtggttttgtttcttttcagcagattccagggaatctgcctctcctggactagcttaggacaagagagagtctgctctggcattttgtagggagatgggctggagcctaagggcagaatggaggcccaggttgggttctcctcatttgtcacttgtgaatgtgttctttagtcatcatgaagaatgaatctggtataaggaaggaggcctaacagcacctgatgagaaaagtcttcaaacactcccctggctaccaactcatgagattgatttgtgccacacaatatctgcatttgctaataaacattttcctcccacaggctcttatgacctggtacatcttatcggatcaatcccctaataaatataaggcttattatatttatgtctgtgtgtcttattcagtattccaggaggccaaagtccttttccatatagctttttagtttcttaattctgtaatttaatgtaaatatgttttgaataatgttactatttttcttgagtttgaaggctatttattaatcactgagaattttatagtttatatgttctatctctcatagtcctaaaaatgcccacactttgtacaatggccacagagaaaaaataaaagaagattagtttagacaaaaatagtacggtttacattttagtagattttttcagacctatattgcctgtctggatctttcctccttcttccctctccccaagtctgaactccgatgtggtttcccgtaccctaatccagtccatcatctctcatcagaccactgtatagccgcttaaatgtgtccctctcccgagtcttgacctccaattcattctcacagtgatcaatgggaggaaatatatgcaatatatgcaaatgaggggggtcgtgtgggtgtaaagaactcttacaaatcaccaaaatactatgtgcacaaataaaacaatatgggaaccctcctggctggtaaacataaaaaaattctacttccctagaaatggaagagacacaaatttaaatgatgagatgctatttatgcctatcaaatgtattaaaaatgtatgcagtattgacaaacgtttagggaatacaaagctcttaaacattgctagttggaatttacaatggtacagccttttggagggcaatttgatcatatgtggaagatgactttaaaaggaattccacttctatgaatttgtcttaaggcaataataagtcttcataaaccatgtatatataagagtatgtttgttgaggctgtttatagtgatgaaagacagagaacagcctaacctaggctatcggttaaataataaaattaggcatatctagacaatggaattttatggagccataaaacgacagagatttaaaaaaatttgccctgaaaaacttccactatatgttttttaagttaaaaaagttacaaagcagcatatgtatataatacaacctctttttgtaaggaagaagtaggttgggggttttatatagcacagggaaaattctggaagactgtgccagaatgttaatgtgtgttgcttttgatggtaaatatataggtggttttaatattttttcctgtttacctatactttattactaatgacaaacatatggtaaacatatctccatatatatggtaaatgcatatatatttaaatacataaaaatatatcataaatatatctgcatctctctctctctctctctctctctctctctatatatatatatatatatatatatttttttttttttttttttttttgagacagtctctatggcccaagctggagtgcagtggtgcgatctaggctcactgcaacctctgcctcccgggttcaagtgattcttgtgcctcagtctgccaagtagctgggattacaggcacgcaccaccacattcagctaatttttatatttttagtagagatggggtttcaccatgtgggccaggctggtcttgaactcctggcctcatgtcatccacctgccttggcctcccaaagtgctgggattacaggtgtgagccaccgtgcctagccagatacctttttttttttttttgagaaaaaacacctctgccctcgtggtcgtcaccaccgcagccacccgagaggagctggggaagaacagtggcccgcgaggctcatcacagacaatgcggtggctcctgtgagggtgtttaagtaaacttgaggggaggaagtaaaagtatgttaaatctgggtagttaagtgcatggctgtgtattgtagtatttttgttcttttctgattttgagatgtatcataatttacagaaatatttgacctttaagattcacaatagaatgagagaaaaatacatgcaaagtaattataatttaaaatgtactgttatttaattttctgtttaactgtatatcttttaaaatgcttttattcttttcaagcaatatatgatcacagcttaaaaaatatcaacaagcgttgaattctagcaacaaaaaatatcagtctcctttctcacctttctgtatctctggacccacttccaaagggggaaacctctaggaaaattatactattatttttagtgccatatttctattataaatactttgcttatgttgctgttttttaattgatcaattttggacatttttgtattgcctcctggttgttgtagacaggatgcagctcttctagctcactgtcaccaccacttcccaatataactatattcgttaaatcaaataatgtgcacattattactatgtaaacattgttcacggttgagcttagtagtacactatgactgttttcttttttgacgctctctttgtgtgtcctagacttaattgcctttttaaatttgcatagttttctatgcatttaggaaaagataatgctttaaaaagttgtgccaaacaattttaaattttttcaaaatttcaacacagcaaaattccattctaattccattcttttcctgaagacatttctcccttctaacttggactggttgttcttagccctgctgtgtgtgtgtgtgtgtgtgtgtatgtgtgtgtgtgtgtgggtatgtgtgtgtgtgtgaagtcctaggatcagaactatatagcctgattctataactcttcttcatattcttcagttagatccctaattttcttggatctcatgttatctttccttttttcctgaagagcatatcctgtaatagttttctcagaaagattgtatgggaggtaaatttttatatctgttttacctttatacttacctgaaaggttgaattttagaattacaggttgagaatcattttatatttagaattttgaaggtgtttctagtgggaaacataaagatcctcctagttggaggaacaaataagctttcctggtacaaaagcacccagttgacaatgaaactgattgtggcaaggattctgtcaggtcctcctagaagctttcttagccattctcatgaggacctatgtgttttttggcctcacctcatattcaggaaactctggctctgtgctaagtaactgctaacatcccagcacgttgagtgcttactgcagcctagtgaagctaagctcaccttctcaggtgcaccatcccactggcaagcctagctgtcagaccttcctgatttctgttcttgcaggcttcctttgatggtaataagttcctcccccattggggttgtatggatagaactgaatggtaaaactgatttctggagattttttagaagtgcaacttgagactctaagagaatcctctgtcatgaagactccatgatcctgtgactgttgagctggtattcttgcacaggacgacctttcctgggatcttgggctgcgtcacttgcacccattctttaagggattgcctctaggaagcttttgtccttattctttctttcccactggccttgtgctttgcatttctttatttcttttttaaactcagagatgtgatggtgaggtttgatctttttactgtggaacccaacataggtggccgggattgaggaggtattgcgatgagaaatgactcaaatgtgacttgatggaagtacatttttcatcaaacaagagttctagttttaaataggggaggggactattacggctgggagggattttagcaaatccaagcactttgatttttcagttgaggaaaaaaggcaaaatacagtcttcactggtgcaatgacagtgtgctatggcatatattttagaaagaacattgcatcttgggacaagaaatctaattttgaagtcacacaaaggtcattaagagcttatgggagcttgggcaatattcctaacttccatgagtatgtccttttttcatcgataataagggtaccagtgcctccccctgcatcagggctattgaagagactagcatttgaagagactagcatggtacttctatttttcaaactttaaagagttatttcagaaggtaagatctagtgaacatggtcctttaaatccttctgaaaagggcttgtgtgcttttactagtgttacatgattactgtgttaataacttactgtataaatatcctaaagtatttttatcttgtatttttgtaaacaggttatggaatttgcagtgatgggtcctggtagtatctaaaaacatatttgtactgcatctgtgggcccttctgtatctaggctatattccaacgtatgattgtgtctgcaggagagtctcctctgttgctgtccagtgtaacaaacagctccttgtatattctaccacatctattcccatgcttcattgatttggaatttgacttgttgcctgttgaactggcaaatagttgagtgttcttttgtgtaaactttgacaatgctgattcacagtacctttagtgacttaatctatattaagataatctgtataaaatgtatctatatatgtagtctgttaagaaacctatataaagccaaattttgacctttctatggaacgtgtatttttttccaggataacttagaagatgatgatgtggaaatgaaaaatggtataacccagggagacaaactacgtgccttaaaaagtcagagacagccacgtacctcaccatcctgtgcatttaggtagatctgttttaaacacttcaatttatagtgtgcttccctttgtgaatagaacatttcatcttctctttaatctgtaatcttctgttttgaattttgttctacaaatactaagtttactattttgtgttgtttattgattattttatcactgttgggagtagctaaagtttagaagtttattgaaagcaactgctgccatctcagtctctggaattctaccttaagctgcaaagcagttatctctgggactctgtttcaaattctgtttggatttctccccttctgctgtgaatgagtttcttgtcctgtgttggatcctcacaggtgtgctgaggctgttgtattgactcatagtgtatataaaagtattgtatgccagtctctggcaatctaagctagttcctcagctttaccttctatttttgaaaattgaataagcaattcttacctgtgcctgtaaagttataagccatcttgactttgaagtctcaaactactcaccagaatcaatgatgggacttgacttctgatcacatttgaaacctgctgatagctcagattgggtttaaaaaaaggggaatcaaaaggtgcaaacgtttgtaaatatcatcattttttaaaattacaatatactgggtggcaaggccccagtccacaaattaatataatggtaagcagcaacatttttttgacttataaataagagatacacatagcagaaggatgttttgccggtatggtaaacaccaaacagattcacagggaatttagttttcatgtgtaatctgggagaaactataacactgtagtcagattgggtctttactgagttcctgatctaaggaataaaggttcatattgctcaaagatgaggttatcattttctgcagtattatgagaaaaggggatagcaagcctggttctgggtagtctaatatccatttgcaaggtttctcccttttgctaatttaatatttttactggtttgataccatttgatgtgccttgtggtctttgtgaaaacgtgtgccctggtgatatgtgagcatctgtctttgatttccgcaggtcagatgatacaaaaggacatccaagagcagtgtcccagcctttcaggtactgccaatgaggttgaatgtctagtagcttgtaaatatatgcttccttttagccatgtttcccaagcctcaaacacgaaaatcaactgtacacagctttttgctttttaaattgcttcctttctcttccatattgtttatgccttatttttaatgctcaccatgaaaaggatttttttttttttgctggcatgcccacaggactgtgtggtggtggtagagacatcaatgtattttgtgctcttagcacattgtggaggggggtctctaagaaactacaggtgctctgcatttctccttttgatctagtgatagatctagcttaaattgttttcatttttattggtcctctttctattttttcccaatcagcatgcatttgttcccctcctttattttctagtcttattttcttctctaccttccttttcaagaggaaacactagttttgttctgtggaaaaatgtcccctgaaacctccgggagtggtaccacgatctggtgtggcactcagtgagagcagcagagatgtttggccaagagtgttgatgaaataggggaaagaagctcttcacctgctggttcttattcattcttaggtttaggactgtttagtgagggcagttcaaagagggcttaagcttctggagcttctggagaagcttgaattgcttctttgtagaactttttccatttttattttggaggcaaaacatgagcttaagctgctgtttggtgggtggataatgaagaaaagagtctacaagtaaataagcttttctctagcagagaggaaaacagagttcagctatattaaatgatttatctaggatcaaacagatttggtattaagattatgactgggccctggctctccagatttgagtcagtttttcctttttgtccacttggcaaatatttattgagcacctgctcagaatccagcattgtgctagccactgggaattgaaatgagagagaagtctttgccctcaaggagcttacatcaggtaacggagatagacaaatatcagatgacgcaatatggtataagagctatgatttactatgagaatatatgatgaaacatatattgcttgggaactcagagaaggcttgcttgatgaggtaacagctgattggaccattaaaggctaagtgtgatagaagtgggtcaaatggacatggaagataagaggtagaggatgggaaggagatgagaaaatgccatggcagggaaatagtctgtgcaaactggacaaacgtgtggacgctacccattcagggaactcaaggcattcttatgtagctggaatagagatgtccaatgggaaagtgtggaaagaaggacctgtccagattttggaggggctgcatatgccaagccaaagagtttctataggcttgtgggcacagaggaaagatgaaatggtttaaacagtgaagtgacatgattcactgaaggctattcacaatttgaattgtttaggaataagattaaaagatgccacttgtagtcaaggataagaaataaagatggcctcgcctagggtagtttgcagggtgaaaagaagaggatggatttgacatataagaagtggaatctaaggttgtgctgaggaatgaataccagtggcaaagaagggcagtggcccaggaagacaggatcatggctaagagcaggactttgactcctgggtttgaatcccaggtctgctgttcactaactgagtgactggatgaggaacttttcctctgtgtttttgtttcctcacttgtaaagtaaggacagcaatattagctacttcgtagggttgttgtaaggacaagctgagctgacatctttaaggttcttagaacagtgcctggcagttagtgctgtgtcagtggtggctgccgctgctgtcatcactattaggacctgtcatgatatctttaagattgattaatttatcttgtcctagttagttgctgaatgtttaagataagactactttattgtgacactttgccatttttctccgcaaagattaagttcatccctgcaaggatctgcagttactttgaagacatcaaaaatggcactgtccccttcagcaacggccaagaggatcaacagaacttctttgtcttcgggtgccactgtaagaaggtaatttttctctccctcttctaaggtgctggtttgaggtaaaggaagcttgcagcaggcgatgagtttagctgcagttttgtcagaggaggggacaagggagaagaggagaaaccacggaagaccctgtgatgttctggggcttccgttcctgtcttgggaaggcaggagacaaggttgtggagggaatggtgcaaagcgtgctcttcttctagagagtgagcagctggcttagtgtgatccagaaaatggagttcagttgtatatacaaatgatattgtcatttctcagctgacacgtataggcaagggagaactaaccaaaatgggtagggatgtttgatgtagtcatgtgattgaatatgtacttaagtctgcttttaatgctccccttacatggcccttttcctttacttcccaccccagggtaaataaaactctgtgatgttctatttcaagatctgtagtcaaagtgttttagccagtttcttgggtcctagttaactgcttttgacaaagcaacttgatatgtataactcaaggctacatattatcataacaccaagggtgatgaggaagccatcctgacatcattcacattgatcagattcatcttcatcatgttcccctaatgtcatgagtatgtgttttagaaacgtgagctctgtgtgattgtacattgttgtctgttttttccctcctcacttgtgttttccattcagcttttccataaactcccggctagccagttctctagggaacttgaatgctgcaacagatgatccagagaacaaaaagacctcctcatcctctaaggcaggcttcacagccagcccgtttaccaacctcttgaatggcagctcccagccaactaccagaaattaccctgagctcaacaataatcagtacaacagaagcagcaacagcaacgggggcaacctgaacagccccccaggcccccacagcgccaagacagaggagcacaccaccatcctccgaccctcctacaccgggctttcttcttcttcagcgagattcctgagccgttctatccctgtaagtgcgcagacaccacctcctggtcctcagaaccctgaatgcaacttctgtgccttgccttcccagccgaggctgccaccaaagaaatttaatagtgccaaggaagccttctgagcgatgccttccctctgtgctgtgaaactgtctatgcactacattctgctagctcctcttcaagtaaacgccaagtcacaactgggttttcttccttccttctttttcttcttacccccaactcctttttaagtagtttctcttaaaagggaaatagctttcattcttttgattatgggcattgttgacttcagttacttttcagttatgtttccaatcactctgaatatctggtgctaagccaggagctgattcatacagtggatagcatttgctgggggtgcgctggtttggggaattatggctttttccgcatcatatatcagtgaattaattttggagtattgaaacgtggaaggtgctgagtgaacagtatcttcctagaactaagcattaggcccttgaatatttcacctcctgcaaggaactgacccagaataaaataagtggcaagtggaagatatttctaagaagggcttataggtaggtacctgggatgcaaggtggggagcaagcagagtatcaggaaggtgtttaaaagtagccagcactcttctagagaaaggtgggaagacctccaaacacatcttaccaatgagatctctatttaggttaccaagctctctttaacaatcaacaatacctggtaaggtaaactctgttggtaaactcctattatgaattactttaataacctgttttgattgcctctaggggtattgagatctataggaatgtgagtttcgacttgagaggaacaaggacaaataggaaggagaaatcaatcctatgtattaaggaaatatgaagcatggtacatatacatacagtgttgcaacactgatcgtactcagggcatgaacaagccctgggtgtcttggaaggctctggcctggtgtcgcttcacacttgctattcttgaaacatttcctcagccgtcatctagggagtgcctgcttctgtagagaagaggggaggaggaaaggtgctggtggcagtgtgctgcgtatggcccactcagcaaaacaggagccccatggttcattcttaatgatatctactttctttagttgacagtttagaaaccatgaggatgggccaggctcagtggctcatgcctataatcccaggactttgggaggccaaggctggtggatcacctgaggtcaggagttcgagaccagcctggccaacatggtgaaaccccgtctctacaaaaaatacaaaattagctgggcgtggtggcgcgcacctgtaatcccagctaccataaggcaggagaatcccttagaacctgggaggtggaagctgcagtgagccaagatcgtgccacggcactccagctgggtgacagagccactctcaaaaaaaaaaaaaaaaaaaaaaaaaaagaaaccatgaggatgaggatgttttctaacatgagaatgcagtgtgtgtgtgtgtgtgtgtgtgtgtgtgtgtgtgtgttcatgtgtggttgcattagattcattaccactcctgtccctacctgagacctcttttaaaacttttaccctctctgtccactctcaacccattccctaagaggagcctggcatatctgatgttccctgtcctattttacaggcatgagccaccatgcttggccttggcattagtttagattcttttacagattagggtcccaggaaattgccagcccatctaccccttaatctgattctgatcccatgatcccactataaaaattgggtgtataggtatcataaaaacttaaatccatgtaactaaggattagatgtaaaaagataatatatttacattttcctaactatatttataaatcatatactttccagcaggcattgagttcagtcatcattttcacataccgattgtggatcagcctcttcttttggatcagaatgcagatctttccattttcagaaaaagtgctagagatatatagataatcatacagtcatgtgctgcctaatgatgttttggtcaataacagaccatgtatacaatggtggtcccataagactataatggagctgaaaaattcctattgcctagtgacgtcgtagccctcgtagggttataactgcagtactcatgtgttgtggtgatgctggtgtaaacagacctactgtgctgcagccatataaaaatctagcaatacaattatgtacagtgcataatatttgataataaatacctgttactggcctatgtatatactatactgtactttatatcgttattttagagtatacaccttctccttattaaaacaaaagttaactgtaagcctcaggcaggtccttcaggaggtattccagaagaaggcattgttgttataagaaatgacagctccatgtgttactgctcctgaagaccttccagtgggacaagatgtggaggtggaagacagtgatattgattatcctgacctggtgtaggcccaggctaatgtgtgtgtttgtgtcttcattttaaacaaaaaatttagaaagtaaatactaaagatatttaaaataaaaaaaataggataaggatgtaaaggaagaaaatacttggtacagttacacatacaatgcttattttaagtgttaatttcaagtgattgggagttgataaagacattaaaaaatagtaaactaagtattattacaaaagagtcaaaagttaaaacaattaagtttataaaataaaaatgttacagtaagctaaggttaattgattattcatgaaagaaaaatttttaatatagatttagtataacctaagtgtacagcatttataaagtctacagtagtgttcagtaatgtcctaggccttcatgttcactcaccactcacccactgactcacccagagtaacttcccttcctgcaagctctatccatggtgagtgccctttacaggtgtacaatttttaagtcttttataccatatttttattgtctattttctatgtttaggtatgtttagacacacatacttaccactgtgttatagttgcctgcaatattcagtagagtaacatgctgtacaggtttgcagcctagaagcaataggttataccatttagctcaggtgtgtagcaggctctaccatctaggtttgtataagtgcactctatcgtgcacacagcaatgaaattgcctaaggatgcattctcagaatgtatctttgtcattaagtgatgcatgactatgtaaataccttgcagattacatacgtaaaggtattgtgtaatccacatttatagctgaatgccagtagcattggtagcttgacaagaataatgttctacttttttgttttcctctttgctggtagaaccatgggggcaattctttagacaattgttaatctcccctaatgatgtttacataacttgatttgggtctcgttccgtattttgttatttcttttcacttctcctcctcctcgtccctcttctggctagaatagagtgatttttaaataattcaatttaagtaatagtctgtgtgggcagttgctgccacttcccttctcctccctcctaaatttatcatcttattgtaaagaaaagcatttataaatagaattatcaacacaacattttcctccctctcaccctccctggaagtaagaagcagcaggtctttgtagcagaccttcccccctttaactttgcttagaaaacctcctgtgagagggaaagctccaagtcctacttctgctgacttgtggtcaaaaagctaaattatgatgaaaattcccactttgtgtggaataagataggagattatgagttatttttgtttatggtccagtgcagcttgtctaattatactgggtttattgtcgaaataagatcatacttctagttctagtactactgaagatgtgagattaggagccttgaagaactaggaaaatcactcaataaaaatgttttaaaattcttaggtaggaaaatgaagtctgcatggcaatatcctcccagaacctttaagaaagacccagaaactcttaggggatgggggttatgggtatttagagggaatctaatattttaaaagctacaattagcatctcttttgaaagctgcaattgctcactcactttttgcagcagttcagcccccagaaaaatgtaaaaatgatttccttattctgtcattaaatcgtttaacacagaaaacaagaacaaatgttaaggattccttatggttgtgacagaatgctgaggaacagtcagattttatttttattaatttgtcctcttttgctagtcttgcagtttctactgccctgtgcaatgcacacacacaaggttacatttttgttgacccacttactgtaaaaaatgagtttcactccctgacactcagaggagttttcaaatgcttaagaaatgagggacatgtgattatggtgtaggtggggtggaagtattttattaaattgaaattacttgtggtatctgtcttgaatatttgctatgctttatttttatgacacttaatcactggattactagtcatctacattgaccttacctgacccccaactctgagttagttcatgttgcttctcccataagcctctctacatcccaccttggtctaaatcagaatactctttttcactcagaatttgcataatccactagactatatgctttgtgagggcagggatggtgcctctggtttttatagttatgtgccctgtgcatggcatatattaggcactcattaagtatttgttgattggataaaatgatggatggttaaatgaatgaatgctctgtagctttaataataaaactatacaaataagtgaaacttattatagcctgtaataagctttgttatgcactcttctatcttaatcttcaaacatttgcagggatattctcatagtgaaggttgtaggtaatgtcagtggtgccattgtctcttggaatttttcctttcttctccattcagttgcttcctcatccctgttgtgtttgagtctttgatgatcttcctaacttgtctctttccacctttaattcttactttaaagtagggttggcaaactttttctgtaaagggccagatagtaaagatttttagctttgtgtcccaactattcaactcaatacataaacgaaaagtgtggctaatattaaataaaactttattaacaaaaataggtggtgggttgcatttggatagtgagctgcagtttgccaacccctgctttaaagcattgccagataagagatatagatttcaacatcttatttccctgttcagaaatgaccagtggtcccttagtgctagaacataaatactgactttctttgttgagctttcaggccctctgtactgcatttctgtagtattgtatctttgcaccagcatttaccttgcttattctcttgttttcttctcccacagtgttcatgcctactgctagtctttaggaagccctttcttggaagccccctgctctccttaccaatttctcatctttaaataaagacatatattacctcccatgtcttctgtgaagctctccccagtaagtggaatccaccctataattaatactttattttatcatgtatgctattatatacatgaacatctatatttgtttacatattgtctgtgtatgtaagaattgtctccaaatttaaacttcttttgcagacatttcaaaaagttcttttatagttcatggtttctaacacagtaccggtcacaggagggaattaaaaattaaaatactcatttggttgaaagttgaaagcaaaatggaaatgaaatattgtgtgcttcctactttccctcagcattcttatatgatagttgaagttggcttaaatgtagttctcttttctagtgttagtagcatttttatactcagttggttaatgctgctctttggttatgaagactctgtggatgttttccacctcaaatttgacaaacgtaagaacaatcttggtagcctatgaataggttaagttcttctgtgttctaacatcaggcagaatacgtatgtgttttaaggaattattggtccttaaagtaggacctggaatgagatcaaaatattagaatctagctttataaaataaccagtttgatgaaaatctgagtgattggcagtgcactaaagcatggttcatttgtactttgggataatgttagtgctgacagtgataagctacttactgattgtttgaatatccattcccagtaaagtgctgatactttccagtggtatgtagtagtgtttcccgatatcaacttgttgtcttttccctctgcctgttctccattttaaaaattggtcatcttgtcctgattttaaataggacatttttattcgtctgcttttgtcgctattaagaaatacctgaggctgggtaattcataaagaaaaatggtttatttggctcacaattctgtgggctgtacgagcatggcaccgacaacctgcttggctttgcgtgagtcctcaggaagcttacaatcatggtggaaggcaaaaggggatcttgtgtatcacatggcaagagggaacaagagaaagggaggatgtgcgaggctcttttaaaccaccagatctcatgtgaactcatagagtgggaactcactgattactgggaggacagcacaaagccattcatgaaggatccaccgccatgacccaagtacctcccactagccccacctccaacactggagtcacatttcaacaggacatttggaggggataaaacatccaaactatatcaatattcatttattaattcatattaatattgttaaatattaactaggtgttaatatttattacagttaaaggtactagctttctatcctcttgttgtatatttatgttgctgtggtttttcatccttcctctttgttgtggcattgctttagatttgatgtaagttttcagctaagggatactaactacatatcaagaacatgagctcaatctcagtattgaaccacatctttggccttcattcaacattgcgattttttttcccttcccaaggggacctgagaatgctacttgacaaagcatcaaattgttatgaggtcagcatggttcggatgatgcctttaaatatgcatataaactgtttatatgtttgcagtatttgtagatatatgtaactataatttaagtttccagtgttaaatagtagtttatgttaattttctgtataaagcctgtcagctgtttttgactgtacatttgaaaagacttgaaaacataaaacttgctttaagtgataaggttgatcagaaatatataataggtaaggattaatttatattttcaatgtattagagttatgaatcaccctggttgttcagcttaattttatactttcttatgtagtgtcaataatactactaggtcaatagaaaagagtcttattttaatcttgcgtcttatttttttggctaggagtaaaagaaagcaagtgctttttatatacctataaaagctggctaggtgcaatggctcacactataatcctagcactttaggaggctaaggcgagaggatcacttgaggtcaggagtttgagaccagcctaggcaatacagagagaacccgtatcttaaaaactgaaattaaatgaaatggaaacttatccaattaataaagctatagctaatatttatgtaagtgtctagcttgagcctagtatttttttggtagagcaaggtgagacaaatacatacaagccattgtcctccactagattaaaaacttcatgcaggcatcttctggtagaattgatttgctctcatttttctggtcctttctatttttgcactgctgccagaatccacttaaaataccagtttcctaatgtaagcctttgtttaacagcttctgtggttgaagaataagaccaaatattataagatttttcctctttttcctgaaattctgtagtttcaccataatatagctatatacagattcattattatttatcttgcctggcatcagtgtgtactttcaatcttagggctgcttttttagttatggaaaattctcagccatcattcttctttttttttttgtagagagagtgtcttgctatgttgcccaggttggtctcgaattcctggcctcaagtgatcctcctgctttggcctcccaaattgctgggattacaggcttgagccaccacacccggctccactatctttttggatattgctttactgcctttccccttatttcccttattttctccttttgcaatagccccacaatttttttttttaatagaaggagtctcactctgttacccaggctagagtgcaatctcagctcactgcaacctccacctcccaggttctccacctcccaggttcaagtgaatctcctgcctcagctttctgagtagctgggactacaggtgtgcaccatcacgcctggctaatttttgtatttttagtagagatggggttttgccatgttggccaggatggtctcaaactccttacctcaggtgatctgcctgccttggcctcccaaagtgctgggattacaggcataagccactgcatccagccaatagcccccaaacttatattggagactttcaatctgtcctcaatatatcttaccttctgttttatatttttcagttcctaagctctagctgtattctgattgaattcctcctattattttcaattcgtgaattttctttaatgtgtccattctggagtatatcccccaatccactgacctttgatttcaggggctatatctttcttttccagcatttctaatttgatccttatgatagccatctgttataatttgggcccgcctgtttttgttttatggcttcttattctttttatatgtgtgtgtatatatatagatatatatatatatttttttcacttgaaggatctcaggtgataagccattttgatattgctttgctatttgcatttcatcctgtgagagtttgccttgtggttgcatacttcgtcagttctcataatgttcatttgccttgtgtgttagggaatttggttggtaggttcagatgggatgggagtgttggtgtgtttctctcctctttctctctctgtttttccctcctcgtctgctggccttcttgttggctctgcccgatcatctaggcctttcagtctagaaacagaccttaatgacccaggcttccatctcttggtgagctcctcccaggctttcttctcaggcagggatgtggctccatctcagccctggcccgagggcaatggtcccaatttctctcagcctccttccccatgtgggagagcctgactccacccctgatttcaggccaggggctttcgacctatgtacccacatgaatggaacacccagccacttctgcaggcttccagctgtgtagccagagtcccaccactgtcttgattgtttctgggtcacaaagatgttgatcttgcttttaatttctgctgtgccctttctttcttcttcatctttaaaaaatatttaatgcatgcatccagagggtagtttggagtgtaccatctcgacatgaagtaggtccagtctctgcagcttgctgttcagtgcctttttcagctttccccaaccagctttccaaactcatatccctccactcctgagcatgaaccttctgcttctgccaggcagtttcttatgtccttgaacgtgcatggctcctcctacctctgtgcttttcttacatgctatgtccccaacttggtctcccttcctccctccctttgcttctcacctcctttccatcaggagttgggctaagtctaacctcctcctctgtgaagccttccttaatctcaccagaccatagcaatcatgatgttttttgaagtcattctgtttgtattggttattggccttcctcatccctcttttgtgttgagagtcacctatcttgtggatgtgggccttgaatccccactgaattccttgattgaggttagaaaatgtcttttatttttgttatctccaaagcatctggcattgagctatgcttacctgtttgattgtgggtatactcagtccatacttgcatcttttctaatactgtgtaggtcatttgtttcttccaaaaatttgaattttactgtgtgtgcacatgtgtgtcagatctttaacttagaaaggcatatttttattgcaccttcctcttacacacacatacacatacatgtggatgtgcatgcatgtgcaaacaagcacagacaccacgtgcacattgcttgtaaaatcattggatttgcccgtaacagaaacctttggtaaatgacgcaggctctccttgatagtgaatgtctaaacaactcaaaggttgatatatgtgggagagaactgtttttatcagtttagaagtagatatttttctctcttgggcagactgttgtgagtccttcagccttctgttatgaaaaagcagtagactgtaagagaaaatcatgaagtctcaatttgaaagtgagcaaaataaggttgacccattctatctcattttcccttatttactctttaagtacacattacttactctctggtagctcctgaatctttatggttaagaggggaaaggctgtgttcccatttcctattaggaacctcgtttccatgctctcctgtcttttgaaaacatcatccaaggatactcatatcgttttgtcctcatcactgttatcacctcccttcatccctggaagacttttgcttctactttttagctgcctgggcactgccaacattctggacaactgtaacatttttctaatcattatcatcatccactgtttcttgaataccttctatgtgcctggcatggtattaggtactttatatccattatcttatttatttaacctgctatttacagatggggaaatcaagactcagaatggcaataacttgcccaaggtgtcacagtgatcttattttaaactttcttaacctcagttatctttatttttgttcacttgaaaattcattgaataaaccttcttattgcttagcacattgcttctgacatcttgaatcctgccagcctcctttaaacatttccccctcctcctaactctgctccatgacctctttctgaccctgcctgtttccccagccatctcagttcacctctttccttctacagcctgcatagtcatttttgcttcctttttccaacattctcactgctacttggacattctgtaaccacttgattaccagcctccaaaattagatcaattcaaccatctgttgtatctgttcctcatctctctcctgtgagcactgttggagaaaatcctataactttgccaattggctccatctcaaatgtgtttctaatttacccggcccttcagtgctcctaattagttgttttatccctttttggctccttttctcttccccacctggctgttccaaaactttttaacatttttcaccaacacaaccccttcctgatctccagagccagctgaccctgctttgagatctgctaagaacatagaatttatcagaagtaatttcttctaacttccctcttctctgtctcaaagtttatctgcatctggactcatccatttcttccttcccttttaattccaaagaaactctactgttttccaatgataactctacctacctgtactgttctttccagaatctttcatgaagttgccctaaccacttccttctccttttgtatcttcagcctcttaccctccgtttgcaggtctcctcaactgcaaatgtgcacatccaagttggtaggctggtgggggctggggaggagtcttcccttggccctgtcttcctctcacagtttctcctttatggccacacttggggaaagagaagcctgcacttccccctcccttgtctctttgatactcctccgctctacagctgggaggtggcccctcattctggtgaaagtctctcccgcagattactgccgacttcttcaaggccagatctgatgggctcctgttagtccttctactcctaagcctgccccttaatgattgtccttacattggctctttctctttgggtaacctcctgagcattggacctacactcccagcttcctctgggtgttacctgggatagagagaatacaggttccttccattgccagctcctctttggtttcctagccgaataatctcatctttattcatccagtcatccaagctagacatttggagtcagctttgacactacttctgcctgcctttcccttgtcacaccagtcactaagtcctatcaagtctccctctaaaatgcctctgtccttccattcttaccactgctgccttaattggggtcttcatgaactatcgcatagccctttctgtcttcctgtctcttacctttaatctttcctctatactgttgccagtgttaaatttctgagacacagagctaatcaaatccttctcatgtttggctttgttcagtggctgcactctgcctactgggtcaagtctggctcccctggcttggcattcagggttcttccctgtcgggctgtgtgcctccctgccagcctcctctccagcagctctacctggcacgacctgccttaagcctgaaccctagcacttgcagtccactctgctttcccttgtttctctgcttgattttgtatttcttgacctggctcgatagttatctttttgataagcatttgtgacccatctaaacagaatggctcttcctttctcgactctcctaggagcgctgacactctcatattatagtcagttatacatgattctctctctcctctgctttcctttaagcttctcagaaacatctcttgtttcctgaggttccacagtacagtataagtgcctaataaatacttattgaactaaaagtcagataatgtatctgggttcgtgaatgttaaagtgtttaggagcctgggtctcattgttagcatatgaagcactaacagaaaacaaacaagtttccagctttagctttaatatacggtaatctgggagttgtgtattttttttctagaaatgtggctttactaaaataagagaaaataaattttaactgagtttgcatcaatataattttggtgttcagatgaactgaaaacactcatgtaatggttggctgagtcaagctgggtgtcaacaatctgtcatctaacaattgagctctttgtgattgttgaaaagcatatattaaatttctccagaaaaaagaatctattaaaaatcatgtaggaaggtgaaagactattttatatagcattataatgagcccaaattggctttttaagtcttgaagtccctgaaatgcacagagaacactatggaaaaatgcacacacacctttcgaacctgattttaacacaaaccttcatccttttatcttaatatgatgccaataaaaccatacccagctacatttcatctagtgttattggaggaaatatgtatcatattaacagaggcaaattctttcagtattgtacatgttgggtacaatatacactacttgggtgacaggtgcactaaagtcacagacttcaccactatacaattcatccatgtagccaaaaaccacttgtacctcaaaacctattgaaataaaaaataaaaaatactttcagtattgtgaaaccacagttatggaaataagtatcaatgcacacattttatgtgttaatttgtgagcaatacaaaaactggaaactctattacaaaggcttaaagagacataggagtacagaggcagttatgggtgtatttatttttccccagtgttgtatttgttcattaaaacttaaaacactatagttatgtatataaaataccatgttgccaagcatgtattttttcctttaatttcaatcacattaaaacaaaccatttttattttaggttctttttgcctctgtggttagaacttaaaccagggataactagtacactattgtttattccttaaaggactggggaaaatgtaggaaagaaaatgtcagtgtggcaaaaaagtccatgaacattttgaatcaggattttgaccttagtaggatgctaacattccaggccattggatcctttggttcaagttatttgaacattaagacatcgttacattcatttgctgtcaaggaccttaatctttcattattctttataatttgctgtttttgatagctaacatgttttatttattaaccatctgtacaatatttatatctgtaattattagacatgttcctgccatgattaggtaactgggctgtttaaaaaagaaacacctccagaatagctaaaattttaaagttactacctacatctgccaaaacagattagtagcagatttccagaacagaacaaattgtcttgatctccttacctaacactttgttttatgtcaaatcttactgctttcagggaacaagacttcttgatggaagcttatattttgacataaaaattttgggggctgcaaatgtaaggcaattttatccttatttttcaggttgaatattgctacattattaattttatggtattcatacaataagaataccacatattcataataaacttgatctggtcctaactcactataactctgttgagcttactaattaaatgagcttgaatattatatttgagaaattaaaatctcttgttatataaacaagggctaacttctaaaataatatttgtacttcaggtataaaaattattttcactttataaccatcttcactgtcattgttataatttattttgtatttcagattcattaattcattattgtaacaactaaaaacattggccaatcagaattaaaactttaatcaactcataatacttaagcatggatgttcttataatgaaaatttcttttaaatttagaatattcctgaaaattctttgaattcaggcctgatgaaaatcattcaaaaatatatttatcttttaatgcaacaaatattttttaataattttttttattcactcagaatcatatcttgcctaaggtcattatttgtctatgttagggtgatagagaatgttggattgaatatgtagtgatcacaaggcaaatgctcgctgtcttgagacattaaactatggtagctaagggtttgagctttagagtcagactgctagggttcaaattccagctccaccaattcttaattacatgaattggggctaattactgctttgtgcctcagtttcctcatctgtaaagtgggttgtctgaaacatttaatgcgtgaatatgtataagatgtttagaactgtccttagcatataggaagtactcaaatatctagttcagaataattgatgtgtcaagtaatatatctaatttgttaagaagttcagctagttgtatttaatctatttttgaatacgaaaatcaatagcaataatattgttcatggaattcaaaatgcaaatgcaattttactataaaatgtaattttactataaaaattaaaaatgccagtaactggctatagtcttttctgggatattagtaattttacaatacatggacatttggaaaacattgtatatagttggtagtcctacctgtgactacaaaaaaagcatgaagttatgctttgttacgatgtgtattaggtcccaccaggcactcatctggcttatctatctaacctgtctaagatttgaaatggagagtacttgtgtttttccttgaggtttcctcaactgtggctgagtacaaatgacccagagagaccgtcagcacaaccccgtaggataaccatgtgatacctgaagtttaaatattcctgtcatccaacactgttgctccctgaatagaaaggtctcacagtgttagttatgcttttgttaagtgaatagatcttggagacttgaacaattctcttctccccttagtgcatttctttctttctttttttttttttttgagacggagttttgctgtgtcacccaggctggagtgcaatggagtgatctgagctcgctgcagtttccgcctcccgggttcaagtgattctcctgcctcaacctcccgagtagctgggattacaggaatgtgccaccatgccctgctaatcttttgtagttttagtggtgatggagtttcgccatgttggccaggctggccttgaactcctaacctcagatgatccacccgcctcggcctcccaaagtgctgggattacaggtgtgagccactgtggcccccttagtgcatttgtattaagatttttattttagattgaaaatgaaaggaagttaatttgttacaaaatactgatgtcagaataatttgctgaaccctttttactgatctttcatttcacttttcctttataccatataaagaaaccatggaacatgttttgttttgaggactttggtattgtatttttatcctctagtgcttaatagatacaacttatgttcagtaattatttgttgaatgaattgaactggtgggacagaaggtcaattcgttggccaaatggtgtcatcatttgtttgcagaggcctgcagggccagttaggcaacataagagagcaaactagggggttggaaaaggaaatagtggggcttgtggtgagctgtatctgagcctagattaaacaccagccagagtttttgagctctgtggaagtaaaggctttggatagaagactaatgaatatattctccatatgaataatagaaatctttaaaatgttctagactatttctgttttccagttcactgggtactgtgattcactaaataaatacgtaaataaatgaatatatatatgtgtgtgtttatatatataaatatatgcacacacacatatttgcccctctatattgatgtacatatgaaatactttaccctataaaaaagttggtttaacaaaggtcgcttgtctaatgtttatttgctacatctctgtttattgataattgatggagcttgcaaaaacaactttgttctaagttatatgcagtttgaagaatttctgatttctgttagtgataacatgcacaactttactaatcggaacaaaagtaaaagttaaatattctcaagaaagcactagctgagctacacacacacacatacacgcacaacatacctttgtggcattcttatagctgggggacttaactggctctgccctctgactgcttgccagacttagaagaaaccgagaaaaagcaggtagaaaaatgtttatgctctaattgcgagtgtggtagctggcgtccctcaagtggaatgtatatgggcttcaaggcttttgaccaacttcactggactttcttagggtcttacctcttttattcgcactgtgggttcaggtatatttatagtatagtgctctgattcttgatcatctcacacctattttgaagtattagcatgaaccacatacaagaaagtcaatagccaaaccttttccattcttcctacagctcttgaaactggcagccttgagaaccacccatttcccttactacctctcacctaagcctttcctggtgcacgatgttaactttacactatgtatattactatttaatgtcgacaccgctgtcttttcatttcacatctgttatgacattgtggctttcgccctttgcggtcagggaccataactctttgacatactgtgttaacagggacttactcaggaacagccatttggctgttcatggggtgtaaaattcactgcagttttgaagctgagaaaagatagcttgaatccttttgtaagttctttggaaaatggacagattcttttttactgataacctatatcatcaccaaaatggacctgtcttataattgactagacctgttaatgaaatgttacagactaatttgagaaataattattgggtgggagaaaagggcatttactagaaaatcaagtaaactttgttatcctcaggtatttaattggaagaattgagcaaaaaatttgttaatgtttagattgatttatgttcctttttctaatcactgtttcctgctaaaaaaaataactgtttggcaaactttctgtaactctctatcttttcctggtttatgtctgttgtcccaggcattctgattacatatcccaatcacaatccttttatatgttagtatctaatgtgatgtggaagaatttgtatggtttacttgaaaattgcctattgtttattaaattccgacagcaagactcttctgcataaatgtttttgggtcttaagatcagatttcaagctggtagtacttcatttccccttaagggaaaggatgtgtaagatatttataaattcaagcatgcttaaggaatttatttaaatggctgctaattctactgcattagaagcatgccattgatatgtactgaattaaatttaaggatatatcatctcaaagtatattctagtaatctttaattagttaaaagtatcttttaatattgttaagtaaaactcattaattgtagaaatgcttagagatgagtttaggctacctaccgatttttaaattaaaacttaattttttaatcactataaataaattagtaaaccttttaaaatataaagttttcttacaatcactttgcgtaattgaatatctcattcttacctagctaatgctttgtgtctcctgtctttttgtttctgttttggcttagtttatttcattgatctctaagctgtcttgtgtggaagggagaagctgcatgacttgctagaagttttacatgtgatggaatttaacctcagtttatgtctctccctgcacagtcccttcagtctgaatatgttcattactaaggccttgccactccagtgaaagctgttcttctcttagacacaatttcttcatctggacgagcagtggagagggaaagcaacttcttgctggaagaatatctctgccttcttaccttaaattaaaaagagcactaagataacaccttcaagagacttgaaaacagaaaactggttaatgactactataaatgcactgaaactatgtttatggagatttccatacttttaaagacagttttaatgttgaatttggtattttgaagggttatttttaatgtattttggtaatacatttattattatatttacatgtacagtgttacattatatatgtattgtgaactttaaaagactattttgataaatttataaatatataaaattatgtaaaaactacactatattttgatttagattttcctgctgtttgctaccaaaaatttgtattttaaatctgtttagttttagtatggttttgtctctaatgaataaataattccttcttattaagaagaagtaagggagaaagtttttagaaagtgatttttatgctcgcactataaatatggcaggtcagttcattcttttgggaagtcagtttagttacactgagtttatccaagtttatctctaccaagagtataatggcatgggatggcttatttaggacaattccctttcccattgtttttgttgctgagccaatttgagttagttttgcatcctggggggctttaaaatacagcatgcagtgaaagatcagaattcactgaatatttcttctgagagcatggtttcatggtttttctctatgaaatgactcaatattccaaatgtttttttttccttcctcctttcaaaagagttcttaacccaattaggatatcctgctttgggtatgaggttgttgttgcctgtaatcacacatggtttgacatcagttttaaatcaatggagagaaaaaactgaaaaagatgctgctaagtagttctctgtattaaaggagatatttttaaaacagggtacaaccccctgctgcacacgctagcatatctggaacctactatgaaaatgaaaggacccttataggtactcacagccctttcatgtaagtatgatctgatatttaggtcttcagaagcctgtaggtttcatttctatgaggaatcgaggagcgttacatcctgatatccttccaggctgcttaagaatggactgcttcgacactgaaagtgctagttaaatggattcatatgaagtgctttactcccaaccattgagttatttataatgtatttattaggggagggtaccttgagtctattatatatgcttcatcaaaacatcttgttcatgttttatgtttttaaaaaaggcatttgaatgaatgtttgactcaggtttgttaaattaaccttcagtaactgcagtaccaaaaattacactcaactgatgaaaaaaacgaattgtatgatttaggaatcaaaaactaaaataagtggaattatgtatcttttctaaagttaaaaaagtaaaatattttattatgagttattataaaaattggttaattgtataggaagatgacagtatttttttcaagttatcataaaaagtaattcagatgacatttgagaagtaggggaaagggaatcatgttgacagttttagttctgtgaacactaatttgtgtgaagctattaaaatgattgtaaagttgactactgtaaatttcccataattatgtgtgtatatgtgtcatatgtatgtacatgtatatgtctaaaaattactttacacatgtgcctacatagacacaccaagaagtggatgtatataatatagaaagtatatagcaaagtaattttactctgataataaaaattgtttgacatgtattttgttatgaatagtttatcttccaaaagatattttgctctattttaaagtgtagaagaatacactgctaataaataataaaagttttattcaatttacttattttttggtgtttataatttgaatttttgagttatcaatgtactgaagtctctttataattttatttttggttcagtgtggtcagtgccttgagtgtttcaagatctctattctggattttagtttagcttttattgactttctaggttgtggccattgcctgaaatacatgacagtgagctcacagaaaccttatactttgaatttcacaaaaatcatataatgttaggttcttgcttgctttccctttattttttttactgtcaataaaatactgatcctgatcagtgttttgggtcctgcttagtcatttatgactactgatgactattgtgtgattgatcaccagttccttttgaaaaagaatgccatttttcctaaatgagaaattatagaaatcagttagaagaaacctcacacctgttggatctatgccctgaaaagtcagtttgggaggaagaagctacactatttattggagatattttatatagtaaactggatctctttgggttatgatgattctgaggtttttttttccttaaattttttttttttttttttttagaatgcaaaggaaagtttgtgggtgagaaggtagttttacatttggaattgggatctgcaaatagctgtcctaacaacactgcatgaaacaattggggtaccaaggttttcataggaccacatcttaaagaaggagatttcttatgaattaatgaacctgtttcacagggcagaaggaaatctttttttgtacagattgggtttttatgaaaaagaaagtaaaaaaaacaaatcaattagctggtttcagcagatttctcacctattgagtttacctgtttcttttttatccttagatgtaaaatgatttataaatctcaaaacacacctgggaaaactatctatgtgattcaaatatagcaggaacatgaatttaccaactatacacaaatgtattttgaaaattgtttttacttctatgctttcttcagtgacatgttaaaccattaatatgttgagtctaattaaaccagttgttagtatataagctgaacaggactccgtgggcttcatgtcatataagaagtctgtactcgttccaaaagtcataaggcagagtcccctttgcaacacttagcaaagcaagaatttggtcactgtatgtctcctcagaagattaattagggacaattccaattacagaagtatataatttacagcagaaaactcctttatttacacataggttgcatagggttgacaactatggcatataatggaaagtagaaaataattgtattaagttattttgagctgaattgaaatgttaatatattcccacccagttccctctctatggattgaattatgataatcatatcaagaaggagaaaaatagcttttctcaagaattttaaacttttctttgctaagtacaagtagaaacttacattaaaagactagttttaatgcgaaatgtatttggaacaggttttaagtggacaaacataaattagctgaacttctcactctgcatgcctcgttttaacctgcacgccaccaaaatcaaagtaaatcacatcaccacttgcggtgtctgctttggtttgaatcaagttgaccatgcatttttgagaagttgtactccaagtgaagaatggggcatggtaataactgtagaaatgactctacctgcaaatatttacattaaaacttaagatttgggggtagtaatctatcaaatatgtagtcatccctccatatccatgggggattagttccaggacctctgcggataccaaaatcagaggatgttcatgtcccttatacataacggtgtggtgtttgcataaaacctatgcacatcctcctgtatactttaaatcatctctagattacttataatatctaatacaatgtaataccatgtaaatcgttattatattgtttaaggaataatgacaaaaaacgtctgtacatgttcagtacagtagagatgcaattttttttccctgaatattttttatccctggttggttgaatctatggatgtggaacctatggatatggatggccaactgtattttctttatttatattatggctgtcttccaaaaggatctgaagtggcttcatagaaccaagcagatgtaccatagggagagtaaataggggctttggacatcgaatttcaagacaactgacactgagacttgaagctgagataaagaggcctctcagacatcacaggagatctgtcctttctttccagactgggcatatttatgccaaacacacagttttagtcaattccaggactcttcattggcactcactttactcagttttgaagaaaagattatctccaagtgagattgccagtcttgatattcagatccccaaaaataattatgtcgagtacgtggaaggacaaaattggaaccagagatcagattactataagaatccatctatctatctacctactactctcctaccaacctaccatataactgggctttactagagctaatgtaagtataacatatgcctttttgtattgggaagttaaataaaacttggaagacacaggggtcccacagacttgagaagaaaggagctgatctttgtaaaaaacaaaaccaaaaatgaataaaacaatggaggagagggagccattttttaaaatctaggttccttacaggcaaagagatattttgttttaaatggaaaaacataaattggataccatacttcaagaagcatgttccaggcagttttatcaactctggaaagaggtaaccagttaacttttcaagcagcttggggttgtaaagtaatgttgcatctgctgagtgtgaccagcaggattggaaagggaggcctagctttttctgatttgaggttttgtgtaatactcacttcctctttctcccttctccacttttcataccaatgagtttcacaagcatagccgccaatcctagacttttcctgctgcttgaggcccagctggtagcttactttaccattttggtgccttcaatgaccaacaactaaatggccgggcaccacgtcagatggcaacactgcacgaactatacagctaacatctgttagcagagacactggtggcaaaatccctggtctcagtctcgtatcacatccccatagagcaccagccccggagttctctttctctcatattgctctggagggtgaatcagagatgctggccctgagatggctgccctgtcatgacaagaagtgggactgctgagtgcaaccttgaaaatctactaagctgacaaactgtgactttagtttgatctattttaaagtcaaatctgttggggcaaattatccttaattaaggatttctgtttaagtgacaagtagttaggattgttaatttttaaggtaaaccaaaagaggaaaagttcactcatctggtctggaggagagatgaaagtcagttactaagtcaggatctaattatttatctaatcaggaaagccctgtgtattgggggcccccaagagcattcccagttttgataatttgctaagaagggctcacaggacccaacgtatagttatacccaagatttatttaaatggaaagatttattacagtcaaaaaatacaaagcaaaatcagcaaagggaaaaggcacatggggtgaaatctggaggaagccaagcaccagcttccacgagtcctctcccagtggagtcgcacaggacacacttaattcccccattagggaggtgtgacaaatgtgaaacattttctaccaaagaagttcgttacagactcagcatcctaggtttctactgggggctggtcacatgggcagccttggaagagcacgatcaaaattccaggcgcccagaaggaaagcaggtattccacataaaccatattgtttacacagtctaggtgcaatgaaccacacttatcattcagaagaagttttatatcagtgtaagggaaccgtttaccagtcaagttctcaggcacaagtcaaagacaaccttgcaagcaagccattcacaagacagtctcaggcctgatttttagatacttttctgtataccctagatcacagccaactaattttgtagtaactaaagcccatgtaaattaatgtgcagttttccctcaggctgttgacgcaaaacctgtgtttttagaaaacttgtttgtggagggaagagttgtgatctaggagacgggaactctgttttgggactccagtgttccagatgggccagagttctggcttctgttttgttttcaaatggataaatttggaagtggtgcagcttccccttataaaacactctactggccacagtaaacctgctaccacccgatgtctacaatattccaacctctttcaggccaaacgagtagcagaaatgcaccaactcatatttgctttaagagataaactagtctcaaaattttgctctcagtatctatgccacctccctgttatttataagtaaaagaaataaaaatgtaagttaatgcagtttttaaaatactgcaatttaaagaaaattaaagatagtaaaaattaaagctaaaaaaagattgcaaaaaagcaggcaacagaggcttttaaaatgatgcacttaaaacgataaaaatataaattaaaatgatacaacatttctagaaatggatacatcttagggctatgagaagatagcatatagattacttacagatttgtagcacttagtaccttgtttggcctacagtaattgaataattaaagttaccccaaggcttaacagcttttgcaagtctacagatgccaagccgtcaatctaagtgggatcattttgagctgacaaaatgtcttgctcataggtcatgtccttagactcttctgcctggggattttgattcacaagaggagtccagggtatctcactcttgggattaggctaagtggaaggtctgtgggcatctgtaactttctctgcacaagtatccctcttgcttaggaatgttttaaacttttaattattttttatgttttattttttaaaaaccaagttctaaaaaatttgttcttaccttttaagtcaccttcttacatatttgcacatgccacataaagtcaatcctttcagtagtcagcttgctttccaccttcttcaggaagcctttctcactctgggtttggcaaagtataatttttttttctctcactaagctgtgacatccttaattagggttgtatgccttttattgctgtaacccacgtaactgaaacataataagcataggttaggcctttttaaaaattccactttgtatttcttttcacattttatctgagttcttcagaaatggttacatagattcattttctttttttttttgagacggagtctcgctctgtcgcccaggctggagtgtagtggcgccatctcggctcactgtaagctccgcctcccgggttcacgccattctcctgcctcagcctcccgagtagctgggactacaggcgcccgccactacgcccggctaattttttgtatttttagtagagacggggtttcaccgtgttagccaggatggtctcgatctcctgacctcgtgatccgcccgcctcggcctcccaaagtgctgggattacaggcgtgagccaccgcgcccggcagattcattttcttgagtggagctctggccattacatctagagttctggtttgggaaagcttcctacggggagcagaacttcgaacaagctgtattgggaaagattcggggaggtttaacgggctactgcctctggtgggggacattgctggttcagaaaaaattgacacagtgggaagggaataaaatataagaactcatatttacccacacagattggaaagttgactgtggattgatattcagtccctcattcagcaacgtttattgaaagaccactgtggagcaacagacacaaagttaaaaccgttatgctgaagttcacagttttctgaggaacacagacgggaaaacaaaggaggaaatagagagctgttcacctgttataaagttacagttatctataagacagatacattctggatatctgctgtacaacctagcgcctgtagttaacaatacagtgctgtgagcttaaaaatttgttaagaaggtagctttcacatgaagtactcttaccaaaataaaagcgtgtttcctccacaaggaaacatttggagataatggatatgttgatcaccttgattgtggtgatagtatcacaggtataagcatctgtccaaactaattgaatcttatacattaaatatatgtagttttattatacatcaatcattcctcaataaagctgtagaaatctatacaaatagaaagggataacatatttatggtacttccaatgaaactcgagatgtcagtattctccgtttacatctataaattcaccatagtcacaataaaaattccagagttttctggagaaaaaaaaatggtgcccaggctctattccagaccaattaaatcagaacttgggccatgggacctaagacttatttttaattttttttttagagcttccagagtaattcctgatgcacggtaggaataagaaccactatacagagaaaaggagactcaaattatttgtttcactttcttcttcttctccttcttcttttcttcttcttcttcttcttcttcttcttcttcttcttcttcttcttcttcttcttcttcttcttcttcttcttctcctcctcctccttcttcttcttcttgctcttcttcttcttcttctcgctcttcttcttcttcttgttcttcttcttcttccttttctccttcttctttcttcttcttcttcctcctcctcccccttcttcttctcttttcttttacaaccttaaatactttcatgtcatttaagggaagggggagtcaaactttccaaccatttaacattgtctctttaggattcctccctgcacccctatccctggggaacttttagacaataagatttttaattattcagaatagcttttaaaaattgagatttaggttgataaataataggctaaatagtcctccctcgtctatcagttaatatcctgttcaagggatagtaggaactgtggggaatacaaataaatgggacaaggatgagaaggtatcttccccatgccgtcatccatatcttcaaggagctcacaacccacttggggaaatggcataatcatgtattcgctggtgtttttcgattgtgagagaaacccaacattaactggtttaggcacaagtgtatggaacccaataaatggtaagtgcctgggcctcgggtacagctggaaccaagagctccaaattagcaggaacatcctatctcatgacaacatggatgccaacagaggccacatctttgcaacttagggttcagtcaccagggacactggcctgactgtcagccctgaacccacaccactgggaagggactcataatcacctctggacctacaaattgtggctggggtggggtggggagtttgaatggctgagctcacaagagaacagggaactccctttgaaatcaagtgaaagataatagttttctgacccataggggttctaactcaaaaaaagtatgtgatgaaggggtttgctgggcagacaagacaagtatctaccatacatgtagcatagcaagacagagatattccaggacagcactggcaaacagtgtggtacagagtaatggccaaatgaatggtgcaaaatattgcattttcccacctgagaaagaaccctaaaccttaggagcaacttctactcagaggagttgggtctgcatacgcacactctgacttcccaccacatgaggggtgtggaggtgattaggatgaaatgaggggtgtttagcacacagagaatcactgctactccacaccccaacaagctgcaagcacagggagtttagtttggtttatgctgtttgagggatatctaagagatgtctgataagcagcagaaatggggtgatgactgtacctctgaaattccacagcagaggcttctaacacatatttggccattgctttcactgaggctcagaaggttgtgcccagtatccagagaaggatttcaaaattttcaaggactatagctgagaaagggttttctggaaattgagagtgccaatttgctgtgaagcagggagaagacaggctatttctgagatacagcaaatagaagtaattttttttcaccatcaatgatgacctcagtgacgtagaaacagggtggtagctcctggttttcttgtttcttaatcaatataatttagactttaaaatttcatgaacaatatcttagatatttcttagttatgttgtgattttgtcaatgctgcttaactctaatgcaggatgataattgtggctaattgcctaaaagcatatgaactttttttcccatcagtgttatatgtgagagaacacacacacacacacacacacacacccctctttaatatgaatttgatgtcctcacttaaattacatgaaataattcctaaatgcttgaaaatacaaaaccctcctcatctagttcctatctcaatcagacaaatattttaaagcagattcaaaaaatagactatactaaacttcttactggaaaaaaagtcacttctggacagagaccaagccaaagtaattttagctcaaattggttttcctggaaaaactggaaacgtaatcctgaaaagaaatgtcttggcagctttacaaatcaacactcaaaaactaacaagagcagcctaaatatccttcacttcaatgattctcagataccagcatggaaagaatcttgtttgacaaaaaagcttgttaaaattcagattctggaacccagcctgcagatctaaacaaaacccgagttgtttaagtagagaagatttgaagatcacagcttaattaactcagaaaagatcaatgtagaaatttataaattaataggatagaaaaaggaattgtgtttgggaaactatgtcctagcccactccaatagagccatctgtcttagtgttgtgggaccatctggtacaaggcctaactccatcattttgtgtgtgactttgagtaaatagttcactgtctttgggtttcaattttctttccaataaaatgagatcagataatgccttagtctgtttggggtgctatcgcaaaataccataaactgggtagcttataagcaacagattttttttttctcacagtcccagaggctgagaagttcaaaattaaggcaccagcagatctggtgtctagtgagggttttgtggttcatagacagtaccttctagctatgacctcacatggaagaaggggctatctagctctctggagtttctttcataaagccgctaatccattaatgagggctctgccctcatgacttaatcacccctcaaaggttcccatctcctaataccatcaccttagggggtaggattttaacatatgaatttttgagggacacaggtatttagatacaatatcaatcattcttaatctttttgagattacaaactcctttgagaaaccaataaaactattcaatcttttctccagaaaaatgcacaaatacacacttttgcacccaaatttgggagggtcacagctcccttaaaatgcttttgtgaacttcatatgacagacagtggctctttgaagggaaaaatggggtttatatgaatctgtgtttcatatgcctcctgtccaattcagatttgtccttgttgaggagtcatgtcactttttatcctccactccttgccccatgttaggaatcaccattgtcactaatacgtgcaacacacttagagtgcaacacactcagagtaagcgctggccactttgggaagccgaagactcctccaaggtaggtgacattatcaccattttacaa

SEQ ID NO: 701 - DNA, 2524 bp, Homo sapiens
cgcggagtcgtgaaagtggagggggctgagggagggcggggaggaaggtctgggggcggacccagggggaggaggaggaggaagagtaactgctgaaaggaggtggcgaaggaggatccggagcagctgctgccagcccgcgggcactgaagtcctcccggctgccgctcgagtagccacgggcgcgatcgggaccagaagtctcctcctccatgatcactttggaagccgggggaagactttgccctgccctgagagctggtctgcgtttcccaggcgcggcggcggcggagcagcagctgcagcagccgagtccaaataggagcggccacagccaggggcgtgagcgccccgcgcggagcgagctcgggttcccctcggaatgtccccggggcgcccggcgcgctgaccccgaagccgcctccgccttcggcgcctgctgcctccctcggccaggcttgttgttcgggactgtgagcttcctggctcctgggcagtggggaagcccccgggggcgagtgacctcagctggccacgacccagccctcccccgtgcgtatctcgcttaagatggcagcggagtcaggggaactaatcggggcttgtgagttcatgaaagatcggttatattttgctactttaaggaatagaccaaaaagcacagtaaatacccactatttctccatcgatgaggagctggtctatgaaaatttctatgcagattttggaccgctgaacttggcaatggtgtacagatattgctgcaaactaaacaagaaactaaaatcatacagtttgtcaagaaagaaaatagtgcactacacctgttttgaccaacggaaaagagcaaatgcagcatttttgataggtgcctatgcagtaatctatttaaagaagacaccagaagaagcctacagagcactcctgtctggctcaaaccccccctatcttccattcagggatgcttcctttggaaattgcacttacaatctcaccattctcgactgtttgcagggaatcagaaagggattacaacatggattttttgactttgagacatttgatgtggatgaatatgaacattatgagcgagttgaaaatggtgacttcaactggattgttccaggaaaatttttagcatttagtggaccacatcctaaaagcaaaattgagaatggttatcctcttcacgcccctgaagcctactttccttatttcaaaaagcataatgtgactgcagttgtgaggctaaacaaaaagatttatgaggcaaagcgcttcacagacgctggcttcgagcactatgacctcttcttcatagatggcagcacacccagtgacaacatcgtgcgaaggttcctgaacatctgtgagaacaccgaaggggccatcgccgttcactgcaaagctggtcttggaagaacagggacattgatagcctgttatgtaatgaaacactacaggtttacacatgctgaaataattgcttggattagaatatgccggccaggctctattataggaccccagcagcacttcctggaagaaaaacaagcatcgttgtgggtccaaggagacattttccgatccaaactgaaaaatcgaccatccagtgaaggaagtattaataaaattctttctggcctagatgatatgtctattggtggaaatctttcaaaaacacaaaacatggaacgatttggagaggataacttagaagatgatgatgtggaaatgaaaaatggtataacccagggagacaaactacgtgccttaaaaagtcagagacagccacgtacctcaccatcctgtgcatttaggtcagatgatacaaaaggacatccaagagcagtgtcccagcctttcagattaagttcatccctgcaaggatctgcagttactttgaagacatcaaaaatggcactgtccccttcagcaacggccaagaggatcaacagaacttctttgtcttcgggtgccactgtaagaagcttttccataaactcccggctagccagttctctagggaacttgaatgctgcaacagatgatccagagaacaaaaagacctcctcatcctctaaggcaggcttcacagccagcccgtttaccaacctcttgaatggcagctcccagccaactaccagaaattaccctgagctcaacaataatcagtacaacagaagcagcaacagcaacgggggcaacctgaacagccccccaggcccccacagcgccaagacagaggagcacaccaccatcctccgaccctcctacaccgggctttcttcttcttcagcgagattcctgagccgttctatccctgtaagtgcgcagacaccacctcctggtcctcagaaccctgaatgcaacttctgtgccttgccttcccagccgaggctgccaccaaagaaatttaatagtgccaaggaagccttctgagcgatgccttccctctgtgctgtgaaactgtctatgcactacattctgctagctcctcttcaagtaaacgccaagtcacaac

SEQ ID NO: 702 - protein, 621 aa, Homo sapiens
MAAESGELIGACEFMKDRLYFATLRNRPKSTVNTHYFSIDEELVYENFYADFGPLNLAMVYRYCCKLNKKLKSYSLSRKKIVHYTCFDQRKRANAAFLIGAYAVIYLKKTPEEAYRALLSGSNPPYLPFRDASFGNCTYNLTILDCLQGIRKGLQHGFFDFETFDVDEYEHYERVENGDFNWIVPGKFLAFSGPHPKSKIENGYPLHAPEAYFPYFKKHNVTAVVRLNKKIYEAKRFTDAGFEHYDLFFIDGSTPSDNIVRRFLNICENTEGAIAVHCKAGLGRTGTLIACYVMKHYRFTHAEIIAWIRICRPGSIIGPQQHFLEEKQASLWVQGDIFRSKLKNRPSSEGSINKILSGLDDMSIGGNLSKTQNMERFGEDNLEDDDVEMKNGITQGDKLRALKSQRQPRTSPSCAFRSDDTKGHPRAVSQPFRLSSSLQGSAVTLKTSKMALSPSATAKRINRTSLSSGATVRSFSINSRLASSLGNLNAATDDPENKKTSSSSKAGFTDFTNLLNGSSQPTTRNYPELNNNQYNRSSNSNGGNLNSPPGPHSAKTEEHTTILRPSYTGLSSSSARFLSRSIPVSAQTPPPGPQNPECNFCALPSQPRLPPKKFNSAKEAF

SEQ ID NO: 703 - DNA, 4351 bp, Homo sapiens
cgcggagtcgtgaaagtggagggggctgagggagggcggggaggaaggtctgggggcggacccagggggaggaggaggaggaagagtaactgctgaaaggaggtggcgaaggaggatccggagcagctgctgccagcccgcgggcactgaagtcctcccggctgccgctcgagtagccacgggcgcgatcgggaccagaagtctcctcctccatgatcactttggaagccgggggaagactttgccctgccctgagagctggtctgcgtttcccaggcgcggcggcggcggagcagcagctgcagcagccgagtccaaataggagcggccacagccaggggcgtgagcgccccgcgcggagcgagctcgggttcccctcggaatgtccccggggcgcccggcgcgctgaccccgaagccgcctccgccttcggcgcctgctgcctccctcggccaggcttgttgttcgggactgtgagcttcctggctcctgggcagtggggaagcccccgggggcgagtgacctcagctggccacgacccagccctcccccgtgcgtatctcgcttaagatggcagcggagtcaggggaactaatcggggcttgtgagttcatgaaagatcggttatattttgctactttaaggaatagaccaaaaagcacagtaaatacccactatttctccatcgatgaggagctggtctatgaaaatttctatgcagattttggaccgctgaacttggcaatggtgtacagatattgctgcaaactaaacaagaaactaaaatcatacagtttgtcaagaaagaaaatagtgcactacacctgttttgaccaacggaaaagagcaaatgcagcatttttgataggtgcctatgcagtaatctatttaaagaagacaccagaagaagcctacagagcactcctgtctggctcaaaccccccctatcttccattcagggatgcttcctttggaaattgcacttacaatctcaccattctcgactgtttgcagggaatcagaaagggattacaacatggattttttgactttgagacatttgatgtggatgaatatgaacattatgagcgagttgaaaatggtgacttcaactggattgttccaggaaaatttttagcatttagtggaccacatcctaaaagcaaaattgagaatggttatcctcttcacgcccctgaagcctactttccttatttcaaaaagcataatgtgactgcagttgtgaggctaaacaaaaagatttatgaggcaaagcgcttcacagacgctggcttcgagcactatgacctcttcttcatagatggcagcacacccagtgacaacatcgtgcgaaggttcctgaacatctgtgagaacaccgaaggggccatcgccgttcactgcaaagctggtcttggaagaacagggacattgatagcctgttatgtaatgaaacactacaggtttacacatgctgaaataattgcttggattagaatatgccggccaggctctattataggaccccagcagcacttcctggaagaaaaacaagcatcgttgtgggtccaaggagacattttccgatccaaactgaaaaatcgaccatccagtgaaggaagtattaataaaattctttctggcctagatgatatgtctattggtggaaatctttcaaaaacacaaaacatggaacgatttggagaggataacttagaagatgatgatgtggaaatgaaaaatggtataacccagggagacaaactacgtgccttaaaaagtcagagacagccacgtacctcaccatcctgtgcatttaggtcagatgatacaaaaggacatccaagagcagtgtcccagcctttcagattaagttcatccctgcaaggatctgcagttactttgaagacatcaaaaatggcactgtccccttcagcaacggccaagaggatcaacagaacttctttgtcttcgggtgccactgtaagaagcttttccataaactcccggctagccagttctctagggaacttgaatgctgcaacagatgatccagagaacaaaaagacctcctcatcctctaaggcaggcttcacagccagcccgtttaccaacctcttgaatggcagctcccagccaactaccagaaattaccctgagctcaacaataatcagtacaacagaagcagcaacagcaacgggggcaacctgaacagccccccaggcccccacagcgccaagacagaggagcacaccaccatcctccgaccctcctacaccgggctttcttcttcttcagcgagattcctgagccgttctatcccttcccttcagtctgaatatgttcattactaaggccttgccactccagtgaaagctgttcttctcttagacacaatttcttcatctggacgagcagtggagagggaaagcaacttcttgctggaagaatatctctgccttcttaccttaaattaaaaagagcactaagataacaccttcaagagacttgaaaacagaaaactggttaatgactactataaatgcactgaaactatgtttatggagatttccatacttttaaagacagttttaatgttgaatttggtattttgaagggttatttttaatgtattttggtaatacatttattattatatttacatgtacagtgttacattatatatgtattgtgaactttaaaagactattttgataaatttataaatatataaaattatgtaaaaactacactatattttgatttagattttcctgctgtttgctaccaaaaatttgtattttaaatctgtttagttttagtatggttttgtctctaatgaataaataattccttcttattaagaagaagtaagggagaaagtttttagaaagtgatttttatgctcgcactataaatatggcaggtcagttcattcttttgggaagtcagtttagttacactgagtttatccaagtttatctctaccaagagtataatggcatgggatggcttatttaggacaattccctttcccattgtttttgttgctgagccaatttgagttagttttgcatcctggggggctttaaaatacagcatgcagtgaaagatcagaattcactgaatatttcttctgagagcatggtttcatggtttttctctatgaaatgactcaatattccaaatgtttttttttccttcctcctttcaaaagagttcttaacccaattaggatatcctgctttgggtatgaggttgttgttgcctgtaatcacacatggtttgacatcagttttaaatcaatggagagaaaaaactgaaaaagatgctgctaagtagttctctgtattaaaggagatatttttaaaacagggtacaaccccctgctgcacacgctagcatatctggaacctactatgaaaatgaaaggacccttataggtactcacagccctttcatgtaagtatgatctgatatttaggtcttcagaagcctgtaggtttcatttctatgaggaatcgaggagcgttacatcctgatatccttccaggctgcttaagaatggactgcttcgacactgaaagtgctagttaaatggattcatatgaagtgctttactcccaaccattgagttatttataatgtatttattaggggagggtaccttgagtctattatatatgcttcatcaaaacatcttgttcatgttttatgtttttaaaaaaggcatttgaatgaatgtttgactcaggtttgttaaattaaccttcagtaactgcagtaccaaaaattacactcaactgatgaaaaaaacgaattgtatgatttaggaatcaaaaactaaaataagtggaattatgtatcttttctaaagttaaaaaagtaaaatattttattatgagttattataaaaattggttaattgtataggaagatgacagtatttttttcaagttatcataaaaagtaattcagatgacatttgagaagtaggggaaagggaatcatgttgacagttttagttctgtgaacactaatttgtgtgaagctattaaaatgattgtaaagttgactactgtaaatttcccataattatgtgtgtatatgtgtcatatgtatgtacatgtatatgtctaaaaattactttacacatgtgcctacatagacacaccaagaagtggatgtatataatatagaaagtatatagcaaagtaattttactctgataataaaaattgtttgacatgtattttgttatgaatagtttatcttccaaaagatattttgctctattttaaagtgtagaagaatacactgctaataaataataaaagttttattcaattt

SEQ ID NO: 704 - protein, 592 aa, Homo sapiens
MAAESGELIGACEFMKDRLYFATLRNRPKSTVNTHYFSIDEELVYENFYADFGPLNLAMVYRYCCKLNKKLKSYSLSRKKIVHYTCFDQRKRANAAFLIGAYAVIYLKKTPEEAYRALLSGSNPPYLPFRDASFGNCTYNLTILDCLQGIRKGLQHGFFDFETFDVDEYEHYERVENGDFNWIVPGKFLAFSGPHPKSKIENGYPLHAPEAYFPYFKKHNVTAVVRLNKKIYEAKRFTDAGFEHYDLFFIDGSTPSDNIVRRFLNICENTEGAIAVHCKAGLGRTGTLIACYVMKHYRFTHAEIIAWIRICRPGSIIGPQQHFLEEKQASLWVQGDIFRSKLKNRPSSEGSINKILSGLDDMSIGGNLSKTQNMERFGEDNLEDDDVEMKNGITQGDKLRALKSQRQPRTSPSCAFRSDDTKGHPRAVSQPFRLSSSLQGSAVTLKTSKMALSPSATAKRINRTSLSSGATVRSFSINSRLASSLGNLNAATDDPENKKTSSSSKAGFTDFTNLLNGSSQPTTRNYPELNNNQYNRSSNSNGGNLNSPPGPHSAKTEEHTTILRPSYTGLSSSSARFLSRSIPSLQSEYVHY

SEQ ID NO: 705 - DNA, 2625 bp, Homo sapiens
cgcggagtcgtgaaagtggagggggctgagggagggcggggaggaaggtctgggggcggacccagggggaggaggaggaggaagagtaactgctgaaaggaggtggcgaaggaggatccggagcagctgctgccagcccgcgggcactgaagtcctcccggctgccgctcgagtagccacgggcgcgatcgggaccagaagtctcctcctccatgatcactttggaagccgggggaagactttgccctgccctgagagctggtctgcgtttcccaggcgcggcggcggcggagcagcagctgcagcagccgagtccaaataggagcggccacagccaggggcgtgagcgccccgcgcggagcgagctcgggttcccctcggaatgtccccggggcgcccggcgcgctgaccccgaagccgcctccgccttcggcgcctgctgcctccctcggccaggcttgttgttcgggactgtgagcttcctggctcctgggcagtggggaagcccccgggggcgagtgacctcagctggccacgacccagccctcccccgtgcgtatctcgcttaagatggcagcggagtcaggggaactaatcggggcttgtgagttcatgaaagatcggttatattttgctactttaaggaatagaccaaaaagcacagtaaatacccactatttctccatcgatgaggagctggtctatgaaaatttctatgcagattttggaccgctgaacttggcaatggtgtacagatattgctgcaaactaaacaagaaactaaaatcatacagtttgtcaagaaagaaaatagtgcactacacctgttttgaccaacggaaaagagcaaatgcagcatttttgataggtgcctatgcagtaatctatttaaagaagacaccagaagaagcctacagagcactcctgtctggctcaaaccccccctatcttccattcagggatgcttcctttggaaattgcacttacaatctcaccattctcgactgtttgcagggaatcagaaagggattacaacatggattttttgactttgagacatttgatgtggatgaatatgaacattatgagcgagttgaaaatggtgacttcaactggattgttccaggaaaatttttagcatttagtggaccacatcctaaaagcaaaattgagaatggttatcctcttcacgcccctgaagcctactttccttatttcaaaaagcataatgtgactgcagttgtgaggctaaacaaaaagatttatgaggcaaagcgcttcacagacgctggcttcgagcactatgacctcttcttcatagatggcagcacacccagtgacaacatcgtgcgaaggttcctgaacatctgtgagaacaccgaaggggccatcgccgttcactgcaaagctggtcttggaagaacagggacattgatagcctgttatgtaatgaaacactacaggtttacacatgctgaaataattgcttggattagaatatgccggccaggctctattataggaccccagcagcacttcctggaagaaaaacaagcatcgttgtgggtccaaggagacattttccgatccaaactgaaaaatcgaccatccagtgaaggaagtattaataaaattctttctggcctagatgatatgtctattggtggaaatctttcaaaaacacaaaacatggaacgatttggagaggtaagttttccctaggagattctatcttcttaaaactgatgttctgcatttgtttctcagttggacctatataacatagcagtgtcttttctctggatgccacgagtaccaagtttttagaagtagagccatccgtctatatagcaagaagcagaggaaagaaaccaattgcccttaaaaaaaaaaaagctataatttaaggagtaaattataaaggaggctactctggtaaggggtaatatttatagaaaggaaacagaaaagcaaactttctatttgaaaattaaaataaatatcaagaagaaaaattttaatgtgacaattgaggaaataatacataccacaagtggtgctttgaaagcctcaaattcatgctgatttctaaagtaagtgccaacttgaaaacatgattagggcacttttttaaaaaaaaattaaggctctactgtaaacaaaccactgtaaatagttgatatatattgtctgattaatattcataactacctggtgagttaggtaatactatctctattttataggaaggaaattgcatatcagagatgttctaacctcagtgtcaaacatggttcaatccatgtctgtctgagtccaagcttgtgtttttttatatcacaccctgttacctctgaataaaaatagaagtgatttactaagaattaggattatgagcatttttggaactagaaacaacgttgaaacaccatttgtttggttccactattgtagagacaagaaactggggtcccagaaaatttgtgatttgtgtaaagttccagggttgtttagtagtggggccactttgacaactgggcattcaattcctagtttaggtctttctaccacgttatacctgaggtgaagctaagtatctggtttatacttttatatctttaaagg

SEQ ID NO: 706 - protein, 383 aa, Homo sapiens
MAAESGELIGACEFMKDRLYFATLRNRPKSTVNTHYFSIDEELVYENFYADFGPLNLAMVYRYCCKLNKKLKSYSLSRKKIVHYTCFDQRKRANAAFLIGAYAVIYLKKTPEEAYRALLSGSNPPYLPFRDASFGNCTYNLTILDCLQGIRKGLQHGFFDFETFDVDEYEHYERVENGDFNWIVPGKFLAFSGPHPKSKIENGYPLHAPEAYFPYFKKHNVTAVVRLNKKIYEAKRFTDAGFEHYDLFFIDGSTPSDNIVRRFLNICENTEGAIAVHCKAGLGRTGTLIACYVMKHYRFTHAEIIAWIRICRPGSIIGPQQHFLEEKQASLWVQGDIFRSKLKNRPSSEGSINKILSGLDDMSIGGNLSKTQNMERFGEVSFP

SEQ ID NO: 707 - DNA, 2655 bp, Homo sapiens
cgcggagtcgtgaaagtggagggggctgagggagggcggggaggaaggtctgggggcggacccagggggaggaggaggaggaagagtaactgctgaaaggaggtggcgaaggaggatccggagcagctgctgccagcccgcgggcactgaagtcctcccggctgccgctcgagtagccacgggcgcgatcgggaccagaagtctcctcctccatgatcactttggaagccgggggaagactttgccctgccctgagagctggtctgcgtttcccaggcgcggcggcggcggagcagcagctgcagcagccgagtccaaataggagcggccacagccaggggcgtgagcgccccgcgcggagcgagctcgggttcccctcggaatgtccccggggcgcccggcgcgctgaccccgaagccgcctccgccttcggcgcctgctgcctccctcggccaggcttgttgttcgggactgtgagcttcctggctcctgggcagtggggaagcccccgggggcgagtgacctcagctggccacgacccagccctcccccgtgcgtatctcgcttaagatggcagcggagtcaggggaactaatcggggcttgtgagttcatgaaagatcggttatattttgctactttaaggaatagaccaaaaagcacagtaaatacccactatttctccatcgatgaggagctggtctatgaaaatttctatgcagattttggaccgctgaacttggcaatggtgtacagatattgctgcaaactaaacaagaaactaaaatcatacagtttgtcaagaaagaaaatagtgcactacacctgttttgaccaacggaaaagagcaaatgcagcatttttgataggtgcctatgcagtgaaaaaaattccttagaagggatcttccaattccaagtttgaacatcatgtggggcaggtatctttctgtctcccagggccaaccattagatggtcccgactatattgggatgcttcctttggaaattgcacttacaatctcaccattctcgactgtttgcagggaatcagaaagggattacaacatggattttttgactttgagacatttgatgtggatgaatatgaacattatgagcgagttgaaaatggtgacttcaactggattgttccaggaaaatttttagcatttagtggaccacatcctaaaagcaaaattgagaatggttatcctcttcacgcccctgaagcctactttccttatttcaaaaagcataatgtgactgcagttgtgaggctaaacaaaaagatttatgaggcaaagcgcttcacagacgctggcttcgagcactatgacctcttcttcatagatggcagcacacccagtgacaacatcgtgcgaaggttcctgaacatctgtgagaacaccgaaggggccatcgccgttcactgcaaagctggtcttggaagaacagggacattgatagcctgttatgtaatgaaacactacaggtttacacatgctgaaataattgcttggattagaatatgccggccaggctctattataggaccccagcagcacttcctggaagaaaaacaagcatcgttgtgggtccaaggagacattttccgatccaaactgaaaaatcgaccatccagtgaaggaagtattaataaaattctttctggcctagatgatatgtctattggtggaaatctttcaaaaacacaaaacatggaacgatttggagaggtaagttttccctaggagattctatcttcttaaaactgatgttctgcatttgtttctcagttggacctatataacatagcagtgtcttttctctggatgccacgagtaccaagtttttagaagtagagccatccgtctatatagcaagaagcagaggaaagaaaccaattgcccttaaaaaaaaaaaagctataatttaaggagtaaattataaaggaggctactctggtaaggggtaatatttatagaaaggaaacagaaaagcaaactttctatttgaaaattaaaataaatatcaagaagaaaaattttaatgtgacaattgaggaaataatacataccacaagtggtgctttgaaagcctcaaattcatgctgatttctaaagtaagtgccaacttgaaaacatgattagggcacttttttaaaaaaaaattaaggctctactgtaaacaaaccactgtaaatagttgatatatattgtctgattaatattcataactacctggtgagttaggtaatactatctctattttataggaaggaaattgcatatcagagatgttctaacctcagtgtcaaacatggttcaatccatgtctgtctgagtccaagcttgtgtttttttatatcacaccctgttacctctgaataaaaatagaagtgatttactaagaattaggattatgagcatttttggaactagaaacaacgttgaaacaccatttgtttggttccactattgtagagacaagaaactggggtcccagaaaatttgtgatttgtgtaaagttccagggttgtttagtagtggggccactttgacaactgggcattcaattcctagtttaggtctttctaccacgttatacctgaggtgaagctaagtatctggtttatacttttatatctttaaagg

SEQ ID NO: 708 - protein, 284 aa, Homo sapiens
KGSSNSKFEHHVGQVSFCLPGPTIRWSRLYWDASFGNCTYNLTILDCLQGIRKGLQHGFFDFETFDVDEYEHYERVENGDFNWIVPGKFLAFSGPHPKSKIENGYPLHAPEAYFPYFKKHNVTAVVRLNKKIYEAKRFTDAGFEHYDLFFIDGSTPSDNIVRRFLNICENTEGAIAVHCKAGLGRTGTLIACYVMKHYRFTHAEIIAWIRICRPGSIIGPQQHFLEEKQASLWVQGDIFRSKLKNRPSSEGSINKILSGLDDMSIGGNLSKTQNMERFGEVSFP

SEQ ID NO: 709 - DNA, 36884 bp, Mus musculus
  misc_feature (1)...(36884): n = A,T,C or G
agctacaagttttcctcttagaaatgctttcattgtgtcccataagtaagtttgggaacgttgtggcttcgttttcattaacctgtaaaaagtctaatttttctttcttcctaccttaaccaaggtatcattgagtagagtgctgtacagtttccacgtgaatgttggctttctattatttatgttgtaattgaagatcagccttagtccattgtgatctgataggatacatgggacaatttcaatatttttgtatctgttgaggcctgttttgtgaccaattttatggtcaattttggagaaggtaccatgaggtactgagaagaaggtatatccttttgttttaggataaaatgttctgtagatatctgttaaatccatttgtttcataacttctgttagtttcactgtgtccctgtttagtttctgttttcaggatgtgtctattgatgaaagtggtgtgttgaattctcccactattattgtgtgaggtgcaatgtgtgctttgagctttactaaagtttctttaatgaatgtggctacccttgaatttggagtatagatattcagaattgagagttcctcttggaagattttacctttgatgaatatgaagggcccctccttgtccttttttgataacttggggttggaagtcgatttttttcgatattagaatggctactccaacttgtttcttcagacgatttgctttgaaattgttttccagccttttactctgaggtagtgtctgtctgtttccctaaggtagggttcttgtaagcagcaaagtgttggttcctgtttgtgtagccagtctgttagtctatgtctttttattgggcaattgagtctattgatattaagagatattaaggaaaagtaattgttgcttcctattacttttgtcgttagagttggcattctgttcttgtggctgtcttcttttaggtttgttgaaggaatactttcttgctttttctagtacctggtttctgtccttgtattgtttttttctgttattatcctttgaagggctggattcatgggaagatattgtgtgaatttggttttgtcatggaatactttggtttctccatctatagtaattgagagtttggctgggtatagtagcctgggctggcatctgtgttctcttagtgtctgtataacatctgtccaggctcttctggctttcatagtctctggtgaaaagtctggagtgattctaataggcctgcctttatatgttacttgacctttttcccttactgattttaatattctatctttatttagtgcatttgttgttttgattattatgtgtcaggaggaatttctttctggtccagtccatttggagttctgtaggcttttgtatattcatgggcatctctttctttaggtttgggaagttttcttctataattttgttgaagatatttgctggctctttaagttgaaaatcttcattctcatctactcctattatctgtaggtttggtcttctcattgtgtcctggatttcctgaatgttttgagttaggatctttctgcattttgtattttctttgattgttttgccaatgtttatcccgagcttttgtcccagctggcaagaacacactcgggacaacaggaatcttctgcggcaaaagctttattgcttactgctcaggaggaagaccccgaacccagaaaatggcgctgcttatatagccctcaggatggcgtttcagcccctgatatggagtgtcagctcctgatttgttgcttgcccatcaccccaatattacaccccgagaatgggcagtgactaagagtgagttcactctcgcgcctgcgtacaaggcttgttaactagttaggcacagtggaggccagcaccatcttataatggtgattgctcgcggcacgcactacttccctttttaggtcttgtacagtttcattcaagtccatcacctgtttggttgtgttttcctgtgtttctttaaggacttgtacctctttagcagtgttctcctgtatttctttaagtgagttattaaagtccatcttgatgcccttgaccatcatcatgagatatgcttttaaatccgggtctagctttttgggtgtgttgggatatccaggactgggtgaggtgggagtgctgggttctgatgatggcgaatggtcttggtttctgttaataagatttttacgtttgcttttagctatctggtaatctttggagttagttgttagtggttagagcttgttcctcccgttattctgttagcctctatcagcagacctgggaggctagctctctcctgagttttcagtggtcagagtactctctgcagtcaagctctcctcttgcagggaaggtgcacggatatctggtgttcggacctgcgtcctggcagaagatgaaggtccaaaacagggcctgtcccagaagctctgtcgcttctgcctgtcccagaagttgtatggcttctgtagtcggcactgtcacctacacagactagtctctgagaggacatggaccagagttggctctcccaggtgctccggcaaagccctccgagtccaggcagacacctctcctctggcagggaaggtgcccagatatctggagcccgaaatggtgtctgccccagaagctgtgtcgcttctgcctgtcccaggagctgtgtagcttctgtagtccacactctcacctgtgcagactagtctctgagggattcgagaacccatcagtgtcctttttaatggcccttcttggtggcatatatttgaattctgaagcttatagatggaatgtaggaaagggattcctttccaaaaattttatgctatgcaggatgatgctgagtttgtatccaacctggattacatagagagatcctgtctcaaaaccaaaaataaccaataaaaagtaaatacaatattaacagtttgtttcaagctcataactaataagaaaacacaatataatagaaaaacaagttaaatcagaattgctttatgttaatttcttcctttcatacattacataactaaagttctcagagataaaataacttgaccaactttttatagacatttcacagaaagacagagattacaggctgtctaccagcccagccccataggagacagaacataggagatctggaatcccacaaagactttatgtaactgtgtaatgctagcacatattaaatacacataatatagtgtggctaaatacttttttttaggaataaaatgagccaaatgccatttaagtggccactgaggttcaacaaatatttattaggggttcattggtgttgagtgtttcagacacttaaggcttagtaatgaataaaatgagaaacatttatcatgttactggtttatattctgggggcataaacaagcattattataatagatgtaagtatggaaatgaaattagaaatgttatgataagcaatgtgcagagaactgagattgggggtaccatctagggggattggtttcatatttgagacctggtctctgtgtagctctggctgtcctggaaattagtgtatagatcattcagctgaccttcaacttataaagatcctcctgcttctgcttcctgagagcttggattaaaggtgtataccctcatgtccagcattggtaggtaccatttttaacacagagggaaggatgtagttttaaatgggataatgagctcagcctcatcaaggaggtaagagatttagttatgtgcatatggtacagaggaaaaagtcagtacaaagtttaagagcttgcttaatgtgaaccgtggtcgatgtgaagaggaatgagagaatgtggcaacagctgatgtttgcaacagtaaattggagaaaggcatgctgggaggggtggctttgaatagaattaactttgtcaatgaaacagaaaatacatgttttctatatatgctgtacttatgaaaagtcaaaaatgtgtccataggagctgggcttacagcttggtcgagtgcttgcctggcacatataaaatgctctggtttggttcactaacacttcataaaccataagtagtggcatatgtgtataatcccagcactgtggaggcaaaggcaggaggaacagaaatctagcatcttctttcgttacatagtaagtttagtgagtttagggccagcatgagatatataaaaccctgctgaaagaagaaagaagagagggagggagcaagggaaggaagaaagaaaagaaagaaacagaagataagaaagaaagaaaagaaagtcaagcatgcaggtaggcaggcaggcagacagacagacagacagacagacagcagtacccaccattcattccaacactcaggggtcaaagtagatggatctctgagttgatggccaacctggcttacagagcgaattccaggacagccagagctgcacagagaaaccctatcttgaaaacaacaacaaccacaaccaacaaccaacagaagtcttggggggaaaagagtgagtagtttttccttttcagatttttaactttattacaaatatcaaaatgaaaatgtgtgggaaaaggggagttgagacaggaatgtggttcatacctgtaatcccagcactcaggaggcagaggaaagaagattgctgtaatctcaggtcagtctggtcagcacaaagattttcaggctagtcaggacagtttaataaaactcctcaaaagataggggttggtctgacagttttgtcaattcagtggctgaggtttcaggaattgcatgatttgtatgatgcgtctcaggtcccttccacggaaccttttgaacttaattgacagtggagaaggcccagcagcagtgctgagactccagcattgagggtgagctttaggagctccttggtattctaatatgcagccaacgttaagaaacatgactctgctcaacgtgcgagactgtttcctcccattcctgccgccaagaactgctcatttctcatcagaacggctcttttcctgctatccagcactacaaaatcactaatagtttcttgcctgtataggatataaatctgaaaatagcttgatgtttattttgtctttatgtaaacaacattccctgtccaggcaaaggttcattctgcgacatcttttgtcacaaagccatttcaattgtattacaaagtgcaattttacttttgttattaaagcctacttttatggcagcatcatttgaataggttctgaaaatattcccaggatactatcataactaggaactcccttttttctatcagcagttattcctactacccctggagccctttagtctagacagcaggctccaagctcaaagctattaccgggagctttcaagggtataccttctaaggctcagttctgttgatgacaagccaacgctagtctgattctcattccttttaagagcttttagactcttgcttcttctgctcttcttagcatattccacaaggtactttcatgcacgttttttttttcctgcttagtatgcagttggctatctgcacatgcagacttccttttcttcttcttcttcttcttcttcttcttcttcttcttcttcttcttcttcttcttcttcttcttcttcttcttcttcttcttcttcttcttcttcctcttctccttctgcctcctccctcctcnnnnnnnnnnnnnnnnnnnnnnnnnnnnnnnnnnnnnnnnnnnnnnnnnnnnnnnnnnnnnnnnnnnnnnnnnnnnnnnnnnnnnnnnnnnnnnnnnnnnnnnnnnnnnnnnnnnnnnnnnnnnnnnnnnnnnnnnnnnnnnnnnnnnnnnnnnnnctcttcctcctcctcttcttcttctcctcctcctcccccctcttcctcctcctccttctatatctggcattagttatctatactgtgggttctcccttctacccttcaataccccttttctacccattcaaccccctaacaccacataggggaggaaaaaagacagaggggaaagagagagatgttaccattaaaaaacttcctgctgtttaggattgtcaagttccttgctggggactggatagctaatttcttgttgttttttctttgcgcatgactacttaataaactgagaaaccgtgaccaacagcaatcaacagcaaccacccaacaacccaccaccaccagcagcaaccccattgaggctctcacatttatacaccatctgaaaagtccccagaatccaaacatcacatacttgcagaatatctgtggctgacaatcatgcccctattagagcaagaggcaaatcatagtccactgctgtggacaatctaaagcaaccccatatctcacacatggaattaaaatgaaaacatattcttatagtacttctgtgtttttcaaagaaaccaaaattctcacaactcctttatcctcttccttctgttttgtctgttgtttttcaaggcagggactctctatatagtcctggaactccctgtatagaccaggctggccttgaactctgagacctgcctgcctctgcctcccgagtgctgggattaaaggtgtgctccaccaccccctgctactcctactctttcttattatgcatttcttccaacatcttctattctcattttctaaaatttattttaaaaattttgtcacatgaggtgcctcaatttttgttttttctctaatcttataatactgcaaatgatgcccacatattgagtttataagctataaaacatgtaagacatgtaaaacatgtctcttctaaattggctcattccttccatttcgttcaagacacagccaactttagccctgttgagttaacttgggtgttacctgtgtagtttaccacaagccaaattctgctatgtaacactgaacaaagaaacaaagttctgacctcctaaaccaactttgtagcagagaaaacaaaaaacacattaaaatcctgcatgtcagacatagctgtagcctgagtgcaggtgcagctttctaagtaggcacacagctttctgttcagacagcgatggaatcttactgtgtggcttggtagtttttctgaatctcacccctcattaggcttcttttgctctcttattctaacccttataaaatatgatgtatgaagttattttgatctttttctgtaaattctctgcagctgaactggattgttgtactattaacaaaaactttaaaaggtttacttaagagggaagcctctttgttagatttctgtcccttaaacaaacctgaagttttgttcacctgaagtctttttttttcaaatttttattagatattttcttcatttacatttcaaatgctattctgaaagttccctataccctcccctcgccctgctcccctacccacccactcccacttcttggccctggcgttcccctgtactggggcatataaagtttgcaagaccaagggacctctcttcccaatgacagccgactaggccatcttctgctacatatgcagctagagacacgagctctggggatactggctagttcatattcacctgaagtctttaatagagcttccacccccagttttgtatgtgatcattgaagtgaccacacagtacttcctgtctagggccaaaactgaagagaattttagcttcatcagagataggcacagctgcttatggaaccaaaagagcaatgatcttgatgattaaaaaatctgaaagggtttctaccttcaaactataaaataataccatttctagactctcctctggaatgttctgagtattatatgaccaaattattggcttttatagcatgatcattactaggtttgcccagatgatataaaatgcaactgtttgttttgaatgattaaaaaacttgtttgtagaaaatgggaaaatacactatcttggctcaggctgctgtactgccagactacagatcagaaagcttaaacactaggaatttgttttcttacagctctgacacattcaaaccattaggggctggagagagagctcaactattaagaacataattgctttgcagaaagccagagttgggttccaggaacagagactggggagctcccaactgcctctaacttctgttccaggattcttctataacctctgtggtttctgtatgtatctgcactcacacactcatttctgccccataacctctgtggtttctgtatgtatctgcactcatgtactcatttctgcccctcacacccggtacacgagagaccaaaaataattgttcaaaatacattaaatacaaaccaatgtaaatttgaaatctggtgtttttgttctgcaaccattgaaaaaacaatataaatgaaaaaattccctacaaattaaaacaaagacctaatgggaaaagatgtataaagggatagtggtataaatattagaaaaagcatagtcttatacatcacattgcaaaaaaccacagctttcctcttagacagaataagaagacattattctggagccatttttagtggctataggccaggaacaattttaactaccccaaattccatgttccaactggaagcagttctgtgaagtttcacagaacaagaaatcaaggtaagtgtaaaatccattgttatagtttattaaagcacgccagagagacaggtacagcaagatgagggaagtgttactatagtctcagggtgttatcttattgcattcttagcttttggttggtggaagctagtggcctgtttagtcaatagattccaaaaagtttttaatcttctagtcacaagacgttagttcacacatagagttggacaaatagctagtgttctgcagtgctagatctagcctagataaggtaattagcctctggatggacctgcagcaatccaagcttcccactataatgcagttctagtcaatgtctcggcagacgcagcttcttcttccctttctccttcacaactgttaacacattaaacgtaaaatgagctcatactgccattattttcaaagaggagaaaaacaatttttaaaatccggtgaatacaccttttagatatggaatcctggaggcacgctgagttctttctttttgagacagggtctctctacaaagtcctggctgtcctatgtagatcaaactagacttgaactcatggagatccacctgcctctgctttcccagggctgaaattaaggcatgggccaatgttctgccaggatgagttcttttaaaaaatgcagactccaaccaacattcttaaagagaatttcttttaaagacataaacatacaagtgttttaactgctcccctccgccccccaataacggagatgggtgaaggcgttgtcggagcagattaattaattaattaaggtgattaatcgctctgacagtgtccaccctcaccttttaactttggataaataccaagttggatgcactccctgtgctgactcaaagacacctggagagactcaaaacatcttttctggcccagcccctttccccactagtctctgcatggctgagtgaggccttgcccagtccggggaatggtggagcggcgctctttaagaagggaggctgaacatggccagggggagcgccaggcgagcggccggagcacctaaggtttgtgggagtctttgggtggccgcgatgcgggggccgaggccagatgcacccgagacagtgcgaggacgtgagctcaggtaggttctcgcggccggacttccctgagacccgcaggcctgaggtagaagcctcccctcttctgctccgcaatcccaagagcgggcaccgagaacgcaccccgagccccgagcctaggcctcgtgaggacccggaccgcagcgccgcggccctgcgcatccctctccgtggacccgcccctcgccgcgactccaccaatcggcggcctcgtccacgcgccgcacctggtgggcggagccgcgcgtcgccgtcgcagcgcccggtcccgcccccagcgcggcgctcatcactcgctgcgccgccctgccgccggcggggaggagcggaagccgctggccggggacagactcccgcgcctgtgagccgcggtgcaggcagagcgcgcgccgggaccagcccgcggtcggccctcccggaggacggcagccgctctccatgcctgtgtggtgctgccgctgctccctggccggtcatttcaggtgactttccccccgggatgggtcggagctggctctgcagcgtgtgctcctcggccgccgcccgctgggccggcgctgctcggagctccgtggaccccgctcttttcttgtcccctcttcttgttcctggaccgcgcgggtcacaggacggcgagagtggctaggccggcggtgagtcggttacatgtaaatggtaaatttgaaaatctgtgaagagcctcctttgaatttttgatcttttaaaaatctaataacataagttactggcttgaagggaagtggagaagaatgtgtcatgtagtgacagtgggtcgtgacttactaaggtatgagtgatgtaaagccatgttagaatggagaaatttaggaagtggcagttttatactcaaattatgatgaaagtttcttacggtgagaaaaacaatagtttcaaagatgaatgaacgtatgttctagattcagaacaattgaccaacacttcggggaattacagaataagatcaaaagtacaagaaactggatgggatgaaatgttacgtttagtaaggactctgggaactggctttacatgtgtgaatgttacagaataaactgataaagacttgtttaatagaggctcatagaatttaggtgaaacattaacttgggtggaaaggatattaatatcatttctaaaaatactaacattgctttctttactaatgtgagccacaagtcacagtatttgtgactgtcatcaatacaaatcacagagcttattttatgtgatatagataaatgtcgtgtgtatttaataaccttcacagaagaggttaaaaaagaatgtgaggtgcagagaaatcagactcctgctgtaatagcaacgacctaggtctgcccaacctcctgagtttgtaaggagactttaaattctagatctagaaaagttttatgccaaagactgctggattctatgttctagacagattgttgtgtatgtacacatcgtccactttgagtattgtaaaaagcaggctggagtgaaaatttgaagcctcttggggagctacatttcttttagaaaataaccctctgaaagtctcctgacacctttggggtactgttgagcggtaaggggagagcttggaattcttactctgaggctatgtggtaaataccatccatcctcttatctctgtgcagagaaatttaggggagggagtgaaaagtgtttgctacagtttagtgttgggagagaagaaaccgtgtttgctacattattatagttaaatgtatcattagagaccttttaagagtcaagctataagaagtactgcttccttgtcttcccccattcattcagcagcctcaagtagcatccatgtgtgagtgcatctccataaatgttggccaggctgatgtccagatgggaaatgcctactggcagctctactgctaggaaaatggcatctaacctgatggccacatgccaagtgacatgatcattggggaagagatgactctttgaggatctccttcagtgagacaggcactagcaagcatgtgccctgggcagtgatcgtagacctggaatgcatagctattgatgaattgcgcactggtacctactgccagcttttctaccctgagcagctcagctcatcacaggcaaggaagatgctgcctataactgtgcccctggcaactacaccattggcaaggatatcattaaccttgtcttgacaggactctcaaactggctgaccagtgtacagagcttcagggtttctcctttttccatggctttggcaggggatcaggctgtgaattcatctccctgctgatggagtggctctctattggttatgaaaagaagttgaagctggagttctacattactcaaccccccaaagtttccactgctgtagttgagccctacaattccatcctcaccatccataccaccctggatggagcactctgattgtaccttcgtggtagataatggggccatctgtgacatctgttatagaaatctcaacattgaacacccaatttacactaacttaaataggatgataggtcagactgtcttctgtcactgcttccctcagatttgatgggaccttgaatgttgacctgacagaatcccagaccaatcttgtgccctgtcctagaatctacgtcctctggccactatgctcctgccatttttgcttagaaagcctactacgaggaactttatagcagagatgaccaatgtctgcttttagtcagccaactagatagtgatccgttggcgtcgtaaatacatggcctactgtacggcagagatgtggctcccaaagatgtcagtgctgccattaccattaagaccaagtgtaccatccagtttgtggacttgtgccccactcacttttaagattggcattagttaccagcctcccacagtgtatctggccaacagagctgtgtgtatgcttagcaacaccacaaccattgctgaggcctgggcttgcctagatcacaagtttgatcttgcgaatgcagagcatgccttcatgtagtgttatgttggtgagggcatggaggagggggagttctcagaggcccatggggatatggctgccctagagaaggattatgaggaaattggtgtggattctgttgaggagagagggtgaggaagaagctgaatactaaattaaatttcacaaaggtgcaacttttacaaggaagtttattctgcttcaactcagaacgttgtagtctgggcatacagttactgactttaaacatgaataatttgtcatagatacaagctgtccatttcactgatgggctttaaataaaatattccatcttaaaaacaaagcaaaacaaaacaaatagaaatctaatagtactagttgctattaaggcagatttttggttttgttttgttttaagagctaggaaaggttggtgtctcttaacaactttgtactattctgtggtagtgtattgtatacttaatgtaactttgtactgtcctagggtagagcattagatagtgtagtgttgtactatcctgggtagtgtattgtatggtcaatgtaactttgtactatcctgggtagtgtatttggtacttagtgtaactttgtactagctggggtagtgtattaagttctctaaatgaacagaactgatggaatggttattaaaggaatgtagtagattggcttacatggtccaggtagttcaacaaaggctgcttcaggctggataagtggcgaatctgatagttgtttagtccatagactatggagctggatatctcagcactcccaggctgggactggattcctgaaagattctggagagctgctgctgctgtctatggtgaacaccctgaaggggctggttcttttatttcattttattttatttttaaagattcatttatttattatatgaaagtacactgtagctgtcttcagacaccccagaagagggcatctgatctcattatggatgattgtgagccatcatgtggtttctgggatttgaacttgggacctttggaagagcagtcagtgctcttaaccgctgagccatctctccagccggaagaagctggttctaagatcagtgaaggaatgtttcggcaacaggatagtacaggaacttgccagcaaaatgaagacaaacagactagaaagcaaatttcctttcatgttcttttatcaggccttctagtagaaggtgtggcccacaattaagatacgttttcatgcttcaaataatctgatctagaaaattcctgagactaagtcacattgacaatagaaatgagctatcaaaggcaggttggagcctctctctcaaggttccatttatcagccctctgggataaacaatttcgccttagtcctgtgaaataacatctgtcatttagaaagccctaataaacacagctaatatgtatggtattaacccttccagacattgaaattgttgatgagagatgaaaggtaatttgaggattctgttttgaagtaatctaaaaacaacagcattgagttcagaggctactacagcttttgactgaatgacgggatactgaaactagtttctagagatgcagttggtaaataaggattagaagtcaacattaaggtcttatttcttttatccaaaaagaccagtgtttgtgctctctgtgtccttaaaatatctgacactatatatgactagatctctgtgtaaattttttttttcctgaacacagtttctctgtgtagcccaggctgtcctagaactcactctgtggtacaccaggctcacttcaaactcagagatccacctgtctctgcctcctgactgctgggattaaagatgtgcatcatcagctcctggctgaggaaaaaaaaagtagagaggaaacaagttcttctcaggcatcccaaaagaattacaaaatctcatctgtaattgtctttgaagaagctatgtgttggtgtgcgtgtgcgcacggacgctcaatgcacttagaaactatccacctatattttctagatgaaatcactctttttttttttttcccccgagacaaggtttctcttactgaccttaagcttgctaagcagactggactggctggctattgagccccagggagtggacatagtgatcagtctatttgtgtggtttctggtgactgaactcaggtcctgatgcaggcaggtactctaccaactgagctacttccctagcccggtaaaaagcttactcagtagttaatgtgcttttaagatattaatataagataaatagctacttcagacttgtggacttacatgatatacaatcgaaagcattatgcaacttatggatattttattgcctacatacaatataagaatgaattggattttataaaacctatattaacttttttttttttaaagaaactatagtgacactgaaactgaaggagagatttttaattcttttgtgcaatattttggtgacaatttggggccaaaagttaaagggatgccattagttgaagaaacgtctttacttgaagattcatcagtgactttgcctatggtaataattggtaagttattatattttgtttctttttcttttttctttttaaagatttacttatttattataagtatgctatagctgttttcagacacaccagaagagggcatctgatctcattacaggtggttgtgagccaccatgtggttgctgggatttgaactcaggacctttggaagagcagttagtactcttaaccactgagcaaactctccagcccctgtattttgattcttaaagctagttactgctcttattgcttctgtaatcctaaggttcttccattctattgaaaaggctccacttattaaaatagtttgaatgttcccagctcaaacgattggtatgtatctaaggtgatgtatatgttaccttgatcttatcattattgtatatgtgcattaaaatgccacactttgcctcacaaatatgtacaactactatgtgctaattaataagtatcttaaaaggacaaaaataaaaggagatgcttctgtgaatggaggcaggtaataaaggacagaattataatgaagttttaaggtgttagatatgtaaagtaaccattcaggtctttggagaaagattggcttatatgattacagagtcaatttgggatgtaatagcttttccctgaattactaatgatagatattaagatgaccagtattattagagttctgtgcaggtcactctgtgtatattattattgtttttgaaccctatagctctgttgtattgattaggcccgtgtagaaagacttaaaactaaatgacaactgtaagttagtaacttgagccatttgacattatagtgttttgcagtaagatttataattccctaaattataataaccacttgtatcgtttgtatcacctcaacagataggatgtaaagctactaaaattcaacaattgagatttttaaaactgtggataattagatttatttaactacctgccatttatattttccatctaatactcaagcttgaggaagacaggcaagacctgtcttaagactgcattgtggtggctatttgcctttctaattgcctttcttgaattgttttttggaattgcattaagtttacaaatcaggttaagaacaactagcaataatctttcatcttcctatgaagatggagtgtcttcctatctgtgggctttttaacatttatttctgtagtcagaattgctcttcttcatgtaactcatacacattttgttaaaattatgataaaatagttctttgacataaatgtaagtgatagtgtggttttcatttcaaatttcactttcttcattgctgctctaagaaagtagcaggcttttgcgtattgccataactgtggctctgagctcttgaggggtcagttcttgggatttactcgatggataatcacatcactggcaaacagtgatttcccctcctttctccagttgtgcactttctatttcatgccttcaggccgcccatcatggtgatgagtaggactgttattaggtttttgttgttttttaaacatgttcttcatcatgttgaagttttcctctttctacttctgtatgtttttaaatcatgggtggatgcttgatttatgctgggttttgtcaaatggttttccttgcatttgtggatataaccgtatgaattggttttaaaatatctttaaggttcttttttacacatttattttgtttgcttactgatttaatgtgtaggtgtgtgtatgtgtatgccacagtacatgtgtggaggtcagaggacactttgtaaacttgcttctccttccagtgtcagttgcagagattttactcagattgctaagaacggtggcaagtgtatttacctgttgagctgtctatccttctattggctaatttttgattccacatcaattataataaagaagtagcttatgaaaatatgtatttctcaagatcaggtcaccctagacagctagtttggaagtcagtagcatagagtggaagcttagaaggcagaggtcagctatgagtgctaggttttagttgatgggaggaggagcagaaaggggaagccagccaataagaacaccaacttacatcactttgcttttttaaaaaaataggaaatggaccttcaggaatatgcctttcatatatgctgtcaggctacagaccgtatttatcatcggaagcaatacatccaaatacaatcttacatagtaaactagaagaagcaagacatctgtccattgtggatcaggtattctttgttacatgttttataaaacattttaatgctgaaacgattaactttatttatgtatttctttgttgtaaatccttcatcctaaataatgtatttagttttataaatacattgtgatgtcgtattaaactatattgaagttttgagcaaaaatttctagtttcctagtggagctttaaacaattttatatggctttgagtgcatgttgatatgagaacatgagtgtgcatgtgtgtaggctgcacgttaacttgagtgttgtttctcaggaactgtccatgatggttttttaaatgaggtttctcgtaggtaggccttaatctcccctcggctaggctgcctagccagtgatctggagaagtcctcccatgtcccctccacgttgctgtgattataggcatggcttttgaaatgtggttctagcgatgagactcgggtcgtcatgcttgtgaggaaagcaggctgctgactgagccgtctatgcagccctactgggagggcttagtgtgtgctctatgctgaaatccagttgggaagttctactttttacagcccagttgacatttgtatgccaaaggcatcttcaacacctataagggtttttatttaaaaaacaaaaagccttttttttagatccaaactttgcctacatttattttgctgaggaatatagtatgtatgaactcaaggaaaatacatgttctctaactagctcttagaagctactgagttgccatgtccttcatcaacctagttgtcttgttttttttctaactcacatttatttttcctttgcttcaggacttagaatacctgtctgagggtcttgaggggcgatcgtccaatccagtggcagtcctttttgacacccttcttcacccagatgctgacttcggatatgagtctccatccattctgcactggaaattggaacaacatcattatatccctcacttagttcttggtaagggcccgcctggtggggcatggcatgtaagtatatatttgcattttagtgtatattaagggatttattacatattgctctaataaaaccaacttgatttttgttttgttttgttttcaagataggacttctctacataacccttgctgtcctagatttcactttatagatcaggctggcctcaaactcagagttccacctgcctctggtcctaggtttgagattaaaggcatatgctaccatgtgggcttccagcttgattctactttttttttggggagggcggagggggggacgatgacaaggggttttgcttgtttagttttcaaggcagtgcttctctgtatattgactgtgcaagaaactcattttgtagaccagtctggccttgatttcagagttccatctaccttgccttaagtgctggtactaaaggtgtgcaccaacatgaacattttatttctgtgttttgttaagcatacattaactataggtagttaaggcagatttttattaatgttgtagtctttgaataagcatatctatactaacctatacaaattgtatagaaaaaaaagagaacacttttcatagtcaataaaatttcaataatttaaagcttagagaagtctcgcagggtattttgaaaatcagtatcttatttccatgtattttctttctctttatttaatagatgtatttgtatcttttccctgtgtataagtgttgtgtgcatgtatgtcagtgcactgtgtggatgcttggtgcctacagcaattagaagagggctacttgagatgctctgaactggtattactgattgttgtgagctgccatggaggtgctgggaatcaaaccctgctcctctagacgagtctgtgctctgaaccactgagccatgtctccagcccgtatttccatgtatttttaagattttaaagaaaaaaaatattgtaaataaaaggtttaatttgaacaaaagacatgtctccctgattcagagcctgtaaagtctacgtttgaacttcatttaatgactgtttagtgtctgtagcagcaaagagacacatgaccaaggcaattctataaaagaaagcattaattgagggcttgcttacagtttcggcggtttcctacattattatcatggtgaggagcgtggtggcattcagggaggcagagtgcagaggaaaagctgagatctacatccatgcacaggaggcaggaagagagagagagagtgagtgacagtggcccagcaagggctttaaaacctccagcctactctcagctacgtacctcccccaaggccacatatcccaatccttcccaatagttaaaaccactgctgactaaggatgtgtatgagcctatggggccattctcattcacactcacacagttttctttcctacacgtaaccgttcgccctgtgctgctgcgcttgccctgcaaaccttgctgtttgctgaagatgcgatgaaatcttccagcagtgaacagtatatgaaaatctgcttgtagagctgcctagcagggaaacttgtttatgcttagtacacacacacacacacacacactagttttttaaagtcccggctgttctggaactccctctgtagacccagctagccttgataggtatatttttaatctcctaggctggccctaaactccaagtgtaacaaatacgacttttaacttctgctcttcctacctttacctcccagatgttggaatttcagatgtgtcccactatgcctaattcatgaggccctagggacaaagctctgcatgctaagcaagtatgctgtcaaccagactagagccccaatcccttcagagattgtgtgtatgtgcgtgtatacaagcaagtgttgtgatgtgtggtgtgtgtgtgtgtgtaagagtaagcatctgtgtctcaagaacactattattcaccatatatcacatccttaggataaaactatcatcatcgcagactcacagtattgcctaaggcttggggatgcaaatacaatctgattcagtggaagattctaaaggcttggagatagtctaagaagctgtgggagacttgacatttttagaaatgtgcaaccttggagtagcccagacttacagagtacatcatttcttacccagggtttagtttctttgaattcctgaatgaaactgatgatgttgtttgatattaatctgtcacatcggtttttattttgcctggaatagtttcccttcctaatgacacactcctcaaaacccacttgcatctttgaagaagtaccatttcacatacacttggacaatacttgtgtcacatctacccctttctgaatactgctgtcccagtgacagcatgcttaatagatcacatggtcaaggcaagactggcatatatgacaccacgtgttaaaaaatggcataggtaaatgtactcatttcttactcagagatgcatgggaccctgcctgaaaagtcttgtcagtgagtgaatgaaaactactataatgtacccgttctcagtgctgggctgtgtagaacagggcaagctgtgacaacaggggccttgtctagagcgctgctgagattgctggggatgacgtaggccctggcacttagctcttctctctgttttgagggaagcaggagtagcttgaggggcttatttccttgacggtaacattaaccccaatgctgagtctgtttctcaggcaaccactgcttattttctatttttagaaagtgattatgttgtatttagcctagtccagatttcagaattataattgatagagaaaagctgttttccaatttttaaaaaatctgtaaggaaaaaaaaaaaaaaaccgaaacagcaaaaaagccaccatattgaaaaaaacccaaaattttggaaattagtgaacatttttcttttctttaagaaataaaaatgctgatgtgttcgttaacatgtagatcttaattatagatcagaggccaaaactagtgctgtgatttgtctcaaacatgtataactgttagtcatttcagacggtgaaatacatgaaagttttattagtatagaatttcagaggaaatacactgcaaatgagagaacggcagatgcttgtatttctgaagatggggtaactcacttagtaggtaggattacctctgggtgcatctattttcctgttgtgtgattgttattctttatacctgaaaccaaaatccatagtttatataccactgtttctcttggactcttgtgaacatgttttatataatccaaatctgtatataagtaagatgtgcttgctttcaaaaggtaatactgcttcattgtgcttttttcaactgttttaaactagaatatggaaggttctatgttgacaatcagctttggaaattggatggagcttcctggacttcaatttaaagactggatatctagcaaacgaaggtaaagatctatctctattaaagttcttggacgtatgaaaaagggactgttgagaaatgttcacagtatctgcgaatcctgtattacacaaatagaaatacacttgctaaataaaactcatgtgaagcagtgattatgagctagtttccatgtaggatgctataaagctgtgtgtacataaaggactgtttgtagggccttcctgtttatattaacttattaaacaggatttatatttaatattaaattagttactttctcatctacctatgcattatttcccaaatgtgtcagtttttcaatgaggttgtgactttatttacttatactatgtatactaagtgtatatatgcctaagaaggttggttgattgtttgtttgtttgtttgtttgtttgtttggttttgtttgatttgggttggtttagttttggctttttttttttttttttttttttttgacagagactctttacatagccttggcagctctagaactcactgtgaagatcaggctggccttgaactcacagagatctgtctgcctctgccaggattaaatctgctggaattaaaggtgcataccaccacacccaacacagtggttatttttgaagggtaataatacacttattatgatttgtcacttagaatgataaactaaaacatgggcttgctaccatggacatgaaggtcaatatttaattattagtaccttaagtaggactgagtaatttctcattggaagaatacaggtcttattttgggggaaggtatataaagttcaaaaggagaaatgtaaaaatccctatcattttcaggttcatgtacaaaccagatttgaataactaatacagagaatctaattttaccactaatggcagtatgtcaaagcaggaacttaatctttgttagaatagagatggagtttgtgtaattgacatcatgctaggtagcaaccatgcttaatccatagaagtttcccttaattttaaaagatttaagaacatcagtcttagatctagatcatcctggtggtgtgcacagttaatcccagcatttaggagatagaggcaggcaggtggagctctgacgattcatttatttctattttatgtgcattggtgttttatctacctatgtcggtgtgagggtgtcctcctggaactagagttatggacagttgtgaactgtcatgtaatgcagagtcttctggactctgagcatcagtactccactgctaagccatttcttcagccccaaatcttccttccttctgtcttactctttcttattctcgttccttttttctcttctcttttcttctcttttcttctcttttcttctcttttcttctcttttcttctcttctcttctcttctcttctcttctcttctcttctcttctcttctcttctcttctcttctctcccttctcctttctttctttctttctttctttctttccttctttctttctttctttctttctttcttatattttgttttgttttgttttgttttgttttgtttgtttttgagacagagtttctctgtagtcctagctgacttggaacttactctgtacaccaggctggccttgaactcacagagctctgcctgcctctgcctcctgagtgctaggattaaggtgtacactagcaccaccgtgcacttgctgcttttacagaggacccaggttcagttccccacacatggtgggtggctcacgaccacccattattccagtcacagggaatgcaaaacccttctcagatgctcatttgcatcagacctgtgtgtgctacacatagatccaccaggagaaagactcatacatgtataataagtaagtgcaaccaaaagctaaatcttgaaacatgaagaggtggaagattaaagttgcacaatccgtcacattgcttgagttcatttggtaagcaagcaaaatagttcagcatattcttggatttgttaaagggaaaggttttccttgtttttttttttttgttttttgttttgttttttttttactaaaaagaagcatagatctttttaagttaaccagaggattaaggatgatatgtgccttaagtgttgattgttgagtcacatgtccagcccctgaatagtaatctgttaatgatgtcatttaagtcattagttgtaagagaaaatagttgtctgattttcaaatgtctacattttaacccatttattaattgaaaatttatcaagcagccccctaatcacatgtttttgatcccctaaagagttttgtttcttctcatttatacattcatacatgattttatgaacttatactcatttaaaatctagcagctataaatgagagaaaacatttgttcttttcagattggtcaaattcacttaatatggttctctctggcacatccattttcctgttgcatgactttactcatgtnnnnnnnnnnnnnnnnnnnnnnnnnnnnnnnnnnnnnnnnnnnnnnnnnnnnnnnnnnnnnnnnnnnnnnnnnnnnnnnnnnnnnnnnnnntcctgttgcatgactttactcatgtctggggagggagagccagtgtttttctacgctgtgttttctttccctggacactgaacttggttccagagcttggctgttgagtagtgctgtagtaagtattgctgtgccagtgtctgtgttatgttgacttgagaccctttgggtaaatacccatgcatagtaaaacggtatcatagaagagctggtgttcaggttttgaggactctccacacagatctgcgatgtgacaagaccagtttgaattctttacagcaatgctcccctttacccacatccttagtagcatttgttatgtgctttgctaatgactgccagtctgattaggataagaaagcataaaaataatttttataaaacatgaggataatttttaactaacacaattgtggaaaaacctaagatataaaagcctaccagatgaaaaagtaatgaagtacttctcatagggtatttttccttttcatattacaggaacttaaagggggaccgtgtcatgccggaggaaatagctcgctactacaagcactacgtaaaggtcatgggccttcagaagaattttcgagagaatacttacataacctctgtatcaagactctatagagaccaaggtgataacggtagtcaagacagagatatttccacaaagcatttacagaaccagaagtcaaaatttatcaagagaaactgggaaatcagaggctatcagcgaatagcaggtggttctcatgttcccttttgcctctttgctgagaatgtagctcttgcaactggaactttggattctcctgcccatctggaagttgaaggggaagagtttccgtttgtgtttcattcgatgcctgagtttggagctgctataaacaaaggaaagctgtgtggcagagtggacccagtgctgattgtaggttccggccttactgccgctgatgcagtgctctgtgcctataacaataatatccctgtgatccacgtgtttcgcagacgagtaactgatccaagcttaattttcaaacagcttcccaaaaagctgtatcctgagtaccacaaagtctaccatatgatgtgtagtcagtcctactctgcagactcaggtcctctgtctgattataccagctttcctgagcaccgtgtgctttcctttaaggcagacatgaaatgcattcttcaaagtgtctctggattgaagaaaatatttaagctgtctgcagctgtaatcttgataggttctcatcctaacctatcttttctaaaggaacaagggtgttacctaggccgtaactcaagccagccaataacatgcaagggtaaccctgtggaggttgatgcatacacctatgaatgtgttaaagaagccaatctttttgctttgggccctttggttggagataatttcgttcgattcttaaagggaggggcattgggtgttactcgctgtttggctacaagacagaagaaaaagcagcatttgtttgttcaaagaggaggaggagatggggtagcttaaagttcacaaggaatttaaatggacactttactattaaagagttttttaacagtggtttgcagtgtattggcttgaattaactgggagagcctccagctgtcactcttcaagttagcaaagcttggtatcccaagttgtattcaagtgtgtcaaaggtgtcactctcagataaacccaaacactgccaacttggtataatttatgctttcatttaactagaacattcttttctaacttggcatttataaagccagttattcagacagaaatcatacttaattcatactgggtcaccttactgctcgagatggtccaagggacaagagcataagcttcctctgtagctcattaggcatttagacttaactcctcttgcacagatctccaagggttatgcgtgtagtccctgacgtttgaagtacactctctaaatgaaaatgggctataaatatgtttgagtaggataggaggaagcatttgcaactcaggttttatttattttgaaactatcagttatataaacctaatttattatcaaatatgatggtcattaaaaatatttttacaagttgagattttgacagataggtacttgatatctttaacttctcataatttaatatttcaataatgctgacatccaagaacccactaagatactttttagagatttattctgtttagccatcataacagctaatgaatctgatttgtaattcaataaattgtggatggaactacttacccttgtgtgaacactgagttaatttctattaatgaaacatgatttggggcacggttactgtttgggtattggcagaattattaaaggttaatgtggaaaatcagattgtgccctttcccattctcaaagtgattattttgagatctgtaacagtgttcattcataggaaatgataccatagcccacagtggttattagatttatctcctctaatagtctcaattgcatttccatagaaactgtgaaatgtgttactgctaaacaaagtcttccagggttcttgggaaattaaatttttcaaagtttttttcccttggtggtgcgggtggggtggggtggggtgtataattttatctggaatgcgctcactgaacttctgtttgcagtaccttaaatggacaacctgctgttgagtgttgtgttagcttagatgctgagtggtcatggctcaccgccagtgctgtttagtctgctgatagctagcacacctcctggttactcctgacaaccattaaccgttctatacctgtcacatctacttctagccctttataaaaatgtaactactctctgagtgactacacacccttttaaaatgacacgtgtctgaccatacttgagcagtctcctccttgcccgggcttgagctctgggttggactgatgcttttctttaatgtctcttataaattgaaaatagcagtatcattaatgtaatttctggggtaaaataatgctggctggcattcctttatatttaaggagattgttttatatttcattgcagttgttgggaaggggatgaacttaatacattttaagaataagatgccatagtccttaaataaacctggtacacgaaccactctcaaactctagcttctcccagctccttcagtactggttgtccagtagggtaccacattcaagcattagctctcatgcactatcctcttgccaattaattctgggccaaaagtccatttactttttagtattagacttctttttcatgaactaagtacatcctctagcatgtgagcacctcctccttatggtgaggaaagaccatacttaaaattgttgaaagaatcctcaaaatttctgatggggattaaaaacaaacaatagaataaatacacaaggtcaccacagccaggagaaatgccttgtaacccctaatatgtacacaggtagtactttagtatgaatgaacatgggaatattagtattgtgaaaaagatttaaggtatgaatgtcttagttatattactattgctataaggaaacattgtgaccaagggaatttacagaagcaaggatgcatttgggtattccagagcaatgagcccatcactatcatggtggggaacatgacagcaggcaggcaagcaggcgtggcactgacgcagcagctgggggtgcacatcttgatccacaaacaggaagcagagagaactcgaaagtgatgcatactcttaaaacatcagtcatatggtaaaaccacacctaattctcccaaacagcctccaattggggaaccaaatattcaaatatctaagacttgggtcaggtggggaagaatctcattcaaaccaccatgatggagcagttaataggaaatgatgtaatcttctaaatttattttcaaaaaggaagttcttttaactccttattgtgaactagactcagattgaaaacatgagactgcacttagcctttacattgaaggggcgtaaacctaatgagatgtgtttacatgaaaacgaaggaagttttacaaaaagtatttaaaatctgactgttaagaagaaaacacttaaaatcaaaatatgaattaaagctcaaataataagatagttggtatacttttataaggcattaaaaacagtatacattaagtgttgttattaaagtgggttgttacatattttaacattagctaaaaactgataaagctacaaaaccaattcaggagctaaaatgaataagaaaaggctgaaaaggtgaggaaaaactgaatagcacacagctgtcaacagcaatacagactgagagtttcaggtactaatattggtcttaaatgatctatagtggctagagcaaatttgtccctgagtataaaaaagcaaatagtgaaaatcacttaattaatagaaaatgaagtggccttcaaaatcttaaggcttgacatgttcctagccagccagacaagaacaaagctctaataatgagaatggaaaaggagatagcagtataacagaaatgcagaacttaatatgaaagcacaagagatggataaaatccttgaaagagacaaactaacaaagctgctacaagaaatgaaaagtctgaatagccatgttcaaacataacatgtttgggttcaggagttgccccacaaaccactcaaacacctgtcttagacagggatagtgtattgaatgcacacccccaaggctgattgattagggacatagctcagactttgagaattgaaggtagaaccctgaacatttctcagggctagcctataaaggctaaaccacaaaacccacaatgagctcatatgaaggggctggaatcactgtccagctgtgactcaagttattttagacacaacagttcatactgacctttaagtgacgcttatggtagtggaatttctgaagacttaacaaacctcatacagaacataagagggaatgcagtcagcaccgccctgctctgagtcctcaacattattttaatggtcaatcaatttaatagggtgagagaaaaggcaaaccaactagaagacaacatctattcacaaataatgtatgtgtaaaaatccaaacaatctcacctcttttagttagaacataccaagaaacaaggtaactatttgctgggtctttatgagacactgtgtgtgtccctttacaattatatgtaagtgtctggatcagctactctctacctttgaccagacctcagaacatactacttcactttatagagtcataaatacgggcttttattttattctcatccttcattacactttcaaattcttcgtttgtgaaacagtgagcatatgtctaaagcattgctcttcctcgacacaaggaaggaataggcactaaaggtctctagtttcagttccagtggttttgttacaattccatgtatgggcaggagagatggcccagagatgaagagcatttactgtggtgctggaaagaatctaagactctgcacattaggcaaccactctaccaactgaactacatccccagcccaaactttgaaattttgataaagtcgcatttacctatttcctttgatatttttcctgtcgcatacatacacaaaaatagtatttaactccaagacttggggttattccataaggttacattttaatatttccataaatactattataagtcccttaactttgagtatgatgtaatgtatgggtcaggggtaggtaggtttttctcatatgaacctcaaacagtgtttatttgaagaagacttttctacattaaattatcttggcaacttcatcacacgtgaattattatgtttacccatcctgtcactagactactctttcttgattcaatttacatggaccagaaagctttcagttcataataaaaggtttatttacatactttctagaatataagattcaatatacagctggagttgatatctacttctctatattaaaatatctgaaaaaatctatttccagttaccattttcctttttaggtagaggcaacctactgcctctactttatagacagaaatacttgggacatttaagaagccaagacagagtcactgtgctcagtaaaaccaccaaaaaggggtccatctttctctttggtatgatctagtcagtgtgaaggctgcatactacctcaatctcttatactaagatgggggacatatgctcacggacaccactgcactgggatcacatcagcttagggaggctaaagaataatggaagagaaaaacttacattgatatgccgagcattcaatctacagtgaaaatgaacaaggcacagagtaattacaaatgtaattcctgaaaagtgttatgcacaggaatttgaatgagggctggagagatggctcagagggtaaaagcactagctgttgttcttctagagggcctgaattcaattcccagcaaccacatggtggcttacagccacctatttgagctggtgccctcttctggtgtgtaagcatgcatgcacagagaactgtatatatattaataaagaaataactcttaaaaaagatgtatatggtacatctatatctgtatttatatatatatatacatatatataaatatatgtatatctctatctgtctgtctatctatctatctatctatctatctatctatctatctatctatctatcgatctacctatccataacacagcaggaatcaatcagctagtggatgggaggctttggtctttaaccttaatggagtttcaggattttggatactatgattctaagaattacttagtaagtaagaaacacatttaaaatgaggggataattataatgtatatattcccccagagacaacgttaccacacaaaaggaatagagtttgtttcctttatttaataaactgaaaccttaaagcatttataatttctatgtactatattaatgtatctcagttggtctgaagtagaaatgtgtttctacagcttcctttacaaggttcaattatcttctttttacattaggattatatctgcaaagaaaagaaatcgttaaaggacatttcagtagagatcccataatgggctgtcaacctgcagtcttcactttagcagacacattaaaactaaaacagtaatataagagcttagtgtggatttcaatagatcccatctaaacatttccccaaaatgaagtatgtgctttgcacaaaaagcttagtggctccaaaatataattactgctttataagattttctcctatagaacttcggcagccagatgtctcattgatttttcttgtactcataaaaattcagtatcgtcaccattcttaccagttactttacactatctactgtcaatacaattgtcaaactggctgcaaacatattggggtgagggagtggtggtggcaagatggctcagcaggtaaaagtccctgctgctgagcctgatgacctgaggtcagtccccatgacccacatggcaggagaaaacgaactcctgaaagttgtcttctcaactccacacactcactatggcaagcatacttcaacacacacatgcacaaatgcaggtatagataaatatgtgcacacacacacaataaatgtgtttaaaaaaaagattaaggcatcctgtattttaggttgagaaagaagggtgctctgtttcagctagtgtccacctgatatggtagttctttagtatttgagaggtaaccattccaaagtttattgggtttctagaagtctcaaaatatattaaattataaattcttaacaactttctaaagcctgacataaagcaagcaaaaccagttttggatctctcatccaatctttcattttatccatttgtcaaattaaaactagacaaatggtctggactcttaattgtctgattttgaaatccgttcctttaattctcctataacaaaaacctcacagattgataatcgaaatacttttggaaccttcccttgcctgaaggatatcaggcaaaatttaaacatgtcatgataagactgaatcaactgtaaatctatagccaggaaatttcatcaatgtgttcaagtaataaaaatacatgagttaaaagtcaaactttctttatgtgaaagtactgtgtgtctcctatgtggacagaagaaacaaatatttgactgtcatgaacataactgaactatatctacatttctcaaatggccttgggagaaaagtaaaatcttacctaaacagatcatcagcaagagattcctcctttgcttgttgtttctgtacctgtcaaagttaacataatgtggctcatttactcagcagcaaacacctccagatttccacacacaagcttgtcactcgtcagcaagtgttcttctgtagtcttcccattcagccaacctctctattttcacttcatgctaaaatcactgcacgactgtagttaagtaactgtctagccaatttcaaagacaatcaacacagatagctaggttactgagtttctaaacagtctttttagcagaaagttcagtgttctgggctcaaggacgacgatggaatatgggcttcattgaaactggttcagtgagtgaggctgcatgctgacaagcatgatgcgctgagttccatacccacgtctgtatgactccaaaagtctgacctctggcctccaggcacatacgatagtatggaagtgcatgcatacacacacagaaacatgcaaaaccacaaaattaaactttttaattagggatttaaagagagacttgtctaacttgctctgagtcatagtcgttccagtgaccgtgagttgagagtgcaagaatcacatcatcaacagtcaaagcagcgtgacaggcgagcaatctcccttcctcttgctaaatcaggacggaggagtttttggccacaataattttcacaaggcctcaccaagctcctaacgcaccagagttagatcagggaaaagcccctgctgcaggctcctttctcaaacgactgcccagtctgaccctcaaatgtgcaaaccctaaatctggctcttggtgtgctggcctcctaaccacctcgtgccccctcatggaccctgtgtgcttgctttcttagtcagaacagaaggacaaacagactcttcccctaaatatgaaaatctgagtggttttgttcctatttctcctctgcctagaaagacaccctccatttgttttccacatgtagtcacggtcaaagccaacttcttgagtatttacttagtgtctactacacaatgaggaccacattccagtcaggtagcacagcgttagattttgtctgactcacagaagtgacaacatcaccagaaactttaagaactggcccagtgattgggaaaattaagggtttgcagcatgagtagaaggtcagacacagaacaaagtccagatgacggacaggaggtagtggggataagcctagggcaagatgtcactgtgtggtgtgctcaggtgtgtgtgcatcagctgtatacacgccgaaaccactgtggcaacaaaccaagcatttggcggcatgcacccagcattcacgaagcacctctctaactcccagggaaagcaactgaagatggaaaaggccaacagctgcaccgtcatttaactcctcccaagcatccaaggagcattggtgtgtgtttggtgcagctcccttctccttggtgtactggctggttttatgtgtcaacttgacacaggctggagttatcacagagaaaggagcttcagttggggaagtgcctccataagatccagctgtggggcattttctctgttggtgatcaagcggggagggcccactgtgagtggtgccattcctgggctggtagtcctaagttctataagcaagcaagctgagcaagccaggggaaacaagccagtaaagtaacatccctccatggcctctgcatcagctcctgcctcaggtcactaaagtcacttaagtttccttttaagatgaatttacttgggaccagggagatggctctgtggatgaagggcatgctgtgcaagtatgctagcgtgagagccctggcacccacgtaagagctgggtacacacagtcatctttgcactaggggaaagataggtaggggacagctgagcagcagctggcactccagattcagtgagagaccctgtctcagaaataaacaaatacatacaaaaaagggtaataataaaggctcttgaaatcaacctctgtgcacaggcaccccctcactcactctcacacatgcatatgtatctcccacactgacgagtcacaaaggctaaagtgcaatcccgcgtgtgggggcctccctttctacttacctccatttcctgtttcaaccattcttctaactcggtattctttcgagcatggtggcctactaagtctgatcctccgatgatgtgtggaagctttcctgccccaggaaatgtcgcctgcaaaagaggaagcagtgtgggtaagcatattcacaaagtcagatagctattttttttaaaaagaaataagatacaaacagtggaagttgtgcataaacgtctaaggtgtgtatattctgttaccgaaaaggagacacagacgcctgcgccacacccgtgcattttcacccttttctgctactactgtatctaggactagatatgccattaggactttcacatgaatgaaaaacacgttttaattgtaggttttatttatttttttttaatttttgttttgtattgttgttttgttttgttttgttttgagacagagtttctctgtgtagccctggctgtcctggaactcactctgtagaccaggctggcctcgaactcagaaatctgcctaactctgcctcccaagtgctgggattcaatgcgtgcaccatcactgcctgtaggttttatttttaaattactttaattcattacctagcaatcaaagcaacccaaagaaaacaaactatagtttaaaacactgtactacttattctaagtttttcaaagtttaacctataatcccagcacttgaaaggctggggcaagaagataacacagttcaaagcaagcctgggtacatatcacgttccaggcaacctcacacttcatgtaagactatcattaaaaaaaaaaatagggctggttctgggagtaaaggtgcctgccatcaagtctgtcaacccgagttcaattctcatgactcatatagtggaagaagagacatacctctcacatgttgtcttgtgacctccagacacatatgctgtggcatgtgcgtacccttacatagaaaataagtaagcaagcaaacaaaaaaataaccctacataaatgtttttaaataaaatgagaaacagtgtcagaactactgcccagccggcagtgtctgcttagcatgcgtgaagggctgagttagatcccagcatgggatggtgcattcctggaaccccaatactcaggattgggtggggaaaggagcatcaaagttccaggtataagtgtgtaaatgtgtctgagcatgtgtgtacacatgtgcacatgctcatgtattattattttaatgaaattactttacttagggtaaaaatgttccccccaagagccatacagtaacaaaaaccccagtacagacatgagaaatctccttttgagtggttggtcagaggaatccaagcaattcccaaaataatatggactgttgccatagcccttgcttgcctcccagaagctgaagcaagtccttattgctgaaaacagagtttctctgtgtagccctggcttgtcctggaactcactttgtagaccaggctggcctcgaactcagaaatctgcctaactctgcctcccaagtgctgggattcacttgagttggaagaatcaagctggatttgacctggaagcctcctttctgaaaactagctatcacagtcccaagtaggagcgccactgaacagactcagtaggttctacttatttattaatttctgtgtggataacaataataacgaaagaaaaagaggctttgacaaggagtgggaaaaagtggaaggacttgggggagtaaaaggaagggggaagtgacataaatacagagcacacatcaggtctgacagtgacagagggaagtgatgtgatacagtgcacacatcaggtcctacagtgacagagtacacagtttcacttatactatcccaaccatgaaacttcactactgactctgactatttctttaactctcttatcttcataaagtcctgaggtgaagaacgatttcaggtcgtcacagagcaacattagaacccgtgtgactctgtccttagtaataaagc

SEQ ID NO: 710 - DNA, 2672 bp, Mus musculus
cgcccggtcccgcccccagcgcggcgctcatcactcgctgcgccgccctgccgccggcggggaggagcggaagccgctggccggggacagactcccgcgcctgtgagccgcggtgcaggcagagcgcgcgccgggaccagcccgcggtcggccctcccggaggacggcagccgctctccatgcctgtgtggtgctgccgctgctccctggccggtcatttcagaaactatagtgacactgaaactgaaggagagatttttaattcttttgtgcaatattttggtgacaatttggggccaaaagttaaagggatgccattagttgaagaaacgtctttacttgaagattcatcagtgactttgcctatggtaataattggaaatggaccttcaggaatatgcctttcatatatgctgtcaggctacagaccgtatttatcatcggaagcaatacatccaaatacaatcttacatagtaaactagaagaagcaagacatctgtccattgtggatcaggacttagaatacctgtctgagggtcttgaggggcgatcgtccaatccagtggcagtcctttttgacacccttcttcacccagatgctgacttcggatatgagtctccatccattctgcactggaaattggaacaacatcattatatccctcacttagttcttggtaagggcccgcctggtggggcatggcataatatggaaggttctatgttgacaatcagctttggaaattggatggagcttcctggacttcaatttaaagactggatatctagcaaacgaaggaacttaaagggggaccgtgtcatgccggaggaaatagctcgctactacaagcactacgtaaaggtcatgggccttcagaagaattttcgagagaatacttacataacctctgtatcaagactctatagagaccaaggtgataacggtagtcaagacagagatatttccacaaagcatttacagaaccagaagtcaaaatttatcaagagaaactgggaaatcagaggctatcagcgaatagcaggtggttctcatgttcccttttgcctctttgctgagaatgtagctcttgcaactggaactttggattctcctgcccatctggaagttgaaggggaagagtttccgtttgtgtttcattcgatgcctgagtttggagctgctataaacaaaggaaagctgtgtggcagagtggacccagtgctgattgtaggttccggccttactgccgctgatgcagtgctctgtgcctataacaataatatccctgtgatccacgtgtttcgcagacgagtaactgatccaagcttaattttcaaacagcttcccaaaaagctgtatcctgagtaccacaaagtctaccatatgatgtgtagtcagtcctactctgcagactcaggtcctctgtctgattataccagctttcctgagcaccgtgtgctttcctttaaggcagacatgaaatgcattcttcaaagtgtctctggattgaagaaaatatttaagctgtctgcagctgtaatcttgataggttctcatcctaacctatcttttctaaaggaacaagggtgttacctaggccgtaactcaagccagccaataacatgcaagggtaaccctgtggaggttgatgcatacacctatgaatgtgttaaagaagccaatctttttgctttgggccctttggttggagataatttcgttcgattcttaaagggaggggcattgggtgttactcgctgtttggctacaagacagaagaaaaagcagcatttgtttgttcaaagaggaggaggagatggggtagcttaaagttcacaaggaatttaaatggacactttactattaaagagttttttaacagtggtttgcagtgtattggcttgaattaactgggagagcctccagctgtcactcttcaagttagcaaagcttggtatcccaagttgtattcaagtgtgtcaaaggtgtcactctcagataaacccaaacactgccaacttggtataatttatgctttcatttaactagaacattcttttctaacttggcatttataaagccagttattcagacagaaatcatacttaattcatactgggtcaccttactgctcgagatggtccaagggacaagagcataagcttcctctgtagctcattaggcatttagacttaactcctcttgcacagatctccaagggttatgcgtgtagtccctgacgtttgaagtacactctctaaatgaaaatgggctataaatatgtttgagtaggataggaggaagcatttgcaactcaggttttatttattttgaaactatcagttatataaacctaatttattatcaaatatgatggtcattaaaaatatttttacaagttgagattttgacagataggtacttgatatctttaacttctcataatttaatatttcaataatgctgacatccaagaacccactaagatactttttagagatttattctgtttagccatcataacagctaatgaatctgatttgtaattcaataaattgtggatggaactacttacccttgtgtgaacactgagttaatttctattaatgaaacatgatttggggcacggttactgtttgggtattggcagaattattaaaggttaatgtg

SEQ ID NO: 711 - protein, 607 aa, Mus musculus
PGPAPSAALITRCAALPPAGRSGSRWPGTDSRACEPRCRQSARRDQPAVGPPGGRQPLSMPVWCCRCSLAGHFRNYSDTETEGEIFNSFVQYFGDNLGPKVKGMPLVEETSLLEDSSVTLPMVIIGNGPSGICLSYMLSGYRPYLSSEAIHPNTILHSKLEEARHLSIVDQDLEYLSEGLEGRSSNPVAVLFDTLLHPDADFGYESPSILHWKLEQHHYIPHLVLGKGPPGGAWHNMEGSMLTISFGNWMELPGLQFKDWISSKRRNLKGDRVMPEEIARYYKHYVKVMGLQKNFRENTYITSVSRLYRDQGDNGSQDRDISTKHLQNQKSKFIKRNWEIRGYQRIAGGSHVPFCLFAENVATGTLDSPAHLEVEGEEFPFVFHSMPEFGAAINKGKLCGRVDPVLIVGSGLTAADAVLCAYNNNIPVIHVFRRRVTDPSLIFKQLPKKLYPEYHKVYHMMCSQSYSADSGPLSDYTSFPEHRVLSFKADMKCILQSVSGLKKIFKLSAAVILIGSHPNLSFLKEQGCYLGRNSSQPITCKGNPVEVDAYTYECVKEANLFALGPLVGDNFVRFLKGGALGVTRCLATRQKKKQHLFVQRGGGDGVA

SEQ ID NO: 712 - DNA, 46026 bp, Homo sapiens
tttatatttaaataagaccccacctacaacttcaaaataaaaatatgaaaatattgatataacccatttgctgtaagaataatcctctatgcagtcattgtggcctgctttaatcacaagtcatcatgaagtgcaaaccacgacaacaagttcacaaggttaaatgcaaagctaagattaaggctaaaatttgatatgcctgctttattatttaacctgaaaatactgcaacaacactcaaaatgaaaacaaagacataaaagaacaatttatacaaagatcttgtaaacattctgtaagtgtcagatattatttaaattatctggattggggaggaggcagagcaagatggccaaatagaagcctccaccaatccttcttcctgcaggaacaccaaattgaacaacttgccatacagaaaagtactttcatgagaaacaaaaaccatgtgagtgatcacagtatgtgttttgaacttcatatcactgaaagaggccctgaaaagggtaggaaaaatagtcttgcattgccaacacaaccccttccccattccctggcagtggcccaatggtgccgagacagaacccgtgcacttggaggaggaagagtgcagtgattgtggaaactggcatgggaactcagtgctgccctgtaacagtggaaaccaccaccaggcagaactcaggcagcacccatgaagggatcatctggacctgccctagccagaggggactcgcccaccccagtgctcagaatgcattctggcagacctcataccacgggctaaagtgctctgcggtcctaaatagagctgaaaggtggtctaggccataaggactgccattcctgggcaagtcctggtgctgtgctgggtttggagtcagtggacatggggggcatgtgacctagtgagacaccagctagggtagccaattagagtgcttgcaccaccccttcccgtaaccccaggcagcagagctccaaagagacaccttccttctgcttgaggaaaggagagggaataataaagaggacattgtcttgcatctcggatacaagctcagccacaatagcaataggacaggcatcaggcagagtcctgaggcccccattccaagctctagctccaggatgacatttctagacataccgtaggccagaagggaacctgctgccttgaggggaaagacccagtcttggcaggattcatcacctgctgactaaagaacccttgggccctgaaaaatctgcagtggtaaccaggcagtacttgctgttggccttgggtgagacccagtgctgtactagcttcaagtgtgaccaagcatatttccaggtgtggtggctacaaggatagactattgcttgagaaaagcagaaagaagaataaaggaactctgtcttgcagcttaggtaccagctcagccacagtggggtagagcatcatgtgggctctcaggggtcccagattccaggccttgtctcttagatggcatttctggacctaccttgcgccagagaaaagtccagtgccctgatgaaaaagtcccaggcatggcagcatttaccaaattgactgaagagcccttgggccttgaacgaataacagcaggtagccagacagtacttgctgcatgcctggggtggtggtggccatgggaagagactcctatgcttgtgcaaagggaaggggagaatgggaagaactttgtctggtggcttgggtgccagctcagccacagtagaatagagtaccaggtagactcctaaggtttccagctccaggctctggctcctacatggcatctctgaatgcccccaggaccagggggatctttctaccctgaagggaaggatacagcctagctggctttgccacctgctgactgtagaggcctaggaccttgagtgaacccaagtggtagccaggcagtggttaccgtgggccatggacgagacccagtgctatgctggctttaggtctcacccagtgcagtaacagtggtagtagccacagaggagcttgtgcaacacctcctgcagctctaggcagctcagtggagagagaaagactccatttgtttaggagaaagtgagggaagagaacaagaggctctgcctggcaatccagataattctaccggatcttacccaagatcaccaaggcagtatctctttgagtctgcaagagcccatagtgttactgggcttggaacgccccctaatccagatacagctgcggtgggaaaaaaaattagatcacaatactcaagtgcttctgaataactgaaaagtcttcccaagaagcgtgagtacaaacaagcccagactgcaaagactacaataaatacctaactcttcaatgtccagacactgacaaacatccacaagcatcaagaccacccaggaaaacatgacctcatcaaatgaactaaatgaggcaccagtgaaaaatccctgttccacaaagacagacatattgcgacctttcaaaaagaattcaaaataggtgttttgagaaatctcaaagaaattcaagataacacagagaagacatagagaaggaattcaaaatcctatcagataaatataacagagactaaaataagtaaaagaaatgaagcagaaattctggagctcaaaaatgcaactgacatactgaagacagcagagccatttaacatcagaactgatcaagcagaattagtgagctttgaagacaggctatttgaaaatacacaatcagaggagacaaaggaaaaaagaataaaaaacaatgaagcacacctacaagatctagaaaacagcctcaaaagagcaaatctgagagttattagccttagggagtaggtagagagagaaataggcatagaaagtttattcaaaggttgtgcaggatctgcattttatgccaaagaaaaaaaaagtttattcaaagggataataacatagaacttcccaaacccagggataataacatagaacttcccaaacccaaacttagagaaagatgtcaatatccaagtacaagaaggctacagaacacccagcagaattaacccaaagaagaactacctcaaagcatttaataatcaaactcccgaaggtcaaggataaggaaaggatcccaaaagtagcaagagaaaacaaacgaataacatacaatggagctcccatatgtctggcagcaaacttttcagtggttaccttccaggccaggagagagtggcatgacacatttaaagtgctgaaggaaaaaaaatttctaccctagaatagtatatctagcataaatatccttcaaagatgaagaagaaataaagaccttcacaggcaaacaaagctgagggattttatcaacaccagacctgtcttataggaaatgctaaatggagttcttcaatctgaaagaaaaggatgctaatgagcaataagaaatcatttgaaggtacaaaactaactggtaatagtaagcacacagaaaacacagactatcatagcactgtaattatggtgtataaactactaatatcttatgtagaaagaataaaagatgatccagtcaaaaaaaataattacaataacttttcaagacatagataatacaacaagatatgaatagaaatgaaaaagttaaaaagcagggagactgaattaaagggtagagtttttattagttttctttttgcttgcttgtttgtttatgcaatcagtgttaagttgtcataagttcaaaataatgggtaataagatgttatttgcaagcctcatggtaatctcaaatcaaaaaacatacaatggacacacaaaaaaacaaaaagcaagaaattaaaacataccactagagaaaatcaccttcactaaaaggaagacaggaaggaaggaaagaaggaagagaagaccacaaaggaaccagaaaacaataaaatggcaggagtgagaccttacttgacaatagtaacattgaatgtaaaaggactaaaatctccaatccaaagacatacagggctgaatggataaaaacaagacacaacaatctgttgcctactagaaacatacttcacttataaagaaatacatagactgaaaataaaaggattcaaaaagatattccatgaaaatggaaaccagaaaagagcaggaatagatatacttatatcagccaaaatagatttgaagacaaaaactataaaaagagacaaaaaagctcattatataatgataaagaggtcaattcagcaagaggatataataattttaaatacatatcacccaacactggagcaacagatatctaaagcaaacattagcactaaagagagatggactccaataggataacagctggggacatctcaacactccactttcagcactgaatgaatcatccaaacagaaattccacaaagaaacgttggacttaatctgcatgatacaacaaatggacctaatagatatttacataacatttccttaaaacattcaaaaatgtaaagtataataatataaagtatcttctcagaccatagtggaatacaactagaaattaataacaggaggaatttttgaaactatacaaacacatggaaattaacaatatgctcctgaatgacaactgagtcaatgaagaaattaagatgaaaactggaactttttttgaaacacatgataatggaagctcaatataccaaaacctatggaatacagcaaaagcagtactaagaggaaagtttatagctatatactattatcaaaaaagtagaaaaacttcaaataaactaatgatttactttaaagaactagaaaagcaaaggcaaaccaactgcaaattagtagaagaaaagaaataataaagatcagagcagagatcaatggaattgaaacgaggaaaacaataaacaagatcaatgaaacaaaacgttggtttttgaaaagataaaattgacaaacctttagccagactgaggaaaaaagagagaagacccacataaataaaatcaaagacaaaaaaggagacattataactaatactgcagaaattcaaagcatcattagtggctactatgagcaactatatgccaataaattgaaaaatctagaagaaatgaataaattcctagacacatacaacctaccagaatttaaccatgaagaaatccaaaaactgagcagatcaataacaagtaatgagatcaaagccataataaaaaaatcttccagcaaagaaaagcctgggacccaatgacttcactgctgagttctgccaaacatttagagaagaactaataccaatcctactcaaactattctgaaaaacagaagaggagggaatatttgcaaactcactctatgaggccagtattacccggttaccaaaaccaggtagacacatcaaaataaataaatacataaaaataaaaaattaactgcaggccaatatcactgatgaatactgatgcaaaaatcctcaacagaatactagcaaagtgcattcaaaaacacattaaaaagatcattcatcatgactaagagggatttatctcagatgcaagaatgattcatcatatgcaaaacaatgtgatacatcatatcaacagaatgaaggacaaacaccatatgatctttttaattgatgctgaaaaagcatttgatgaaattcaacatcccttgatgataaaaaccctaaaaaaactgggtataaaactcaacataataaaatctatatacaatagatccacagctagtaagtatcatactgaatgaggaaaaatttaaagcctttcctctcatacctgggacatgacaaagatgcccactttcaccactgttattcaccatagtaccagaagttctagctagagcaatcagacaagagaaagaaataaagggcatccaaatcggaaacgaagaagtcaaattatccttttcagatgatgtgatcttatctttggaaaaacctaaagactccaccaaaaaactattagatctgataaacaaattcagtaaagttgcagatacaaaatcaacacataaaaatcagtagcagttctattgccgacagtgaacaatctgaaaaagaaatcaaggaagtaattccatttacaatacctagaaataaaattaattacccagaaattaaccaaagaagtgaaagatctctacagtgaaaactatacgaaattaatgaggacacaaaaaaatggaaaggtattccatgttcacagattggaagtatccatattgttaaaccgtccatatttcccaaagcaatctacagattaaatgcaatctctatcaaaatacctatgacattcttcacataaatagaaaaaaaaatcctaaaatttatatagaaccacaaaagactcagaatagccaaagctatcctgggtaaaaagaacaaaactggacgaatcacattaccaggcttcaaattatactacagagctatagcgaccaaaatgacatggtattggcataaaaacagacataaagaccagtggaagagggcccaggcacagtggctcatgcctgtaatgcaagcattttaggaggccgaggcgtgtggatcccttgatgtcagtttgagatcagcttggccaacatggtgaaaccctgtctctactaaaagtacaaaaattagctgggcatggtggctcacaccagtattcccagcactttgagcacttttggaaggccgaggcggcacttgaggccgggagttcgagacaagtctggccaacatggtgaaaccatgtctctactaaaaatactaaacttagtcaggcatggtggcacgcacttgtaatctcagctacttgagaggctgaggaagaagaatcgcttgaacccaagaggtggaggtaaaagtgggccgagatcttgccactgcactccagcctgggtgacagaggctgactccatttcaaaaaaaaaaaaaaacaatggaacagaatagagaacccagaaacaactccatatatctgcagtcattttcgacaaaggtgccaagaatacacattggagaaaggacggtctgtttaatgaatggtgctgggaaaactggatagccatatgcagaagaatgaaagtagacctctatctctcaccatacacacaaatcaaatcaaaacggattaaagacttaaatctaagatctgaaactatgaaactactaaaagaaaacattgaggaagctctccaggacattgggctgggcaaaagagttgctgagtaataccctgaaagcacaggcatccaaagcaaatatggataaatgtgaccacatcaagataaaaagcttctgcaccgcaaaggaaacaatcaacaaagagacaatccacagaatgggaataaaatatttgcaaactatccatctgacaagggattaataaccagtatatataaggagcatgaacaacttaataggaaaaattataataatctgagtttaaaaaggacaaaagggccaggcaccatggttcccacctgtaatcccagcactttgggaggccaaggcaggaggatcacttgaggccaggagttcaagaccagcctgggcaacatgggcaggctgtttttttgtagaaaccccatctctacaaaaaaaaaaaaaagaaaaaaaaattaaaagaaaatttagctaggtgtggtggtgcacacctctagtcccagctactcaggaggctgaagtggggggattacttgagcccaggagttcgaagcttcagtgagctagatcaaaccactgcattccagcctggatgacagagcaagaacctatctctcaaaaaaaaaaaaaatttaaaatgggcaaaagatgtgaatagacatttaccaaaagaaggcatacaaatgacaaataagtatatgaaaaggtgctcaacatcactcatcatcagagaaatgcaaatcaaaactacaatgagatatcatttcatcataattaaaatggcctatatccaaaagacaggcaataacaaatgctgatgaggatgtggagaaaagagaacccttgtacactgttggtgggaatgtaaattagtacagccactacggagaatagtttggatattcctcaaaaagctaaaaatagagctaccacatgatccagcaatgccactgataggtatataccccaaagaaaggaaatcagtatatcctaagatatacttgcactcccatgtttattgcagcactgttcacaacagccaagatttggaaacaacctaagtgtccatcaatagacaaataaagaaaatgtggtttatgtacacaacgtagtagcattcagccataaaaatgaatgagatcctgttattttcaacaaaatggatgcaactgatgtcactactttaagtgaaataggccaggtacagaatgacaaactctgcatgttctcacttatttgtgggagctaaaaattaaaacaacggaactaacagagaatagaatgatggttacaaggctgggcagggtagtggggaattaaggggcagagtggggatggttaataggtacaaaagtatagacagaattagatctagtatttgacagcacgagagtgactagtcaacgataattcattgaacattttaaaataactaagtataattagattgtttgtagcacaaagaaaggataaatatttgaggtgatggatactccatgtaccctgatgtgattattacttattgtatgcctgtatcaaaatctcatgtaccccataaatatatataccatgtactcacaaaaaataaaaattaaaaattaaaagaattatctggattggactggcatagctttcaggaatttatatgtttatttttaatttttttggttacatagtaggtgtatatatttaaaaatacggaacgcttcacgaatttgcgtgttatccttgggaaggggccatgctaatctttatattattctaattttagtatatgtgctgcagaattaagcactgcttttaggaatgtaggtactttatttatttatttttgagacggagtctcgctctgtcgcccaggctggagtgcagtggcgcgatcttagctcactgcaagctccgcctcccgggttcacgccattcaccatggtctcgatctcctgacctcgtgatctgcccgtctcggcctcccaaagtgctgggataacaagcgtgagccaccgcgcccggccaggtactttattattattttttgatacggagtctcactctttggcccaggctgagtgcagtggcgcgatctcagctcactgcaacctccgcctcccggtttcaagcgattctcctgcatcaggctcttgagtagctgggattacaggcgcgtgccaccacgcccggggctaggttttgtatttttagtagaaacgggtttcaccatgttggtcaggctggtctggaacttctgacctcaggtgatccgtccgcctcggccttccaaaaggaatttaggtactttaaaatgctgttatgtatgttaacggaaaagtaactacatgcttcattttcagaaccaacattcaaatgaaatgaacgtgtcaaatcgacaaaagctcaaaaaagagaaaaacatataatacttaaaagtggttaatatactcttagattgcataactctggggcagtctgagtcctatgattttcttttaagaccccaagactctaaaatacctgctcatcacaagtttgttcagtgacaacattcagtaaaacttaacatttgttttacaaaattatgttgaaagatataaacataaacgtatatttgaagcacaaaaataattacggctttttttggaagcggagttagacatttccgtagaaaagtagatgcaatcaatctctcctgatttttgtcctccccacctttaatttttgacaaaccgaataacgacactcactattgagtacttttctaactccctattgcatcacaaacgcccgcaggggcttaaaaagcagcaggggttcctgcccttccccacactggccggtgtggtctggggcgggcctgatgagcacctggattttcacccggcgtgctggtaattcctacacttgtgggtgtttgagagacatgaagaggggaggatgacctcttcccggaagcgggacttccataaaagaagcgtggtgggcgggtcccgggcacctgtggtttggtgagtcctccaggtaactgtgatgcgggggtcagcgggagaggcacccggaagctcccggcgtctgcaccccggcagcgcgaggaaatgcccaaaggtgggttctcaggcgtgggaagctcgacccttcccggggtcctcggcgaagtggccgaggccgcgccttacgcagggaactccgccgggccatctgggtggcccgagttcgcagcagcttctcttccgctcgtccctcggccctctcgacgcgcacccaccggcctcaccaagtcgcacgcagaggggcggcggggcgctgaccgaggtctaggtctcgattgccgccggtcgagccgcgcagtttgcctgcagacctcggtcccctgcccgcgcagcctcggctccatcaggcccggcccctcgcccgggccgtggctccaccaatcgcagacttcgcccgccgcagccgcacctgcgaggaggggcccgcgcgccgctgcagccgccgtcgcagcgtccccgccccgctccgcccctatcgcggcgccccgagatcacccgcctccggcgcctggctccctgcaggcgaggagcggaagccgctatctggaggcggactccggcgccacagagccggggcagccgcggcaacggcgaggcgcgaggcaggggcgcccggcagaccccgcgaccccgagccagcgggcgccccgagcgggcagcctcgccgggggaggcggaggcggccacggcggccgcgctcgggcgcccctcgcgcagcgctccatgcccgtgtggtgctgccgctgctccctggccggtcatttcaggtgacttcctcgccggggatgggaggggagcaggcggggatgccgcgctctcgagctttttggcctggcccgggccgggaccggggtggagggcgagcgcctggaccgcagcgtcctcccgcctcggccgtcctgcctggcgtgggggtggggtggggtgcggtgtggtggggtccttgctccggggagccctgcgctgttcccttttctcgctctggaccgcgcgggtcacgggactgcgggatcggctaggccggactgagtcggttacggcgagctgagacttcccagtagtgcaaagttttagtgaagggggttctacgaagtgcctgcctccctaaaaaaaaattatttcttaaaaagtcttctaaataatgtaatgagtggaaggaaggtagggaactacatttcagtgtcatctaatcacaaatagattctgccttgttaagatgttagccatggtaagacgtgtgtgttgtagaaatttaaagaatgaggcggttttacaatcaccttatggggaaaggttttaggggtgataaaatataatacatttctaaaataaaagtatgttttctagatctagcacatttggtcaacacctcagtcattggtggaaagaccagacactagaaactgattttaaccctggggtgaagaatggttaagcatagggaatactttagtaccttgctttacatatactgatgttccagaataattctatgtaagacttcttccctggtaaaatatgaaattttgatcaagccttcctaaatagtgggtttcatacaatttaggtaacccatgaacttggatggaaagaaaggtatatcatttcactaaattttaaaaactaatattcagttaaaatataagcaacaaatcacagtagtatctgtgactgtcatcagtagagatcataaaatatgtttatatcacattgcagttaatatagaaatactgtttatacttattcaaaattatagtaacacatcactgaatttattgaatgcaacagagaagcacatatatatatcgcgtttactttttatgactgttttaatagaattagttttcttgtaaatcctgtgtatatttaagaacagtattcagagaagaggttaagaagcgtcatcctatagtaaaagagatgtaaggcatagagaaagtttggaacttcttttgtaacagcgataatccaagcttgtctaacctctcagtgagtttagaatgagtctctaggttgtggatattaaggaaaaattgtttcatataataaactgcttgattttaacttttaggcaaatttgttgactactgagacagcggtttgaaggtatcagattcactatggaaacttttaggaaataggttcccctagtgaaacttgttaaactaaataaagcccatgagaatctaacatgcctttcagaaaatattgtgtgaaagctatttgacaccttttgatgcacagtgtaggattcatattcttttgactaatactgggtgttgaataccatttgcttcctgccgtgcacagaaatttggagtagggagtgaaaacaaagtatttgctatgttttggtctggagggacagaaagaaaaacaagctagctgccaaagataaacattatgattaataaaccacactttttattgcaaaaacagttctgttgtgtctaaagtatttttttttttagttgtttaccagctccttcaggaatatgtttctgatttaccagtgctatttctcgagcagtttcaggtcagttcaggtcatcctggccaacatggtgaaaccccgtctctactaaaaactcaaaaattagccgggcagggtggtgtgcacctgtaatcccagctactcgggaggttgaggcaggagaatagcttgaacccaggagacacgttgcagtgacctgagatcgcaccactgcattccagctgggcgacagagtgagactgtctcaaaaaaacaaaaaacacacaaaaaaacacagattataaaacaggttgtgacatctattgtctaacatctgaatggataagtagtgagagaactgtccactaactttccaaaggaaaaaacctcttccttcgtgttctggaagatgaagagtgtgactgacttcatttgtggctttagaaccttctttccatgtggtagtataaatttggtaaattttaggttcatggttccaaagactataaaaattcagttagtaaagcatttcattttagtttgaatgatcatttaaacaagtactgctatggtatggaaaaagtctttttgttatcctgatactatgtccacactatcctttgaaatgttctctgaaactttgtgctgtaatgtttcaaaaacaaaaaatggaaggcctctaaaagcatcttaaatgtcaaataggcttttaacttgcttcctaacaatagagtaactaattttgcatgtaaagtgctgttctttactagttgctaaatgtaattgtacatattttccaattttaatttgtgcctcgaagaaaaagtagatttttattactcaaaataagctcttgttttaaatagaacaaatatcaaattggaaatctagagattaacactgttcatagacctgtgatatactgtgcatgtaccataaaacatgtacagcaatactaaatttataacttaagctctgaattttttagaaagaataattactaaaagtcttgtttcattaatgttttatgtaaaaccagtgaatcacactttccgtttttgtttccttgtttttctttgtgttaaaccactatcaaataggaggcaggtttactacaaatagtttatcacagagtttataccagtggctcctgaaaaatcagagcagattacctatactatgtaaatttagataagctaatgtgtagagaatttggataaactaaactttggttcttcattgcttgagggctgcacatgcaaaaaactactagacctaatatataaattcaacggtgttgcaggatgcaaaatcaacatacaaaagtgaattgtatttctgtacattaacactgaataatttaaaatgaaattaacaaaggtatttcatttatataatagcatcaaaaaatgaaatacataagaataaatttaataaatgcaatacttatgcactgaaaactacaaaatgttgagagaaattaaaggtctaaataaatggaaaggaattctatattcatggattgaaaaacttaatattctgttttttcttttaagtacagggatgcaagttcaggtttcttacataggtaaacatgtgtcatgggagtttgtttcatcacgcaggtattaagcctagtacccattagttcaggggtgtccactctttttgcttccctggaccacattggaagaattgtcttgggccacacataaaatacactcacattgatgatagctgatgagcttaaaaaaatggcaagaaaatctcataatgttttaagaaagtctacgaatttgtgttgagccacattcaaagccatcctgggccgcatgtgggttgaacaaacttgcattagttgtttttcttgatcctctccctcctcccacccttcatcctcaggtgggccccagtgtgtgttgttcccctctgtgtgtccatgtgttctcctcatttagctcccccttataagtgacaacatgtggtctttggttttctgttcctgtgttagtttgctaaggataagggcctccagctccatctatgtccctgcaaaggacctgatctcattcttttttgtggctgtatagtattctatggtgcatatgtaccatgttttctttatccagtctatcattgatgggtgtttaggttgattccatgcctttgccattgtgaatagtgctgcagtgaatgtacacgtgcatttgtctgtataatagaattatttttattcctttgggtatatacccagtaatgggattgctgggtggaatggtatttctatctttaggtctttgaggaatcaccacactattccacaatggctgaactaatacactccccccaacatataagcattcccttttctccataaccttgtcagcatttgttattttttgactttttaatagccattttgactggtgttagatggtgcctcattgtggttttgatttgcgtttctctaatgagtgatgttgaactttttttcatatgattgttggctgcctgtatgtcttcttttgagaagtgtctgttcatgtcctttgcccacttttctgtggggttgttttttcttgtaaatttaagttcctcatagatgctggatattagacctttgttggatgcatagtttgcaaaaattttctcccattctgttggttgtctgtttactctgttgatagtttcttttgctgtgcagaagctcgttagtttaattagataccatttgtcaattttttttttgcttttgttgcaattgcctttggcgtcttcctcatcaaactctgcttgtgcctgtgtcctgaatggtattgcctaggttgtcttccagggtttatatagtttggggttttatatttgagtctttaatccatctagagttactttttgtatgtggtataaggaaggtatccagtttagatcttctgcatatggctaactagttatcccagcactatttattgaatagggaatcctttccccattgcttatttttgtcaggtttgtcaaagatcagatagttgcaggtgtgtggtcttatttgtgggttttctcttccattggtctatgtgtctgtttttgtaccagtaccatgctgttttggttactgtagccctgtagaatagtctgaagtcaggtgaggtgatgcttcccgctttgttcttttcacttaggattgccttggctatttaggctcttttttggtttcatatgaattttaaaatagttttttctagttctttgaagaatgtcatcgggagtttaatgggaatagcattgtatctataaattgctttgggcagtttgtatgaatttgcatagccattttaatgatactgattcttcctacacatgaatatggaatgttttcccattcccgtcgcctctgatttcattgagcagtggtttgtgtgtgtcatctctgatttctttgagcagtggtttggaggtttctgatcaaaatgactttgatcagaagcctccaaaggtacaggagaacctaacctttgcacatactttggagaaataccagggacagagcagaatataaaacatgttaaatgcagttgccaagaggtagaagcgggcatgggcaagacagctgaggcatctggatctgatcagaggcagtagttggaatgagtcagaaatagatggattgagcatataaaacttcctcccaagggtaggcttgcactgtgaggaggggtttcccttagtagccatgtctgattggtgtctgttttggtcaaaagaggctatgtaaggggaaaccaaatatttggggtacaggttactttctttgcttcaagaaagctctcagtatgtcctgaggaagtctcgcctatcctagggtagactgggaactctgaaggttatagggaagtagaaatgcctgtctctgcctgattcttttctgtttatcaacctcctctgggatcagtgagttcaatcttgtgaaataactgatctatcccatgcttatttatcatctgagagtagtaataaacacacttacccactagtagatacttaatttaatacttccagacattgtggctgttactgactgtatgaagataaaattaattaagggattctattctaaagtaatctgttgtataatgcagaacattacctgtgtgcaggagatactccatgtattgcatgaaaatgtgagaatgctaaaactaatttctagagagccaattgagaaagaaaaattggaaaataacattaagaaattattttaatatatttttgaagtctgggtaacatagcgagatcctatctctaccaaaaaatattttttaaattagccaagtgtggtggcacacctgtagccctggctactctggaggctgaagcaagaggatgacatgagcccgggaggtggaggctgcagtgagccatgcttgcgccattatactccagcctgggtgacagagcaagaccttgtttccaaaaaaaaaaaaaaaaaaaaaaaaaaatatatatatatacatatatatatatataatgtatatgtagtatattttttgaataaaaatgtataaacctaatttcttatacaaaaatgcacaatttataatatataaataccgtaactttttcttaaaatgtgtatgactatatattgtattttagtgcactcaccttttaaaaagaaaggtatggaggagacactagccatttctaggctagtttcagagaattatgaactcctcaacaccatgctgtctttgatcatgagagaactgcttattagagacttgcctagaagatacttgtgagagaaaagcaactattaatattggggatatttggccttcaagttggtataggttgacatgtagcgaagctactaatttgaaagcattaatcagaaggattttctttgcttcttttatggaatgattaaaatattttatgtctaaataaactcggagtagagattgatttttataaaggctatattgactatatctctttttattcccccttttttttttttaaagaaactatagtgacactgaaactgaaggagagatttttaattccttagtgcaatactttggtgacaacttggggcgaaaagttaaagcgatgccattagttgaagaaacttctttactggaagattcgtcagtgacttttcctgtggtaataataggtaagttattgtattttatcttttaaaattatagttaatgacccttaatacttttataaatctacagttagtacaagttcttaagattttattgaaaagtattcttaggtggtttgatatgctaaaaaactaataaccaaatctttggagagtaattggtttatctgattttagcatctgtgttaaaatgcagtatctttttagtgaagaactgatattactacattattttaaaatatctcctacatttgtgttaattatatgacagtgtcatggtaatgtgataatattattagagctctgaagagtattctatgtatattattggataataccttacaactctgcagacttctgatgttggtagggcggatacagacagagaaactgacacagatgttgagtaacgtgcaagttagtaaccggtgctgtattagcaatgacattatagtactctaaggtaatgtttacagttaccttaaccacaacactactattttatatcctttgtatcacctcagcagataggcatttaagatattaaaaattaaactattaataaaacattcagatttataagcttttataatttagttttattgcatgcatttaattacctgttatgtatatttttcatctaatatacaaagtcgaggaattcagacaaggaatatagtgtgaagctaactaagccagaggagagagttaaggaatataggtgccttggtagcatatgacttcctttgtttctttgacagcttgtttcaaagttagtaggaaggggagaaaattcatgtcctctggcttgtgggaggaaaagaggagagcaagattgttctatactaggttctatactagattctcctctacaggatatgatagaggtgacagtttttgtaatagttctcaaccaagagatatcagggaccatacgtcatgtttcattttcccccttacctctaaccttggttttctatcctgaatgaatggaggaatcctgtcttcttgtgtggctaggctgtgggaaggtcagaaaagaaaaacttaaccttcatttgcacctgcccactccacttcccacaaagcagcctatccctgttttgcctcagctagctgtgagtagcttagcctcatgtatatttatatagtgtcattactgttgacaatggcaccaccagcctgagcataaagagctaatttcttaaatatatgttttctgttgccgctgtaacaaattaccacaaaactagtggctttaaacaatgtgaatgtattattctactgttctgtgggtcagaaattcaacatgggtcttcctgggccaaaatcaaggtgttggcagggctgtgttgctttctggaggctctagggaagaatgtttccttttcctggctcccttctgtagcttcaaaatcagcaatgttgtttcttaaccttctttcattgtcatgtctccctttcaccacaactgggaaaagttctctatttttaaggactcttgtgattagattgggtctacctgggtaatctagactactctccatctcaggatccttaatcatatctacagagtccttttgctctgtagtaacatttacaggttctaggggataggactgggacatctctgggcacagtggatcacgcctgttatcccagaactttgggaggctgaggtgggctggatcatctgagcacaggagttcgagaccagcctggccaacatggtgaaaccccgtctctactaaaaatacaaaaattagccgggcatggtggcgggcaactgtaatcctagctacttgggaggctgaggcaggaggatcgcctgaacccaggaggtggaggttgcagtgagccgcgattgcgccattgtactccagcttgggcgacaagtgaaactctgtctaaaaaaaaaaaaaaaaagaaaagagggccaggcctggtagctcacacctgtaatcccagcactttgagaggctgaggcgggcatataacaaggtcaggagatcgagaccatcctggctaacagggtgaaaccttgtctctactaaaaatacaaaaaattagccaggcatggtggcgagtgcctgtagtcagtcccagcttctcgggaggctgaggcaggagaatggtgtgaacccgtgaggcagaggttgcaatgagccgagatcgcaccactgtactccagcttgggcgacagagcgagactccgtctcaaaaaaaaaaagatataaaattagttctaaatattttttatttttctttcagtctttaaggcttcctattctagaattataagttgaaatctttctctgctttctctgtttctagtattcttatggttttacttttcttatatctttgagtatattttatttggggtaacatattaggtaaggaacaggattttttctttgcagctagcaattctctaggttggattaaatttttgaaaggcagatataataagtggtaatccagaataaaggaattattaattcataaatggaagtagttcaggaaatccagtttggttttagttaaagcatataaacatataggaaagcaatatcaggatttaggactggaaagatggttgagatgtataatcacctggcagtttcttgcctgctgcacagacaaaaccatttcactgagaccatggcgttgcagtaaagaagttgacacaaggccagcccatgtgagagaactgcagttgttcaaattagtctcctgataaaactcctgattggttgggcgtgatggctcatacttgtaatcccagcacttggggaggctgtggtgggtggatcaagagatcaagactgtcctggccaacacgctgaaaccccgtctctactaaaaatacaaaaataagctgggtgtggtgtcgtgcacctctagtcctagctacttgggaggctgaggcaggagaatcgcttgaacccaggaggcagaggttgcagtgagccgagatcatgccactgcactccagcctggtgacacagcgagactctgtctgaaaaaaaaaaacacaacgaaaaaaacaaaactcctgatccctcctgatggcttggaggttagggtttttcaaggatagttgggtgaacaggggactagggaataggtgctgctgattggttggggatgccatgctgggggtatcaaaaatggttctctagcactgagtccaactctgggtggggggccgcaggactggttcagttgagtcttgggtctgagtcttgaatcttgggaccaatagagtcagacagtcatcagaaatgcaaaagtctgaaaagacatttcaaaaggccaacctcaggatccacagtagcgatgttatctgtaagagcaattagggaagtcacacatcatgtgacctctggctgcgtgactcttcagcagtaaaggattatagaaactctgcctacatcttagcagaattccggcacctctcataatccgaaccttgtggcctttcattagttttagaaaggcggtttaattttgggaaggactgttaccatccttgctttaaggttaaactataaattccttccatgattagctttgcctatacccaggagtgagggaagacagccggcctttgaagctagaagcaagatggagtcagccatgttagatttctctcactgtcataatctttgcaaaagttgtttcaaatggagaacactggatagtcagaaacaaacaatgaagacctttagaacagaaggctaacatgatgaggattatgttaccaaaacttatgtgaatgtagtatgtgaaatgattgggagtgggtgaatctcagggcagagaaacagtaggagacttgtcttttaggtgaagtacaggaatgagaatagcaaagacaactgacaagatatagggggcaaactaggtttagaaccagaaactgattaacttagaagtttgctagtaccatactttgagataggatagggtttgaaggagagggcacctcaatgaagggactcatgagcttgcttttgagcacattacattaaagttattagtgggccattctatcaggtagaatcaagaagtggaatggaaatgtgggatatatccttgggaaataggtcaatttagagaactaattttggatgtcagtagcctagagagttgaagccttgagtagatgagattcccaaaagaaaataggagagaaggcagaggttaaaatctcatgaaacatctggttttaagagattagaaaaggaagaactggtcagagaaaagagccatcttcaaagtaggacaaaagccaaggaacaagagtattaagatgcatgacctacccctttccaccttttatttttaataggaaatggaccctcaggaatatgcctttcttatatgttatcaggctacagaccgtatttatcatcagaagcaatacacccaaatacaatcttaaatagtaaattagaagaagcaagacatctttccattgttgatcaggtattatttcttacatgtcaatttaaaaaatttttttatgctgaaacaagattagtttttatttatatgaactttcttagttgaaaccccttattctaaataacaccttatatcatttttattttagattcgtaaatgtattctgagttacttctgtttattttcttgaatttattagagcagagttttctgaattattttctaatggagatttagtaggtgctctgtggtcaagttgggggtactgctttttatcattggagcatcatggtaagcattagaatatactatctgggaaatgctggcttttttcaaactctgtctcccttttgttcattcaggacttagaatacttgtctgagggccttgagggccgatcatccaatccagttgcagtacttttcgatacacttcttcatccagatgctgactttgggtatgattatccatccgttttgcattggaaattagagcaacatcattatatccctcacgtagttcttggtaaaggtccacctggtggggcttggcatgtgagtatatttttcttagcattttagtgtatgtgaattatttgtcttgataagaccaactttattcttaagcattatgataatgttatatgtgatgtttatcacatttttatttgagaagaactttaatgctgttcagttagttaaatatgggtttattacaagtagcagtaaatcaagccaaattttattactggtacagtcttagaataagcatgtctctatactatcttacaagaattatgtagaaaacatttcaagaatgttttgtataataaaaatttaaaactcaattcattttagactttacataatctcacatagtatttcaaagcagtatccattattttcttacattttcagaatcttaaatgaaaaatgtaaaagaggttgtgttagtctgcttgtctgcgataacaaaatgccatagaattgatggcttaaacaacatatttatttctcacagttctggaggctggaagtcccaagatgaaggttccagccagttcagttcctggtaaaggccctcttcctagctttcagatagctgccttctcaatgtgtcctcacatagcagagagagagaaatattctcttcttatgaagccagtaatcccattctgagggacctaccctcatgacctcatctagctctacttacctcccaaaggccccatctccaaaagcatcacattgggggtcaggacctcaacgtaagaattttgagggtagatacaattcggttcatagcagaggttaaaccagagaaccagtgaattaaggattcactcagtgcatttcattagggggccagtaagtaataattgttcatccttcctgtgttcttagcagttaacactgtgtctagtgtgtagtgagtgttcatttgttatacaaattgatgttaagtaatttagtttgctgtgttatgaattacagacttcatgggaactttaacatattacataccaaatttttagtacaaacttcggttggctgttcgtgtattagtgcagttttgcacatctgaaaagttgtttacgtttataaaatgactgtttcagggtatcgggacattcctagattaaatacgtcatgggtttcttttaaaatctttattctctttttaataatgagtagcaactaccaaattatttgttgcttttagcttaagttttatgatttttactttttcatatcaactttaagctttatttacaataagctgcatccatttagagtgtataatttgacaaatgcctgtaactgtgaaaccaccaatacaagataagaaagaattctatcatgcccaaaacttaagtgtttatattttctctgttaattagtagcattcttaattttaaaaaaagccataatgtatttggaagtggggagggcatttagactgccttctctgaattcctgaggttttattttacttacattttttccgcttagaagaatgatgagttgtgcaggcgataattgatctgtttcatttctttcacttatgtataaaaaagttaaagtatggataaaccctgattactaaaaacacattttgagccagtgataaaggttaaaatatacctaaaagttgctgatttttttcaggcatgtattcactaaaatagggctgtaagtaatatttcagctgtgtaccagttgccagtcatcacctctgtgaaggttcctaatgttcccagacataattacttgatcctacctgcattccatatcttaatcttactgtgcttgcctgtggtactatttatctgtttatgcgaccatctcccctgctatggtttatgtacatcctaattaacctgagttgtgacttaagacgtaaactccttgagtcatcacccctctctcctacttagcttcatatagttctctgtttctcttgtgatctagtttctcatcactcttctctcttccaaactttctgtggccccttgaaccaattttgtgataaacaacttgtttgctttcccacatctttaaccattctgtcagatgctgcttctgctccctttcttgaaagcttactctttcctaaagataccattcccactgtagccctctgaagtggagcctattcattctcccatagccctatgtcccatcaggttggctagtaaggttggtcttctcttcacacccctatgcacttgtgtaaaaagccctgttccattgaacagatgatgccattttctagcttttctaccattccagactgtctccagactgtctccatttctggcttttttaccattccagactgtctccagttactgaatctgtggcacctaattcatgggtcttccattatatcccaagttttgttaccaccttgaataattttacctctacaaacatgacacagaaccaagatcttaacctttttgttccttggtctcctcattcttgatgatgatgtattcttcattagctactcactccagtggctccactgtagatcttatctgtcataactactcaacttgtaaaaacctaaattctcaaatgtcttcctttctgatcacagtttcctgttcttcaagcttatcacccagttaattcacactatagataatctttgaacacagagcgtgctccaggctgtgatcttcatatccttacttacccagcccagcttctgtagtccatggagttaactattctctttaattcccttaacccattgtccttctgtcacataggtttgtcatacaggcaattcatctaactatccactttatcttttcttacacttgagcagtcagacccccagaaaaaaaattatacaactgtgaaaatattctccactctcagttggggccaaaacactactataacctttgatatttccttattaacttcttttcaaacctttatctcttttttttctttcatgcttagaagtggtcttggttcttattttacagataaaatgtaatccattaggattgaacttccacaatttcacactcaaaccgaaaacttacacattgatgcaaattctttttttttaatcccctgttataatggaagagatattactactaaggctcaccttccagccacattctggatccctgtcttcccaagaacattatttatttgattttccccatttcttttatatcttcaatttctctgccagcttctattggtcggtatgtaaacatgctgaaattatttccatctttaaaaaaattttaggtgccagctgatctttatcctttggtttatagctaacttcctgaaagagttacctatacatacttctccctgcctttgctttctgctccttagcttactcactctaccttctgccaccggttttccattggaactgttttttctgaaagtcggtaactttcttttttgcttaatttgatgacgagtctcagaatttatcttttctgatctctgcagcttttgacagtgttcatatctttcttaggttctctgaatcttcagtctccttgtttttcttcctgtttggtcactccttttctgatacctttgtggattcttgtcttttttgttgttgttgtttttgagagagggtctcactctgtcatgcagggtggagtgcagtggtacagtcatagctcactgcagcctcggacccctgagctcaaatgatcctcctgccttagcctcccagtgctgggattgcaggtgtgtgccaccacacccagctgactcttgttctttaaaaattgcttctgtagaccttatcccaagcccaggtcttttcttcatactcttcattctccctgggttatcttacctacttcaatggcttgcatattgatattaattgattcccaaatcagaattcccaaaatcaaaaccagcccagattgctgtttctcatatacccaagtaaatacattcccttgattattctgcaggtgtcctcagactcaacgtacctaaaactaactatctttatcatcaagtcccttcaatttccttgtcattaaatggcattctcatgtagttactcaagccaggaacctgagagtcttccttgatttctctttcttcaactcccatttcaaattaatcaccaaatctttttcatttatgatattttgggtccatctactctattttgttgctaatattggtcaccgctgtctttcaccagaattactgcaaaccctttctaaatggttttcttactcattgtctcttctccaatccattatccataccaaagccagactcatctttctaaattacatgtctgagatgttacaccaatgcataaaactcttcagttgctctccatctaacatatagtatgtagacttcgtaatgtatctcaccatactccaatctagcccttattaggtttcttgtcatattcctctttttatctctgacattctgtgctctagcatgcttttgttggggagtccaagttcattctcagtctcgaagattcaataggattcacaggactcagtaaagatggtgtacttgtggttaaattttactatagtgaaaggatacagattagaatcagcaatgggaaaaggttcacagggcaaagtccaggagaaaccaagtgtaagcttctagatatccactcctagtaaagtcactggtgcgtggtgtcgagggatgttttctgtggggtcagtcatataggccagcagctcccatgtgactcacctctgcctcccagagcaaaaactggtattcacataaatcacattgttaggataaactctcatggttacactggtatagcattgccaaggccttaggcatgcaaaactcatgctcatcaggtagagtattcaggggctcagaagttatttctaagaaggtggcagccaagcctggttctgaagacaggcttttgttggtaatgtaaaaggttggaacaacgcaggcctgctgagttaatcctttcaggcacaaggctgaatttcttttgactccttgaaggacactcatatttgctctctttattaagctgccacatggatttttatttggcttggaatattttccctttctaatggtacactcctctgcccatttgtgtccttgaagaaccagatactttctatatgctcctgcatacttctatttagtttgcatcctttaatactacagtgtccatggcagcttgtattcatggcatataggttacatggggaaaaaagaaagataggagaaaaatgaagagatcaaggcattagggctctcaaccaactggaagaactggtgcagtgggaataatgttaaaaaattgttgtcagaaagtgaaatagtagtgtcttaaggttttagagttacaggtgaaactctcaggttccaaataatctctgatagataatacattcttaacagctccttttatgatgattccaggttctgaacctggtatcagggctagcctccctcaaagcaggtggcagcttgctacattctctttcttgggtgatttgtatatagtcacaaatgaggtttcacagggcctagtacatagtaagtactctgtgaaagtcagttataataataataataatatgccccattttcaaactgggtgttatagaagcagggcaagaaattatgagaaaaggagccactgcctaaaagagttgattgaaagagatcatagaggtcataggtataacaggtacttggcctttgggcttttcttgctttgtattgaacaaagcagaaataagtaggtcaagggagcttgatggcaagcagtagcctcagctcgtttgtttctcaggcatccactgcctatttctgtatccttaagaagagatgctgctgtatccacatcagcctagattttagaattataattgatggaggagggaaaagcttctttgttgctaattaaaagaaagttaataatattaaaatggaaagccatctaaaattttggaacttaatgaacatttttccttttgttcaaaaaatgaatatactgaatttttgtttccctgacataatattgtacatctgaattatgttgatcatagaccaaagttatcaacattgtgtaggcattggataatattgtaaatttgttttataaatttataactatatgaaagaaggttgtcgggataatatcaagtgatgaaggtatatgaaagtttattggagtaatgtttttgaggtaagttagccaaccatttaggactgcaggagcgcaccttgtccagagtcataattattgtaaatgagatggatatggttaaaaaacagaccaaaaaaaaccatgttacttcttgttttttgacggtacatttttttttttaaactctaatagaatatggaaggctccatgttgacaatcagctttggaagttggatggaactacctggacttaaatttaaggactgggtatcaagtaaacgaaggtaaagattgaactgtattaaaattctttggtgtacgttgaaaaagagaatgtggaaaaatttcaaaatatttgtgattttgtcatggctgaagaatataaatgtacgtctttcaaataaaaatgtgtccttgaagcagtgattataatatgctagttttcatttagagatgttataaaactaagcacagagctaagggattattgcagattggtttcctgtgacttttgttaatcatgggtttatctactgtcttgttacatcactctctgtttagttactttctcatccatccatatattatttttcatactttatttttatgcattgatatataactttatctatgcatatctcttatatgaatacctaaactctgcatacctaaagtgtttgactttcagtataaagattgtatattttatgattgataatttaaaatgatggataagctagaatctggcttatggttggctaattgggtatgaaggaacatatttaataaaaaaaaataagagtagaactgagggcctggcgcagtggctcacgcctgtaatcccagcattttgggaagctgaggtgggaggatcacctgaggtcaggcgtttgaggccagcttgaccaacatggtgaaaccctgtttactaaaaacacaaaattagccaggcatggtggcgcatgcctgtaatcccagctactcgggaggctaaggcaggagaattgcttgaacccgggaggcagaggttgcagtgagccgaaatcgcgccactggactccagcctgggcaacagagcaagactctgtctcaaaaaaaaaaaggacggaagaaatctcaccttggaaaactataaatttatttattttaaggggaaatcccaaaatttaaaaagagaaatatgaaaatcctgtcaatcattttcaaggatagtaaatattagataagaattactaatacagagaatctactctaatttgactactcacaaaataagaagttacgtaacctttgttagaacagggatgtaacatttgagtacttcacttcctgctacataacaaccatgttaattcatagaaattttccttaatatgaggaaattcagggagagcaaatttacatcatcatgggtaattgagattaaacctttccaaaaattcattttagatttttaaaaagaattatatatgggtttgaaacttgaagtaaaattaggcaagttgtacagttcttgatcttcgtaacttggcaagtgaaattgcttaacacattcttcactttgtaaaagggtaagaaagagaaagctttatgatttatgtaccagaagcatttacttttctaaattatgcatattgtgttgaagtaatatgtgcaaatgaattttgtgataaatttaggtttagttgctgcctttgtataaagagaagactcttaggtctctagagattggtggagtttgagttccgacttatgacttctagtgttgtgatcctgaacaaataaactagttgtcaattttccattctgtaaaatggagatgataatacagccgtgtattgcttaatgatggtgatatgttctgagaattgtgtcgttaggtgatttcgttgggcaaacatcataaagtgtacttaacacaaacctccgtggtatagcctactatacccttaggctatagggtatagcctgttgctcctaggctacaacccagtacagcatgttgctgtactgaatactataggcagttgtaacacaattgtaagtatttttgtatctaaatatacaaaaagtacagtaaaaatacgatataaaagatttaaaatggtatacctgtgggaggtaccataccaaaaatggtatacctgtataagggcgcttaccatgaatggagcttggagggctggaagctgctttggatgagtcagtgagtggtgagtgaatgtgaaggcctagcacattactgtacactaaggtacactttataaacactgcacacttagggtacactgaatttctttttaaaaaagtaattttaccacaactttaagatggctgtgatgtcactaagctgtaggaatttttcagctcctttataatcctttatgggaccattgttgtatatgctatcctttgttgattgaattatgtgacacatgactgaagaagtaaaaatctaaagttaattctaaatcttaataataattattaaacttcaaaagaaaaatttttgtgaacttcccattacaagttacaaacagtccctgattaatcatggtttcacttaaggtttttaggttttaaggtggtaccaaagtgatgtgcatttcatacaaactatactttgggtaccaatgcaactgttctgtttttcactttcagtatagaattcaataagtcacatgaggtattcaacactttattataaaataggcattttgttagatgattttgcccaactgtaggctagtgtaagtgctctgagcacatttaaggcaagctaggctaagctttgatgttcagtaagctagttgttattaaatgcatttttgacttaaaatattttcaacttacaattggtctatcaggacaaaccctactgtaaattgaagagcatccacatcatgaattatgtcaaataatttgcttcttatctctgattggggcaggggattttgcttgttgctttgaactttggaaaatgacatacagactaatgcaagtttttcataacagttatgttttagctctgcttgtgagtaggaaaacacatagagtgaaatgtcatctgttacttaacctagatgtaagatgactttgtttagcaaaagacagatctgaattattttcagctgttaggaaaatagcagtgtactaaaattcatgtcaagatggcatgtataattttaagaagcatagatattagttaggcctgtaatatctcaatgattgccatgaaaataattcagttgataattatagattataattgtgagataaagtagtccaattttcaaatatccacattttaataccttcatttaatgaaagtttatcaagcagtgtatttgagcagacactatgcatggcactggggaaacagaagtgcattaaatatagtctctgctctcatgggacttcttccaattttttgctaaaaagtaactcatgaagatttttaactaaaaatagttttttttttaagtgttaggataatgtatagctaagacagtccagcagaattaaaaagctataaaagcttactaggtagataagtaataatcatggaaactgaaagtagtatccttataggatatttttccttttccttttttaggagcctaaaaggggatcgagttatgccagaggaaatagctcgctactataaacattatgtaaaagtcatgggtcttcagaagaatttcagagagaatacttacataacttccgtatcaagactctacagagatcaagatgatgatgatattcaagacagagatatttcaacaaagcatttacagatagagaagtcaaactttatcaagagaaactgggaaattaggggttatcagcgaatagctgatggttctcatgttcccttctgcctctttgctgagaatgtagcgctggcaactggaacgctggattctcctgcccatctggaaattgaaggggaagattttccttttgtgtttcattcaatgcctgaatttggagctgctataaacaaaggaaagttgcgtggcaaagtggatccagtgttaattgtaggttctgggcttactgccgctgacgcagtactgtgtgcttacaacagtaatatccctgtgattcatgtgtttcgcagacgagtaactgatccaagcttaattttcaaacagcttcccaaaaagctgtatcctgaatatcataaagtctatcatatgatgtgtactcagtcatattctgtagactcaaatcttttatctgattataccagctttcccgagcaccgtgtgctttcctttaagtcggacatgaaatgtgttctccaaagcgtttctggattgaagaaaatatttaagctgtctgcagcagtagtattgataggttctcatcctaatctgtcttttctgaaggatcaagggtgttacctaggccataagtcaagccagccaatcacatgtaagggtaatcctgtggaaatagatacatatacctatgagtgtattaaagaagccaacctttttgcattgggtcctttggttggagacaattttgttcgatttttaaagggaggggcgctgggtgttacacgctgtttagctacaagacagaagaaaaagcatttgtttgttgaaagaggaggaggagatgggatagcttaaagcaagtttacaagtaattaaaatggacagtttgccattaaagatttttaatagtggttttgcagtgtactggcttgaattttctggacttgagttaactgaaggagagcctcaaactatagtaacttcatttttaaaagttactagaatttggtatcctgatttatattgcagtgtttcaaaggtgtcactgtcagacaaatagaaacactgccaacttggtgtaacttaagctttcatttaactaaaacattcttttcttgcaaaacttatttttcatgatcatttttggttatttattatacttgattccaaaatagtacagccttgaatctataaaactgtgcagtcattatgccagaaattatcttaaatatataatgggtcaccttgctgttcaaagggtggtgcaaggtcctgcagcatcttacatctgtagcttgttagaaatgtaaactctcaggccccacaacttacttcctgcattttaacaagatccccaagggatatgtatgctcataaaaatttgagacactggtttaaatgaaaatggatataaggtatgtataactgggggtggggtgagggtaggaggcatttacaactcagattttatttattttgaaattatcaattgtataaatctaatttattaccaaatagggtcttttaaaaaatatttttatcgttgaaaccttgacaggtacttcatattcttctaataatttaaacagtccaataatgtggtatacactttgacatccaagaactcaccaagatgtttttcagagatttattctcgatttaactatcatagcatttaatgaatctgatttgtagttcaataaattgtgggttgaactacttatccctgtgtgaacattgaattactttctgtcactgaaactgaggtatttgggtgtggtaagtacttcgaaaattgtaatactgtttgggcattgtctaaattattaaaggttaaaatagaaaataaagtcagaatttttcttttccattccaaaggtgtacttagagatctctattagtattcattcgagatgacatagcagctcatatcatggttgtttattggatttatctgttctaattatataagtgtgtttactgtctgtgttttcacacaaactgctagaatttttaatgttaagacgaaaacatctgaagttctccatggcaaattgaatttttcagtcattttcttttctttttttggtacaattacttcatctggaatgtcttcattgaactcgttattctatttttcttagaattaaaagtggattaatgtgggtttttctgttcattttattgcagtattaaatgcttaagcttattaggaccataattcactttaaatataattgtatagaatatatttgcgtcgatcaaataattgcttcagatgaattcttagactcttgataatatcacacctaatttaacttgattttacaagctgtacaatccagttttagttttctattgtgataataacttttttcaaaccagtttcacatcttaatgaaataacattctctgactgcacttgcttcagtactctcttgcctgcctgtttttgacctctgcatgagttggattagatgtttttcttactgtcacttctaaatagaaaatgacagtgttataaaaaagggaaggataaaacctttgacatccccttgtgtctcaaaagtccacagttattcaaacaatggctttttttgtgatgagagtatttgttaaaaaaaaaaaaagacttcaagaaaaataaaagttcagtggagctgcaaataaatctggtgaataatttcatctttggtaatctcccatttcctgagttcttcctcaatccaagctgtcctgtgtagtatataacatttgggcattttctctgatatactatactctcatgttctataaatttctgtcccgtaattctaacactttacattttttctttgctatcagctatagctattcatggaagggaagaatcactaaatacttgtctagttatagcatgatgtgagcatctcctccttatccctcgatgcctggcttggtgtctggcaaacagtccataattagcagatgttgaaagaccgtttacaaagcagaatttggggatttaaagtgcaatgatacaacaaaaagatttaattacagcttccagtgttttgactatgtgaaccatatccaactacttttttgaaaatctagttctatgtaatatatttctgtggcatcaaattttagttgattgtattagtcaataggaagtggtggaaaatttctaaataaattcaactattaaataaatgcaagttccactaaatcttagtgtttggaacactgaagaacccagaatgaaacaaaattagactgaatgtaaatgtcatttaaaaatctaactgggggctgggcacagtggctcacgtctgtaatcccaaaacttcaggaggccgaggcaggtggatcacctgaggtcaggagtttgggaccagccccgctaacatggtgaaaccccatctctactaaaaatacaaaagttagctgggcgtggtggtgtgtgcctgtagtcccagctacttgggaagtgaggcacaagaatcgcttgaacctgggaagcagaggttgcagtgagctgagactgcaccactgcactccagcctgggcttcagagcagaactatctgaaaaaaaaaaattaaaaatctaactcggttacagaggctgcttgttgcatagagccattttgatctgatcagatcatacagtttttaagttgtatactttccttgtggggggagggggataaagggcctgagtcccctaaggctagtctgaagagtatgtgaaataaggattaaagagataccctgattattttgaacaactacccactccccccccgccgccaaccacccatgcaggttattcaagagaaatggtgtctggggaaggaacagggtaaaaaaggtgaagatcatgactaataaagcataaaaagaatgaaaaccttcaaattaaaaataaaaggatggcgtcctggttttaatcatgatggagtaataagaatagggcttaccttttactgtaataatcaactataaaactcttgaaaatatataaagcagtgttttcatacagttgtagacagcagtccaggactgatttttaagagaagaaacaagcggtgagctccatagtcaccctgactttctgcttgaaggtactttgcaaactaacacaaagtggagtatgtctggttgggagaaaataacacagtatagggttcctgctggaatctgctgggcagagtactggggaggaggaagctgcagagatgcagctgcagaaatctgcataattttcttacatctggcacaatactaaacagtacagggagaaaccatggggctttagggatcagcagctataagttaggggccgagtggagactttgaaggtattcagctctggaagacattggaattctggccaaatagcagagccagaccttgctgaacacctcaagcattcagctgaaaccccaaaaaggccatgccttgcgaataggggtaccttaatttgccccaaactaagcctcaacaggatcaagcagaaatgtgagtaaattaactgcctgccagcacaagacttgacactcctcaaggaagacaaaatccagactgtcacaacagcatcagtaatgtccagcacacaataaaagattactgggtgtccagacaagaaaatgtgacacagccagacaaaacaagcaatcaaaacagatctaagaattgatacaaatgttggaagtcgcagacaagtactttaaaagttaatatgttcaaaatattaaaatgacactgaacaagtagggaatctcagaagaaaaactaaaaagtgaacattctatagctgaaaagtacattctgaaatgaaaaattcactggatgagcctaacataccggacgctggagaagaaaagataatgaacttgagaacaggttaatataaactatccaaaaaaagcatagagaaaactaaaaaaacaattgccagacttgatgtgataatatcaagtgtctaacatgtacagttggaattcaaaaggagaggaagactgggccagagaaacacatatttggagaattaaaagctgaaaaatttacaaatttcatttaaaaaatctacaacccatagatccaagaaactcaaactgcaaacaggataaatattaaggaaatcacgcctatgcacctaatagattgctgagaaaaacaggaaagtttaaaagctgtcggagaaaaaagggaacaatgatgagaatacatgactagaaaaaaatgcaatcaagaagacagtcttaaatatctttgaattgctaaagtaaaaatactgccaaactaaaattctatatccagtgaaaatattcttcaaaacgagtgaaatagtcgtttttggatatgtgaaagttgagaaaatatgctgtcagaagacctgcactgcaaaaagtggaaattcttcacattgaaggtacatgatacctgcatatatctacatgaaagaaagaaaaatgccagaaatggtaaataaaaattatgtattttctcatttcttaaattattcaaaatccaattgactgttgagaatgtgtttaaccaaaaacaatttaaaacaaaaagtaaaaaattgtatgatttaggacatgtagagtaaaatatacgataattgtagcactgtatagaaagacaaatagaagtatactttattttttttccccagagagggtatcactctgtctcctaggctggattgcagtggtgtaatcttggctcactgcagcctcaccccagtctcaagcgatcctcctgcctcagcctcccaagtagctgggaccacagggaggtgccaccacacacagctgattttttgtagagatggagttttgccatattgtaccagggtgatcttaagctgagctcaagtgatctgcctgccttagcctcccaaagtgctgggattacaggcatgagccactgtgcgtggcagaagtatacttttatcaggtgtatacattatacaattagtggtgtgttattaactttagataagaatgcatatccttatagtaactactaaaaacaagtaaaaggtacagctgtaaagccaacagaagagatgaaatggaatactaaaaaataattcaaagaaggcagaaaaagagaaacagatgggacaaaataagtgagaaaataaccatgatcatatactccaacccaaccgtagcaataattatatttacatacaagtggattaagcactaccaacttaaaagcaaagatcatcagattcaataaaaagcttcaaaaaggtttacaagagctttatccaaatataaagataccaataggttataagtaaaaatggaaaaagacataccatgaaaacattaataaaatacttcaagacaagtattagagatagatattttataacaatgtttagttaatggagaacttatcaattctaaatgtatatgcacctaattactgagttttaagatacataaaagacaatggagaactaaggtgagacaaagttacaatcatagttggagactgagtagacaaaatcagaaaggatgtaagggatattcaatggcattaccaaccactgatctgacatttatagaactactacacccctaaactgcagaatactcattctttttatgtgcaaccagaatattcaccaaaatgggccaacaatatgcttgcccataaaacaagtctcaaaaaatttaaaaagattaaaatatgactgaatatgatctctgacaacagtggaattttagaaatagtaacatatagaaataaatagcaattaactattgtatcttttggtagatggaaaaattatatttggaaattagtccatacatcagtgaaaaaaaatcacagggaaattaggacattttttgagccaaaagatcactcaagtaaccaaatttgtcacatgcagctaaagaggtgtgttgagtgaaattctaaatactcatttttgaagctgggtttaaaatcaatgatctacaaaggactagggaaaaagagcaaattaaaccctaagtaagcagaagcaaggaaagtgaaaatcaatgaaatagaaaaaggagaggccaggcacggtggttcatgcctgtaatcccagctactcaggagcctgaggcaggagtatcgcttgaacctgggaggcagaggttgcagtgagccaagatcgcaccatttcactccagcctgggaggcagcgagacagagtctcaataaataaataaataaataaataaataatagaaaaaggacatacattagagaaaaatcaatgaaattaaatgttcttcaaacaaatttaatttataaacctctagttagagaagaaccaaagaacacaaggttcaggtaacaagaaaggaaagggagactccatgacatattacagacattttaacgcaaatactataaacttttataccaatacatttcacaacttactggaacatatgaagtccttaaaagatgcaaactactgaaactactagaggtagaaaatctatagttccttgagataaaaaataaagacatttaacattgtattgacagccactgtaataggtaagaaaaagaaaagacaaaaacaattggaaggaagaagtaaaactgcctgtattcaccaatgacatgattgtgtacttaaaatcctaaggaatctgccaaaaaaaaaaaaattttgccagaataggtgagattagcaagttcacaggatccaaattctatacaccaaaagtaattgtattttcatatagaataaatcattgcaagatgaactttctgaaagtatcgtttacagtaccaaaaaaatgcttagggacagattaaaacagatgtctgagcctctacagtgaaactacaaaacaatgtggaaagagtagatctaagtaaatgaatagacattttacatgcatggattgaaagactgaatatttttaagatgtcagttcttcacaaattgatttttagattcagcacaataattctagccgatttttgggatagaaattgacatgctcagaggactgatgtatctgacttctagacttcctgcatagtcctgacttaccattttttgactagatggtagtacaagagtgatagacattcagtagaaagcctactttgaattttgttctcttccctggctagtaatgtgcccatagaatactcaatcttgcaatgctgggcagcagcagcaagccgtagcttcccgtcagccacagcatcaagagggtaaaaactgattcttgctctttgtgaagaacactattcctgctaaaccatcaagtattgatgcccttagtgccttcaaccaatgcttctactcaagcctaatcagtagggaaattgataatcctgttgctgtagtattccccatcatgccgcaattttagttcaatgcttcaaacattcttcaggcccagtgcgctttcagctgtgtatgtttatagtgagtagctacacaatcattctgttttttgctttcagtttactattcaataaattagatgaaatattcagtactttacaataaaatagcttttgtgttagatgattttgcccaactataggctactgtgtcatgagtacatttaaggtaggctaggctaagctatgacgtaggttaaggtgtattaaatgcacttttgacttaaatacagtattttcaacttacattgcgtttattacaatgtaatcccaacttaaggagcatctatgcagctacagtaattcaaggcagtatggtatgagtgagtgcaaggatggacaaacatttcagtgtaaccaaacagaaagtccagaaacagatccaccattatggttaattgattttttactaattggcaaggtaatttaatgaggaaaggataattctttcaataaacagtgttacaatgactggatacttgtatgggggaaaaaaagaaccctgatccataattcacaacatacatatcaattcaaggtagatcacaaatataaaaatataaagtttatataatagagcagaatatctgaaatcttggggttaaattggagagaaaaaatatcaaacaaaagaaaaaaataaatttgaccttgtcaaaatttaaaacttctattcatcaaaagacataaagaaaacagtcaagccacagactaggtgtaatatctcaatacatatatccgacaagagacttgcatctagaatgtataaagaatttctatgacccaattatagctatcagggatatacaaattaaaaccaaaatgaaacatcactacacaccgattggaatggttaaaaaggaaaaatactgacaacaccaatatttgtaaagacaggaggtaccagaactctcattcattatattcataaattgacaaatataaaaactgctatagtagggcagtcttccttagaaagggattgtgggcatgacagagaacaatattaatctgtccattatattccttaactgtaaaatggagaccatatgttccaccagcttcacttggtaattatgatacatggctattaagagactcaaatgactccatttcatcaactaatatgccctgtcaattctacttctaaagtatcccatgttctatccaatgtcataccactatcataatttaagtgttcataactctctataatatttcaataatctaactggtctcaatgcctgtagtagaaattgcagattggctcacccaatttctgttccctaggaaggctgagaagcttttaaaaaaagaccttcatttccctaactcccttgcagctggagttccacctgcaagcagccagaacttggaagtaagttaatttggttctggcaagtagatgcacttccacaagatttggaaggtgagagtgatgtagaggccagcctcttgtcccttctgttgcttctgtttacaagggaagtcatggaaatatggcctccattcctcactgttccatttctcattctctaaacaactaatcagttgtagtgactcttgactggaactcccttcttgctggatcacaggtacatgaatatatttttgaacacagacttgaaaatcacttgtcaataaagtttgaaaaaagacattcattgtttcttaccatctccctttaaggtagaaaaagaaaacaatctcaccatttctactttataagtaggaaaactaggactctaaataagctcaaaacagacacccacccagctcagtaagaccaccaaaaaggggtacaggtctttccattctggtgaaaactaaacccatgtttgatgaagtctccacatggtcttcagtttctagtactagaataacatgtaggtgacatctgcaccactgaagccattttgtttggatcaccagagtttaggtaagactacagcataatggaaaagaaaaaatattaaaaacattatattgatattcctataatttttaatctactaagtaaaaaagcaaggtgtagaacactgcatatgttatgctatcatttgtgtaggaaattatttaaaaataggaatttgaataggactcaaaaatccctggaaagattcataagaaatgagtatcatgaatttttttctgaggggaaccaagtagctaggacaatggtggaagggtgactttagtctttaccttacgtatatttagaattttgaactgtgactatattaactatttaataaacaaaacacatttaaaaatgaaaaaaagatgcaatgacaaagcctgaaaacagaacaaacaattgttacatacaaaagaatcaaagttttgtgcattttatttaataaatttaggccataaaacattgtaacttaaatcgcttctatacactatatattcatataaccttgttggcctgaagtagatgcttactaggaagtttttccatggcttctttttaaaatcctcagttatcttctcctttttaaataaggattgtatctgcaaagaaagaaatggggttaaatgatatttagataagggatggtatttcttttaaaggtaaagaactttcaaactgtagtcacactttggcaaataggatgggaatgacaattttgtccttaggatcagatactaagcactgacatttttattttcatgtatccctttgatgttgctttgatgaaaatatggtaaaaacaaaaaaaaaatcaacaataacaaaaatcctttaaagctttaaaataattaatgaaaacagtttaaaaatgaaggtatgtttacacttctttctgtatggcttcaaagatccccattcctccccataataaaagcatatcatttgcacaaaagagcataatctacttaaatgtaattagcactttacaacattttctcctacagcagttaaacaaatatggctgaacaacccatctcatttgactaatgaaaaaccagtattgtctgtcaacacttttttttttttttttttttgagatggagtctctctctggagtgcagtggcgcgatcttggctcacgcagcctccgcctcctgggttcaagcgattctcctgcctcagcctcctgagtagctgggattacaggtgcatgccaccacgcctggctaatttttgtatttttagtagagacggggtttctccatgctggccaggctagtgttgaactcctgacctcgtaatccgcccacctcagcctcccaaagtgctaggattacccggcctgtttgtcaacatttttaccagcaatttatactgtcagttatgaaattagagaatcaatctaattggctgcaaaacagactcaaaaataatttcttcattctgtcttctcccctgatatctacctataatatagtattttattagtatttcagaggcaattattataataggtttgttaggcctgcaggaatgctgaaaatgtattaaatcagaattaaattataatcacaaagtacaactctaaaacctcccacaaaaacctgctttgaaactttaatctagccttttgtttttatgcatgtgccaataaaaactaaacaaatggtctggcattttacttgtcttaattcaaaactcaatcgtaattctactcagagctgaaaaatctcacaaatctatacaacaatttcacacaattcgggaaccgtctttttgcctgaatgcccccatacaaattttaagtatcttataacttaaccccaaacctcgatgctatagccaataaacccaattgagaggtgcttaagtaataaaaataaacacttgtgttaggtgaagggactaggtgtctatgaggacagaagaaacaaattcttaatttctatgaacagaactaaattttatatacatctctcaaaggtacatgagaaaggtgaatcaaactttacctaaaaagatcatcagcaagagactcttcttttgcatgttgattttgtacctgtcaaaattaacataatttcaaacatttgctcagtggtgaatatatagttaatgaattgctatagtgataggtcactgtcatcttagagatttccacatcctggaggtcaccacatctgagttcttgcctctacaatatttcattcaactgatcctctatattttcaatccatgctaagattattacaaaagagctctaactaaacagctttctcccacccatctccactcaaagacaaccaatagtatattgctagcttgctgagtttttaaacactctttccagcaaaacccttttactaaatgagatttcagtgcttgggggtcagaccactgatgagactaagagggcaacatttaccccaccttcaactagagcagctccacagttaaagaggctcctgtgttcttggtcccacatcagggcttagaagctgctgctaaattacctctcctctgaagtccttttaaatacaaactcactaaacttctacagcaccttacagagtcagaatcaaaaactccctgtgctgagtgcatcttcctaaagtctagctatgcccttatcatatgcaatttgaaacccttcgtgacttctcccacctaccaaggaaaacacaagcccttgcatttgacccgctgaaatgtgcaaggctcttcataacctggttccattttactttcctaatcacttctcagcctcctcttcgtggactctgtatgccggttaaaactgaatcacacaaaaaagaaaaaagcaaaaccaaaacaaaaccccagaatcatctcctaataaatatcctgtga

SEQ ID NO: 713 - DNA, 3597 bp, Homo sapiens
ggtgtggtctggggcgggcctgatgagcacctggattttcacccggcgtgctggtaattcctacacttgtgggtgtttgagagacatgaagaggggaggatgacctcttcccggaagcgggacttccataaaagaagcgtggtgggcgggtcccgggcacctgtggtttggtgagtcctccaggtaactgtgatgcgggggtcagcgggagaggcacccggaagctcccggcgtctgcaccccggcagcgcgaggaaatgcccaaagaaactatagtgacactgaaactgaaggagagatttttaattccttagtgcaatactttggtgacaacttggggcgaaaagttaaagcgatgccattagttgaagaaacttctttactggaagattcgtcagtgacttttcctgtggtaataataggaaatggaccctcaggaatatgcctttcttatatgttatcaggctacagaccgtatttatcatcagaagcaatacacccaaatacaatcttaaatagtaaattagaagaagcaagacatctttccattgttgatcaggacttagaatacttgtctgagggccttgagggccgatcatccaatccagttgcagtacttttcgatacacttcttcatccagatgctgactttgggtatgattatccatccgttttgcattggaaattagagcaacatcattatatccctcacgtagttcttggtaaaggtccacctggtggggcttggcataatatggaaggctccatgttgacaatcagctttggaagttggatggaactacctggacttaaatttaaggactgggtatcaagtaaacgaaggagcctaaaaggggatcgagttatgccagaggaaatagctcgctactataaacattatgtaaaagtcatgggtcttcagaagaatttcagagagaatacttacataacttccgtatcaagactctacagagatcaagatgatgatgatattcaagacagagatatttcaacaaagcatttacagatagagaagtcaaactttatcaagagaaactgggaaattaggggttatcagcgaatagctgatggttctcatgttcccttctgcctctttgctgagaatgtagcgctggcaactggaacgctggattctcctgcccatctggaaattgaaggggaagattttccttttgtgtttcattcaatgcctgaatttggagctgctataaacaaaggaaagttgcgtggcaaagtggatccagtgttaattgtaggttctgggcttactgccgctgacgcagtactgtgtgcttacaacagtaatatccctgtgattcatgtgtttcgcagacgagtaactgatccaagcttaattttcaaacagcttcccaaaaagctgtatcctgaatatcataaagtctatcatatgatgtgtactcagtcatattctgtagactcaaatcttttatctgattataccagctttcccgagcaccgtgtgctttcctttaagtcggacatgaaatgtgttctccaaagcgtttctggattgaagaaaatatttaagctgtctgcagcagtagtattgataggttctcatcctaatctgtcttttctgaaggatcaagggtgttacctaggccataagtcaagccagccaatcacatgtaagggtaatcctgtggaaatagatacatatacctatgagtgtattaaagaagccaacctttttgcattgggtcctttggttggagacaattttgttcgatttttaaagggaggggcgctgggtgttacacgctgtttagctacaagacagaagaaaaagcatttgtttgttgaaagaggaggaggagatgggatagcttaaagcaagtttacaagtaattaaaatggacagtttgccattaaagatttttaatagtggttttgcagtgtactggcttgaattttctggacttgagttaactgaaggagagcctcaaactatagtaacttcatttttaaattgcagtgtttcaaaggtgtcactgtcagacaaatagaaacactgccaacttggtgtaacttaagctttcatttaactaaaacattcttttcttgcaaaacttatttttcatgatcatttttggttatttattatacttgattccaaaatagtacagccttgaatctataaaactgtgcagtcattatgccagaaattatcttaaatatataatgggtcaccttgctgttcaaagggtggtgcaaggtcctgcagcatcttacatctgtagcttgttagaaatgtaaactctcaggccccacaacttacttcctgcattttaacaagatccccaagggatatgtatgctcataaaaatttgagacactggtttaaatgaaaatggatataaggtatgtataactgggggtggggtgagggtaggaggcatttacaactcagattttatttattttgaaattatcaattgtataaatctaatttattaccaaatagggtcttttaaaaaatatttttatcgttgaaaccttgacaggtacttcatattcttctaataatttaaacagtccaataatgtggtatacactttgacatccaagaactcaccaagatgtttttcagagatttattctcgatttaactatcatagcatttaatgaatctgatttgtagttcaataaattgtgggttgaactacttatccctgtgtgaacattgaattactttctgtcactgaaactgaggtatttgggtgtggtaagtacttcgaaaattgtaatactgtttgggcattgtctaaattattaaaggttaaaatagaaaataaagtcagaatttttcttttccattccaaaggtgtacttagagatctctattagtattcattcgagatgacatagcagctcatatcatggttgtttattggatttatctgttctaattatataagtgtgtttactgtctgtgttttcacacaaactgctagaatttttaatgttaagacgaaaacatctgaagttctccatggcaaattgaatttttcagtcattttcttttctttttttggtacaattacttcatctggaatgtcttcattgaactcgttattctatttttcttagaattaaaagtggattaatgtgggtttttctgttcattttattgcagtattaaatgcttaagcttattaggaccataattcactttaaatataattgtatagaatatatttgcgtcgatcaaataattgcttcagatgaattcttagactcttgataatatcacacctaatttaacttgattttacaagctgtacaatccagttttagttttctattgtgataataacttttttcaaaccagtttcacatcttaatgaaataacattctctgactgcacttgcttcagtactctcttgcctgcctgtttttgacctctgcatgagttggattagatgtttttcttactgtcacttctaaatagaaaatgacagtgttataaaaaagggaaggataaaacctttgacatccccttgtgtctcaaaagtccacagttattcaaacaatggctttttttgtgatgagag

SEQ ID NO: 714 - protein, 503 aa, Homo sapiens
MPLVEETSLLEDSSVTFPVVIIGNGPSGICLSYMLSGYRPYLSSEAIHPNTILNSKLEEARHLSIVDQDLEYLSEGLEGRSSNPVAVLFDTLLHPDADFGYDYPSVLHWKLEQHHYIPHVVLGKGPPGGAWHNMEGSMLTISFGSWMELPGLKFKDWVSSKRRSLKGDRVMPEEIARYYKHYVKVMGLQKNFRENTYITSVSRLYRDQDDDDIQDRDISTKHLQIEKSNFIKRNWEIRGYQRIADGSHVPFCLFAENVATGTLDSPAHLEIEGEDFPFVFHSMPEFGAAINKGKLRGKVDPVLIVGSGLTAADAVLCAYNSNIPVIHVFRRRVTDPSLIFKQLPKKLYPEYHKVYHMMCTQSYSVDSNLLSDYTSFPEHRVLSFKSDMKCVLQSVSGLKKIFKLSAAVVLIGSHPNLSFLKDQGCYLGHKSSQPITCKGNPVEIDTYTYECIKEANLFALGPLVGDNFVRFLKGGALGVTRCLATRQKKKHLFVERGGGDGIA

SEQ ID NO: 715 - DNA, 4226 bp, Homo sapiens
ggtgtggtctggggcgggcctgatgagcacctggattttcacccggcgtgctggtaattcctacacttgtgggtgtttgagagacatgaagaggggaggatgacctcttcccggaagcgggacttccataaaagaagcgtggtgggcgggtcccgggcacctgtggtttggtgagtcctccaggtaactgtgatgcgggggtcagcgggagaggcacccggaagctcccggcgtctgcaccccggcagcgcgaggaaatgcccaaagaaactatagtgacactgaaactgaaggagagatttttaattccttagtgcaatactttggtgacaacttggggcgaaaagttaaagcgatgccattagttgaagaaacttctttactggaagattcgtcagtgacttttcctgtggtaataataggaaatggaccctcaggaatatgcctttcttatatgttatcaggctacagaccgtatttatcatcagaagcaatacacccaaatacaatcttaaatagtaaattagaagaagcaagacatctttccattgttgatcaggacttagaatacttgtctgagggccttgagggccgatcatccaatccagttgcagtacttttcgatacacttcttcatccagatgctgactttgggtatgattatccatccgttttgcattggaaattagagcaacatcattatatccctcacgtagttcttggtaaaggtccacctggtggggcttggcataatatggaaggctccatgttgacaatcagctttggaagttggatggaactacctggacttaaatttaaggactgggtatcaagtaaacgaaggagcctaaaaggggatcgagttatgccagaggaaatagctcgctactataaacattatgtaaaagtcatgggtcttcagaagaatttcagagagaatacttacataacttccgtatcaagactctacagagatcaagatgatgatgatattcaagacagagatatttcaacaaagcatttacagatagagaagtcaaactttatcaagagaaactgggaaattaggggttatcagcgaatagctgatggttctcatgttcccttctgcctctttgctgagaatgtagcgctggcaactggaacgctggattctcctgcccatctggaaattgaaggggaagattttccttttgtgtttcattcaatgcctgaatttggagctgctataaacaaaggaaagttgcgtggcaaagtggatccagtgttaattgtaggttctgggcttactgccgctgacgcagtactgtgtgcttacaacagtaatatccctgtgattcatgtgtttcgcagacgagtaactgatccaagcttaattttcaaacagcttcccaaaaagctgtatcctgaatatcataaagtctatcatatgatgtgtactcagtcatattctgtagactcaaatcttttatctgattataccagctttcccgagcaccgtgtgctttcctttaagtcggacatgaaatgtgttctccaaagcgtttctggattgaagaaaatatttaagctgtctgcagcagtagtattgataggttctcatcctaatctgtcttttctgaaggatcaagggtgttacctaggccataagtcaagccagccaatcacatgtaagggtaatcctgtggaaatagatacatatacctatgagtgtattaaagaagccaacctttttgcattgggtcctttggttggagacaattttgttcgatttttaaagggaggggcgctgggtgttacacgctgtttagctacaagacagaagaaaaagcatttgtttgttgaaagaggaggaggagatgggatagcttaaagcaagtttacaagtaattaaaatggacagtttgccattaaagatttttaatagtggttttgcagtgtactggcttgaattttctggacttgagttaactgaaggagagcctcaaactatagtaacttcatttttaaaagttactagaatttggtatcctgatttatattgcagtgtttcaaaggtgtcactgtcagacaaatagaaacactgccaacttggtgtaacttaagctttcatttaactaaaacattcttttcttgcaaaacttatttttcatgatcatttttggttatttattatacttgattccaaaatagtacagccttgaatctataaaactgtgcagtcattatgccagaaattatcttaaatatataatgggtcaccttgctgttcaaagggtggtgcaaggtcctgcagcatcttacatctgtagcttgttagaaatgtaaactctcaggccccacaacttacttcctgcattttaacaagatccccaagggatatgtatgctcataaaaatttgagacactggtttaaatgaaaatggatataaggtatgtataactgggggtggggtgagggtaggaggcatttacaactcagattttatttattttgaaattatcaattgtataaatctaatttattaccaaatagggtcttttaaaaaatatttttatcgttgaaaccttgacaggtacttcatattcttctaataatttaaacagtccaataatgtggtatacactttgacatccaagaactcaccaagatgtttttcagagatttattctcgatttaactatcatagcatttaatgaatctgatttgtagttcaataaattgtgggttgaactacttatccctgtgtgaacattgaattactttctgtcactgaaactgaggtatttgggtgtggtaagtacttcgaaaattgtaatactgtttgggcattgtctaaattattaaaggttaaaatagaaaataaagtcagaatttttcttttccattccaaaggtgtacttagagatctctattagtattcattcgagatgacatagcagctcatatcatggttgtttattggatttatctgttctaattatataagtgtgtttactgtctgtgttttcacacaaactgctagaatttttaatgttaagacgaaaacatctgaagttctccatggcaaattgaatttttcagtcattttcttttctttttttggtacaattacttcatctggaatgtcttcattgaactcgttattctatttttcttagaattaaaagtggattaatgtgggtttttctgttcattttattgcagtattaaatgcttaagcttattaggaccataattcactttaaatataattgtatagaatatatttgcgtcgatcaaataattgcttcagatgaattcttagactcttgataatatcacacctaatttaacttgattttacaagctgtacaatccagttttagttttctattgtgataataacttttttcaaaccagtttcacatcttaatgaaataacattctctgactgcacttgcttcagtactctcttgcctgcctgtttttgacctctgcatgagttggattagatgtttttcttactgtcacttctaaatagaaaatgacagtgttataaaaaagggaaggataaaacctttgacatccccttgtgtctcaaaagtccacagttattcaaacaatggctttttttgtgatgagagtatttgttaaaaaaaaaaaaagacttcaagaaaaataaaagttcagtggagctgcaaataaatctggtgaataatttcatctttggtaatctcccatttcctgagttcttcctcaatccaagctgtcctgtgtagtatataacatttgggcattttctctgatatactatactctcatgttctataaatttctgtcccgtaattctaacactttacattttttctttgctatcagctatagctattcatggaagggaagaatcactaaatacttgtctagttatagcatgatgtgagcatctcctccttatccctcgatgcctggcttggtgtctggcaaacagtccataattagcagatgttgaaagaccgtttacaaagcagaatttggggatttaaagtgcaatgatacaacaaaaagatttaattacagcttccagtgttttgactatgtgaaccatatccaactacttttttgaaaatctagttctatgtaatatatttctgtggcatcaaattttagttgattgtattagtcaataggaagtggtggaaaatttctaaataaattcaactattaaataaatgcaagttccact

SEQ ID NO: 716 - protein, 503 aa, Homo sapiens; identical to SEQ ID NO: 714

SEQ ID NO: 717 - DNA, 43023 bp, Mus musculus
  misc_feature (1)...(43023): n = A,T,C or G
gcgggggccgccacctggctccctagagcggccacaatgcctgccacagctggggaggggccgactacagccgccgcccctcatttggctcctctcagagtctgcgcaccgctgcaggcccgcgtcccctgcacccacctggctgctcgctccctcgccgctgcctccactgcctccgggggcgtgagccaggcgggcgggcagtgcagcgagcaccgggcatctgtcaagtggttgattcgacgcctctgccgcctttccccctccctgccagtgtttgtcgctcccagtagcctgcaccgcaggttccctggcagcttctcattcccctgtcccctgcatcgcgtctcttgttaacagaaaaagtgctttcattttaagatatcagtggtctggtacagccagctgtgagagctgtgctcccttctctgccccacgagttttctattctcaggcgaccccaccctgagctgctggcagtaagtctgttcccagctccagtgagggaggcatccgcccacttggggcttctgtccaaggtaaggagcacctgtgagtctaactgtcaggctctgatggggggggggtctcgttttttgtgggacttgaaagtgccccaacaatctgaccaaacatgaggctgacaaagacagagaccagagtcagaatcagagatgtgcagtgagaaaaaaagataaaccaggatagaggcaaactatgagagaagatgagtgacaggatataaatatgataattaaatagcatccaaaggaagcaaagacaaggaggaggaacaaaagacatatattatatatatagaacattatatgagatctccattacagttaagaaacaggagcaaagagaggtaaataacagagactagaacctagcaagatggcacatgctaataatgctagcacttagaaattatctgtaagaaacaggaagccagggaattaaaaagagataagaaaaatgaaatgctggccacaaaagtcaggaaaactagaaaacttagataagtacctggcaacaaaagaaagcttttggctaaagatcaatgtgtttaccgtaaagaaaatgggcactgggtgagagactgccccaacaaaaagaagaggagccccccctcatgaccaaacccttccacctgtttgtggctaaaagtaaagaaataataaaaggggtgctaacacagaagctgagtccttggaagaggccggtggcctacctgtcaaagcagctagactgtgtttcatattcccccaccgaccagtgcaaaacaagctagaaaagctcctaggcactgcgggcttttgcagactgtggattccaggttttgctaaattaaagagataaacagcccttcgtatagtctcagagattggggccctggaaaagacctgtggcgtatttgtaagaaattagacctggtggctataagatggcctgcttgtctgcacatagtggcttctggtcaaggacgcagataaattgactctgagacaaaacttggcacatgccctagaaagtgtggttcagcccccctgactgatggctggctaacgctcacatgactcattaccagactctgttgttcaattctgataaagtcactttgccccccaagtctgaactcagctatcctgcttccagacccagactttcagcaggttcttgctgagggacataggtgacatggagatctgatggaccagttactggagggtgcagatgtaacctggttcacagactggaacagctatctagaagaagaagaagaagaagaagaagaagaagaagaagaagaagaagaagaagaagaagaagaagaaaacatactggagcagctgtggtagctggacaggccctgccagaggacacatcagctcaaaagactcaacatctacacagatagcaggtatgcttttgccacagcccatgtctatgggactatatatcaacagaggagtctactgacaccgggaagaaaaagaaaataagaacaaagaagaaagctggttctactgaggccctccacgaccctgccaaggtaaacatcatccactgtcctagtcaccaaaagagagataccatgttagcaaggggcaacaacatgacagactgagaggcacgagcggttacagccatggccctgctggtgctcctggcaacggagcacgagtttgcctacacaacagaagacttatcccttatttccaaagattccagtcaccagttcaacaaaaataagagactgatacacctccagggaaagaaaatcctgccacaaagacaagcagaagctgtgatcaaacagatgaatcagtggactcacttagaggtaagcaagctcatccagacattttccaagcctaagtaccatgtaccagggttaaaacaccttgtggatctggaaatcagtctggctttttctcagaaaattggacatggtactaccggaggatcccgcaatacctctcctgggcatatatccagaagatgttccaactagtaagaaagaaacatgctccactatgttcatagcagccttatttataatagccagaagctggaaagaacccagatgcccctcaacagaggaatggatacaaaaaatgtggtacatctacacaatggagtactactcagctattaaaaagaatgaatttatgaaattcctaggcaaacggttggacatccgttatctcctgtgtgagatgcatgtcggtccagagctccgtcattaaacaacctcatgtaattacagcaagatgggtcctcgtgtttctttgggtgctctcacactcctgagactagagtgggggtccccgaaagggggtcttacaataagataaaacaaaaattatcatatagagtgtggacaaaacaaaccaacagaagaaaaagagtcacaagataaggcataagagtcagagaactacctgtttacacattcaggaatcccatagaaacactcaactggaagcagaaatataggcagaggagctgatgtagatctgtggaggcctgcacctgctgcttcagtctctgtgagttcatatgaactcttgttgatttagagggccttgctttcttggtaccctccatctcctctggctcttaaactgtctgcctcttcttccatagttccctgagttctgaggggagggatctgatgcaaacacccatgtaaggctgagtgttccaaggtctctcactctctacataatgtctggctgtcggtctctgtatttgttcccatctgctgcaggaggaagcttctctgatcatggctgagcaaggtgctgagctatgagtatagcagaatataatcaggagtcattttattactacatagttttacttttttttgttttgttttagaccaatattatttggttttaccctaggtccttggggtatctagtctcaggtgtttggtcacccaagcagtgtcaagtatgggttccatcttatggagtgggtcttaagtcaaatcagttgttggtgggttattcccataggctttgtgccatcactgcacaagcatattgtataggcattacattactgtagataaagggtttgtggttggcttggtgtttacctttctcccttgataagagtacagagtatcttcatgtatccatgattctggaaagtaggggtgcaggctctatgtaggcaccagctctaatttgtcatgttggatgagttatgtaagtattgtcttcagcaatggaaactttcagctatcttctcttctcttctcttctcttctnnnnnnnnnnnnnnnnnnnnnnnnnnnnnnnnnnnnnnnnnnnnnnnnnnnnnnnnnnnnnnnnnnnnnnnnnnnnnnnnnnnnnnnnnnnnnnnnnnnnnnnnnnnnnnnnnnnnnnnnnnnnnnnnnnnnnnnnnnnnnnnnnnnnnnnnnnnnnnnnnnnnnnnnnnnnnnnnnnnnnnnnnnnnnnnnnnnnnnnnnnnnnnnnnnnnnnnnnnnnnnnnnnnnnnnnnnnnnnnnnnnnnnnnnnnnnnnnnnnnnnnnnctcccctcccctccccctcccctcgactccctcttttctctctctctctctctctctctctttctctctctctctctccctctctctctttcattcattctttctttttttggagtatcagtctttaatctcagccggtcctcacacacatgaaagcacacaccctcggacttttagatcttgttgaaagttgcgatgtcgacactctgcacatgctcctcaaacttggtgatctcctcttcgagcaagttgttgcccactttgtcatcctccaccacacactggatttgtagcttccggataccatagccaacgggcaggagcttggaggccccccaaaccagcccgtccaattggatggaatgcacacaagtctctagctgggccctgtcagtctcgtcatcccaaggtttaacatccaaaaggatggaggatttggccacaggtgtgggcttcttggcccttttctccgtgtactggcttagcctctcctaccgtattcgggcaacctccttttcttcttcctcatcactgccgaacaggtaaatgacattgtcctaatcatcctctgctggtgtggctcctttattggttgggggctccacttgatacataggagagacatgctgggtctgtgggtctgtggctcgggagtaggtgaactcttctccagagagctcagcccggtctccaacttggaaatggcctgctgcaaatcttgtaccacgccatgaaggttctggttctccacttccagactggcaatcctcacaatgagctcactgtggtctccaccagatcccctggaggatccagggcctgagcttccagccaaggatttctggatgttctctctggctcttgcaacgtctcagaggatcacgctgggaccattctcctggcgagagccagagatcacaggcccattcatctgctcgaagaatctcctttctgcattgtcatatttaaacttgtcaagccagatcttctcacgcactagaaagtttgtagcccggagctcttgactctagctgcatatgtatcaaaagatggcctagttggccatcattggaaagagaggcccattggacatgcaaactttatatgccccagtacaggggaacgccagggccaaaaagtgggaatgggtgtgtaggggagtggtggggggagggtataggggacttttgggatagaattggaaatgtaattgaggaaaatacctaataaaaaatatttaaaacaaaaagaaagtttgtagccatttttctgatgccagccaaggacgcagcaaccaaaacttgggactgcgagctcaggactgcaaaggagagggagggcaacagcgcagctctcagctacctttttcatactgcccaagtctacctggtcaggaggagtacacacacacacacacacacacacacacacacacacacacacacactcactcagagatagatagatcttgtagaatagttgatttccctttaagaatctacattttttatttgtttattttatatttattttatttttgtggtttgaatgtttgcaagtgtgcctggttcctgtggaggtcagaagagagtgtcagttcccccaaaatggagttataaatggttgtgagccaacatgtgggtgctaagaaccaaatctgagtcctctggaatagcaacaagtgcttttaactgctgagtcacctttccagacctgagcctattttttgtccccattttttttttaaagattaatttattgattatatgtaagtacactgtagctgtcttcagacactccagaagagggagtcagatctcgttacggatggttgtgagccaccatgtggttgctgggatttgaactctggaccttcggaagagcagtcgggtgctcttacccactgagccatctcgccagcccccccatttttataatgtatttttttgtaaactaatgtaaacagcaaatcaatcccattgttaaaacaacaaacaaaacaaaacaaaaaccctaaaacaacaacctatctgacaaaacaataaactatgctgattttattgaaaggtttgctgttgttgatgttgttccccaacacactatttttattatttggcaatttcattcaatgtactgtggttgcacttgctttccatttctcccaggtccaccctcccaccgttgtgcccctcttccccagactccaccaagtccaatctgtgctacctatataaactcattggagcatgctcaaactcccagtggccagtcccctttaaagataaccgagccgcctctcccaacccccaccagaaactatcagcagtgaagagctagactttggcatcattattaaaaaaaaattaaggactttcttccatagcttcatgtctggactgtttttttttttttttaatggtggtggtggtaggatgttgcccagactctctcaatgtctctttctcagttatgagtctgtagtcattgctatcacctcagacgaagcttctctgcactagcagctggcagcagctcgtgggtggcaatatgatttctagaggcagcagggattatggaagtcattttaggaaacttaacccagaataggagccatttttcatctctgatatcttgttactcagactcagggtgctagagtggttgggcagggtgtctggggacagggcgtgtgcaagcatcactaaaggcagcagcagcgtaggcagctccacaccacaggctgcagaccaagtggccactgaaatctttagttccatttctctctaccaatgtagcccgctctattctgccatcttttttttttttttttaaatttgagcctatatttgaaatcagtggtgttactgaaaatataaatacaggtggaatctaaagtagttatgatacaacgggcaaaaattctcaatactgaagttaagtatggcaaatttatgaaaagtagcaatcatgaaaaatagattggatttgaagcctaagaatctgcatctgtaaaattagttttcttaatttttttttatattcccagatctcttatgaaataatccaggcttgacggtgcacacctgtcctagctctggggaggcagaaacagaataaccctggatttgctgcctaggtagtctagcaaaacaagtgagctccaggttcaggagagactttgtctaaaaaaaaaggatggaaagcaatggtggaaaacattgaacattaacctctgctagctacacacacacacacacacacacacacacacacacacacaccacaccacaccacataccacacacaccacaccacacacacacacacacacacacacacacacacacacaccacacacaccacacacaccacaccacacacaccacaccacacacacacacacacacacacacaccacacacaccacacacaccacaccacacacaccacaccacacacacaccacacacacacacacacacaccacatacaccacaccacacacacaccacacacacaccacaccacacacacaccacacacacaccacaccacacacacaccacaccacacacaccacacacataccacaccacaccacaccacacaaaacatgatcatgttgtgagtggccgttgaccctgttgtctccacttctacatcacagtgcagctttttgaggttgtttcatgaatatggttgtcaccccactgtgtgcctttctgttctgtgcaaagcaagggaaaggcacacttggtctctggaatgtgacagattgaaagcatttgaaagaaaaaagtgcacacagtcaagaagagtgtcaatcaaggctagaatcgatatttttaggagagaaaggcactggaggggggcttccttgagaagaagagctactggataaaggcagtggctttccctgagtttatagccttagtctttctctgacaagtgacaattctagatttgcaaatgtcctttttgaggctctataaaggggcctccagtgttcctgcaggcctgagtcataatagtttcttagtcaagtgccactggataaggaatactttaaacctgggatttgggccaatggcatgttgggaaacatttaatagctggtttcctaggggagaaagccatggcaatatttgcaatttctgtgatgttaatgttcctacaatggtcagttcctagctgctagtgtgatgtcattgaactgaaagttgagagaagatgtgtaatctgccattgagtcccagttgcataccattacagcatactactggatggtggcttatctccaaacttctttccacagcaactgttttctatggtagcctggagagctaggttaatcccagtggatggaagcttcagagaagctcccttagttcctccctcaaacacatcctttatcacacttcctgggggtcagcatgctgatatacaaattcactctaaaaatgtgaaaactcagcagagagcttatcatgttccctaattctctgacctgggtgaactgcattttcattgggatggatatggattttcagaagtgggctaaaccaacgaagaaggagctttcagagttcctttcatcatattatctcttgtttctcggcctgtgggtgggtctgttatgctatcctccaggtctcctctgccagaagggactacaaagccaggttggcaactcaccattttctgagtcaggacctgctgctggagttccaagcccatctgtgtgctggtttggccctgtcacctctgtacaatactcagtctttgtttttctgtcactgctgaaaatctaactcccacagattgaccctcctttaggtcctcactacctcctttctgatttggatgactatggggcacaccagtaggaggctggaaagtggaaaaagaaagagcttggggcacagttccctttgccaatgttatatctagcaaatgcaggtccaaccagtttgtgggaacagtgttcttgtcccttcacgaaagagtattgacgggattcttgttgttaatttacgcatgccatgccagatcatgtttcatgctttgcgaccccatctacctttctgaaaggaggcttaaatcaaagacctttacccaaacattggtggtaaatgtgctctgtggttgccatgaatggtaaaattctcttttggagggagaaacagcaggcatttcctggcaaggtgggtccttcaacagaaaacccttggctgtggcatttcagagcaatcacagcctttctgggaaactgagtatttctctactcatcactgggcctgagtggttctatcgattccaaagggatctgatgattaatccttatcatcttgaaagtatattctacattcctgtccagattgttctatgcttttgggtatagttcattttcctcctatccttctggggaatctctcaaaaaggggacatggaacattataaaacaggcaaaagtaccatttctgtcatgggtccacatcaaggggacagtggaagctgtctaatgagaaagcacagatgatcttatctggaacacagataaaggatgaggacctatgacctctttggggagtttaagtgagatagtgtgtataaagtcccttgaacatacacgataaaacagaaaggcagttgttattctaatgatcacacagagaactgctccctgttctctgctccaagagaccaaggtgggatgttcatgatctggtttctgttaggtctggtttctatgaagctacattttgaatcatactctgtcctttggtgcctatgagctttgaggcagctatctccgccctatggcactcggcccagtttaagctgctgctagctgttgggtgtggcaaaggaggtggggactggctcagtgcccgtatccagagtataagacaatccagaggggggcatctggaggcagttggagcctgggtcctgcgagtttagccatggcgctcagctttctctctccaagcctttcccgcctcggcctgtgggcttctgtagtgatcctgatggtaaccgtcctgaagctcctcagcctgctgtttcggaggcagaagctggccagggctttggacagcttcccagggccccccaagcactggctttttggtcatgcccttgaggtatgtggggatatgggagatgcccttgaggtatgtggggatatgggagatgcccttgaggtatgtggggatatgggagatgcccttgaggtatgtggggatatgggagatgcccttgaggtatgtggggatatgggagatgcccttgaggtatgtggggatatgggagatgcccttgaggtatgtggggatatgggggagttggggaagggaggtcatcaatttagacaagaggctgaggcctggaaccacggctcctagtcagctttcccacccctgactttcaagctggcttcagaagcaacacaacatttcaaagtggcagcttaagaaagcctgagatgcgttccattcattcattcattcatttatttatttatttatttatttatttatttatttatttatttatttggtttttcggtttttttgagacagggtttctctgtgtagccctggctgtcctggaactcactttgtagaccaggctggcctcgaactcagaaatccgcctgcctctgcctcccgagtgctgggattaaaggcatgcgcgccaccacgtcaggcccattattttgaggaacagaatgcaagtcggtgtggaggcttgttgatagatcacacccgggagaaattacatcctcaaagtttgacccgacaactaggcagtcacgaagtgtcctgctctatgcagtgtaaagattgctggtgaccaagaggacgttcaaagtaaaaacagaggaaagtgctgtcttctgatgcatcccagcgtgtctgagaggttggtacccccaaagctgggaggtaccttttctctttcctttgtctggctgaggaactctggcggttccccaggttcaggtcctggttgggtctcctgttaaggcagctcaggaggggttcaccttagcatccagtctcaggaactcctcttgtcttggggatccagaccttctaaacacaagataagggtttagagtcaggcaggagaaacagatcctccacacacctccccaaacatctggagactaacattttagattggaactaggaccccgagactaagtcttctggtgtgctttgagctacaggcaggtttgggagcccaggcatggatgtcatggatgaagtctcaaaagcgggtgtcattctttctacctttttcttcttccatctggggaattgacactggaaatgaacttggtctctaatctgatttttgctccttacagataacttgttggggataacctatgaacttacctgtaccattgaacactatgggtgggaggaggatgtcttgggtgacactagagcattctctgctcccaggaggatgaaggtgcttccccaggggtccacttctgctccattcttttaattttagcatcttacagcttttctactagtttgagacttttggagagtggcggacttggtctgatttattctcatgccctcaggatacagcacaaaacttgggttagtacaggcatgcctgaatgaatgaacgcaaaaggctagattgtagggagagaggtccacagaagatggagaatggtggggaaggggggtgagggatcaggatgacttgggagggtctctgccaagtgtggaagggtgaggtcacattctaaaagagcatgagaggcatttgggaggacttttaattcccctttctctgtgccccctttgtgcttacctgcctttctcaggattggggaagttagtcctcaagcaatgggctttaatagcatatagtccattctctcacaactccatgccagagctgtctgctctcttcttcccaggtgttctattctatcttgaaagtacacagagagcctggaacacagcctagcttcagcttcttcatgccagtataactatctgaagggcattggcttgataccaggaggccatgccaagattggagtgggaagctgatcttgagggctataaaagtttcctagggaaccaaccacaggcacagtgccattgcattcctccaggacttggtacctctgcatggttggattcacacctcaacctgagaatgtgaagggcaggatgtggatttgtttccctagtgtgagaaaagatggggaagttgagattcaaaggggttaaggtgtccacttaaggacacatattggttcaggattcaagtcaaagctgaactagggactcctcatgcattctgggccctaattgtcttgtaagtggtaggaagagtactttaaagggtcaggatgactgacactagacacacaagaacaccaagggatagcccgcgcagaaggagagctactaaggtgatccccacaagacttccctgagtggcctcagagggcactacacagacccataggaagggttcctggcaggtgccattcagttcagggaccgagagatcttgttaagaatctggacagtccaaaaataactgaactgagaaggagtttaggtatcatactggagatacctgagctcttgttttgggacctagcatgttgtggaagaggagtccctgtcttctacccccagttgttggtgtttctaaccattcacctctgtctcatctgtagatgatcgtgtgtgtgtgtgtgtgtgtgtgtgtgtgtgtgtgtgtgtgtgtgtgtgtgtgtaaaccagatattgggtgtcttctatggctctctaccttacatattcatttttgagaagattagaaaactcacttaattttatttatatgggtttttttcttcatatacacctgtgtatcacatgtgagtctggtgctcacagaggccagaagagggtctcagggaccctggaccttgcaaatggttgtgagccactatgtgggtgatgggaacagaacctagatcctctgcaagagcaggcagtacttttaactgcagagccaacaatccagtctcttagaaagatttttaagaattaaactgcctaagtgtgtgttggtgtgtatgtgggtgtagtgtggggatgtgcacatgtgagtgtaagtgctgtcagagtttagaaaagggtgtcaaattcccaggagttagattgcaggaggttataggcagacccctgtgggtgctgggagctgtgtctttcacaagagcggtatagctcttaaccgctgatcagtgtttcaatatttattggttattttgtttatttacatttctaatgttgtcccccctcccagttttcgcccctgaaaaccctccactccactccctcctcctgcctccatgagggtgcttcccaccccactcctgtccctgtgccctacacagtggcatcaagccttctcaggacccagggcttcccctccttttgatgccagacaaggccatcctctgccacatatacagctggagccatgggtattctttggtggtttagttcctgggagttcggggggggggggggaagggtctggttggttgatattcttgttcctcccatggggttgcaaacccctttggttccttcactccttcccctaactcctccattggggttcccatgttcactcctatgaatatctcacttttttagagaagatctcttactaaacctggagctctccattttggaaacactggcaggtcagcaagcccctccctccatctttctatctcacccttggcttacagattctaggcaggtcagcaagccccttccttcatctttctatctcacccttggcttacagatgctaaccaccatgtctgtcttttaaatagagggctggagttcaaactcaggtcttcatgcctggggagcaagtccttctccctactgagccttctccccacgcagatacattttatcctcaagcagtccccaagagcactgtagctgcctcacactggagaagctgggaatttgctccttggacactgtccaactgatctttagatccattagggaatggcctgagtggatttgttgacaggaaggaagctcagtcacgatttctggttggctcaatcatgtgagatagttccgttggcctttgaatgcactgttcccacttatgaaaggtcatggttcaattaagcttcattgatgtcccattctgatctgattcccgaagtgtaacttactcagactattggagagcagtccttcccattgctcattgctgctgggtttaacactggtgcaaatgaagggttggggcaggttgctcaggagctgggtgcagtgacttatctttatgccctgttttcctgtttccttcctttgtgagaaagcaatctgtcccagatctgatagtggtagccttgtttagggcactagaggataaatctgaggcatttgttgtataactcagagaagtttgccagcaatcacatgacccatacaagaacaatgttgtcagcagtcattttgagggattgcagctgcaaaacgggtccagatgctgagagctgtcttcactctaatgggctcctggggacaatcagggctcatagaagaaggctgtctctagggaggccatggcagtctgtgactgaggccaagttctcatgtctatggttgggatgctacagaagggcacaggaatgctgcctggagctgggaaagacaggagcagaatgtaaggaaccccaagctgcggaacaacccattcaagagtatccaactaagaagatttaatcaaattaagtaattaattaagagtaattaatccaattaagagtatcagagttctttactttgagtggcaaccaatattaggttaatgcttcagagcttcttggtgccaaaattcaggggtacagcacttctaaagacaaaacccaaaattacgtcaatgctagctaagggtcagagtaagcttgtaatattatttagttatttagacataacgtgacaattattttggttaatacatctgggtcatgtttggagtcacagaaatgtgttgccaagacacacatggctattgggagggaagagtgttgagaattatctaagtagatacaaaatgaagtcagaacaagatggtgttaccttggtcacttcaagtgcatgcagaaaagaagagagacagggcaggagggagaagttcagggatgccagccagaaagaaggaaggtgccacgagtgttccttttatctataggtaaagatgattttttatcatttttgctccttgccattgcacacataatgcaaccttttgggtggaattcaggattcagaaagatgattcttcagggagattacagcaaagtctgtagaacactggggccagaactatagagaaggcacagctggtggtaggataatctcctggctcttggaggggagtggtttgggtgagacaaagattcctggatttagagcagcagctctgggactggagagggtattagaaatgtacatgaaacaggaggatggaagtaggttccgggggtctggacaatatccttccttctctgcccagaaacctggagtctgtagggagttctgggctcatgtgtggtctttgtcttctgttattgtttcagatccagaagacaggaggcctggacaaggtggtaacttggaccgaacagttcccctatgcccacccactctggcttggacaatttattgttttcctgaacatctatgagcctgactatgctaaagctgtatacagccgagggggtaaggtgccctggagagagtgtggggtttcctgggaaaaatggccccagggatgaagttgggagaggtccggacttgtgtctagactctgggaaaagaatgaccacatccctacctaatttatcactatgcctcatttgagaatgtcctatttctccttgattgatgtccccttgtcctgcagacccgaaggctgcatatgtgtatgacttcttcctccagtggatcggtaagtaagcgtctatctttctgtgtcttctcctccctcccttgagctaagtgaccagaatcctgccctgccacagtggtcacccttccattggcctgcctgtcctaagcttagtgtctctgtggggaggtgggggagcaataaaagagcttctacctgtcagtggatattcttgctggacattccactttcctcccaagcagaggcaaggcaatgtgtgcttgaagagtggcttcctagagggggaaaccctagagttgatcctgtaggatattatattggcagtgctttccagaagaagggtctgagaaaaggtctaataatagtagggccatggaggctgcaaggtatctgagagacttgagtagaatgcagatttctattagtagattaggctaggcagggaagatgggtcaagtttagctgttagtatgtggactgatgttgatgatattgtgtgccattgagtcatcttcttttaactgattgattaattacttaattttgagacagggtcttactatgttgccttagttggcctatgtagaacagactggctttgaactcacaaagatccacctgattctgactcctgagtgctgggattaatggtgtgtaataccatacttggccttattctttttaaacttctatttatttgtgtgtatgtttctgtggatgtagggcacttatggataggtagctgtggaggcaggttgaatgcccgagaaatggactaaaatgtggttgggaggtattgtgtatgtgctgggaactgagccaggtcttgtgtaagagcattaaggactcttgacacatctctctcgagttcactgtgccttcttaacccaaggtcatatatgtctcccaacttcctttaaaaaacaaaacaacaaaaccaaaaccaaaacacatggcaatttcctgggagctatgaaagggctggttaatagggaggcaacaatcctagactattgacttagttaagatttgctaccttctccatgttggatactagcagactggggtggggaccagagtctctgctgggtcttgtagttcctgtcccccatccatgtagtgttccaggcttgggagtgtcagaggctgtgattgatctcagctctcaggggtagagtaggattgtctggactccacagcctccatctctcctcctttctcaggaaaaggcctactggttctggaagggccaaaatggttccagcaccgcaagctgctcacacctggcttccattatgatgtgctgaagccctatgtggccatatttgctgagtccacacgggtgatgctggtgagttccctcccagtggcaggctcctagcactgtgggctgccagaccagccccagccccagccccatccccatccctatccccatttgccctgggtgaaggcaagtggtgctctcttggagagagagtccccgaggccctgtcatccctatacctgtagcaatggtgcctaaggcctgctttgcctccctctctctgttgtatgctgtggaggcatccaagcattgaggtagcttggggcttgtctctgtcaggagacctggttctttttgattatagaatgtggttctgggaagccaccataagtgccctactggagagtttgaaggtagcctatgtttcagagtatcataaaatactttccacttccaaattcatttacattttcacacctgtttagaccctcatcactgagagcaatgtcaggtctcacttaggtgcttgcagctggaagaatggggcaatattccttctgtttctattttgtgcaataacttgaggagtattggtgtttattaacttttcttcaaaagtctggtagaattctgcactaaaaaaaatcaagctctgggctttttttttttttgttttgttttgttttgttttgttttgttttggttggtagacttgtagtgactgcttctattaccaggggttataggtctgtttaaatttcttatttgatcttgatttttatctttggcaaatggtatgtactgagaaaattatctgtgtctcttagattttccagtctggtggattatacgtttttatagtatgtcctcatgattccctgaatttccttggtgtctgttgttatgcccccttcatctctaatactgttcgtttagatgttctctctttgcctttagttaatttggataaggcaacttttcaacctgtgggcttccacacttttgggaatcaaacaacctgttcacagaggttgtgtatcagacatttacattacaaatcataacggtaaaaaattagagttatgaagtatcaatgaaataattttatggttggggtcaacaaaacatgaagaaccgtattaaagggtcaaaacattacgaaggttgagaaccactgttgtaaggcttgtcaaatcttactgattttctcaaagagccaactctgtttcattaattcttgctgttttttgtttatttatttctattttgttgatttcagccatgaatttgactatttcctgccttttactgttttttttttgttgttgttgttttgttttgttttgttttgttttgttttttttttgagacatggtttctctgtatagccctggctgtcctggaacttactctgtacaccaggctggccttgaactcagaaatctgcctgcctctgcctcccaagtactaggattaaggtgtgcgccaccatgcccggatcccttttactccttttgagtgtaattctttgtttcatcctagaactttcatgtatgctgttaagttatagtctgaaatctattcatttttaaaaaatgtctgcacttagtgctatgaacttgcctctttgaacagccttcattgtgtcccatatttcaggtatattctgaattcattttccttctagtctagaattttatattcaattctataattcattcaagtctctactttctatcatggcccacttttcattcagcagtgtgttgtccagtttctatgagtttgtaagctttctgttgttgatatccagttttagtctgtggtggtcagagaatatgcagggtgttatttcaattctcctgtatccattgagacttgctttgtgtctgagtctatgaccaattttggagaatgtttcatgaggttctgcaaagaaatatatttttgtgtttggttgaaatgttctggaaacaagtgctagatccatttgacttgcaactccagtcaaccccagcatttgtaggtttagtttttgtctggatgatctgtctattagtgagagtgtggtattgaagtctccaactatatgaattaaggtgtatttttgtgtttacaagcttatgtgccctggtttttgaaatgtcctcatagtggattttttctttgataagtatgtagtgtactttgctatctcttctgtttagttttgcaccaaagtctgttttgccagatattaaaaactggcttgtttcttgggtccattttcttagaatatctttttccatcttaccttgaggtgatatctatccttaatattgaggtgtgttttttatggatataatagaaggatgactcctgttttcagatccattataatagtctttgtgttttttattgggcaatgaagtccagtgacttttggagatatgaatgaacagtgtttgttgatacctgctatttttgttgttgttgttgtgagtgtatgtgtgtatgtacttctcaccctccatcttttcgatttttctggtctgggattctttattccttgtgtttatttggtgtaattagcatctttagattggagtttcctttccatggggctggatttgtaaatatatgttgcttaaatttgttgttgttgttgttttttatcacggaatcctattttctttatctagcatgattgaaagatttgctgggttcagtagtctgggatggcatttgtggtcccttagagtatataaaacatctagccaaggccatttggcttttagagtcttcactaagatatctagtgttattttaacaggtctgcctttataaattacttagtcttttccacttgcagctattagtatttttttgttctgtaatacagcattttgattatgtgccaagggaatttcttttctggttaatccatttggtctctatatcttttttgtatctttataagagtcttctttataaggttagagaaattttcttctaaaatattttctgtgcctttgccctgcatttcttctcctttctctattcctattactattagatttggtcttttcatagtgccccaggtttcatagatgttttgtgccaggagtcttttagatgtaactttttttttttttttttttttggtctgaggtatccatttcttcaattttatctcaaatgactaagatctcttcttccattcttgtgttctgttggtgagtgttgcctctgaggttcctgttggatttccagattttccatggttgaggtttctttatttattctatttttacttacagaacatgggctgttctgtttgtttactcccattgtttgtttgtgctttcataaaattctttaagggaattattcgttatctctttaaggctattttaaggtctttatcttgtgcttcaggtaggttgcaattctctgtggtaaggtagctggcctagtcaggacatgtcctggctgttattcattttgtttttatgctggcatctgggtatcttattttgtgaagattgaaattctaggcgctgatacttggtcttctctttgttgtatgggttttttggtccttggtttcttttgctctttctggtaattaagatggtgtggtagatgtgtgttacctagtagggactttttctcaatcttgatagatatttccatcgaggacagattcaaagtaaaacttgtttctaggtattgggagacgacacttaggaaaaaaggtgggctaggagaagtgagagggtctacaggaggccttatagtcttgtcagggtattccatcaggatatgcttagtcccttgggaactggggagagtgaggagagatcacagcagggagtctgctacacatctgggaataagatttggggactggatttggaggagaggacggagcaggaaagatttgtacttaacctcactgcttctctggccaggcagcctaactctttcccacattactcttctctctttctgtattccaggacaagtgggagaaaaaggctagtgagaataagagctttgacatcttctgtgacgtgggccacatggcactggacaccctcatgaagtgcacctttggcaaaggagacagcggcctaagccacaggtcaggagcacctctacctaaggctcacagataagaaaggtggaagggctcctggtctctgcttggagaggagatgggtcctgccttgatatgtccagagcctactcatggtgggagacacttttgttagtgaggaggcttaaggaggcaagaagaggaacaggaagtactgttgatagggattcctaaaagaaagctgctcaggcctctgcccctccctccactctcttctgtatagtgacaacagctactacctggcagttagtgacctcacactgctgatgcagcagcgcatcgactccttccagtaccataatgacttcatttactggctcacaccacatggccgccgtttcttgcgggcctgccagatagcccatgaccatacaggtaggcctttccctgaagccttccttcattcctccactccaggtaggaagcctttgttattcctctgggatcctctgaacccttcttgatgcagggccagtataggcagtgacggcacttatgctcttggtccagatcatgtcatcaggcagcggaaggcagctctgcaggatgagaaggagcagaaaaagcttcaggagcggagacacctggacttcctcgacattctcctgggtgcccgggtgagtgaacatagtccaccctgtctgacagctgctgccagggaagtctttaggctctcttcctgaagcagtgtccctgcccagcaagtataatgtattacccaaggcacagatcaacaacggtaaaatgtgcagcatgtgtgtggctgggctgtgacattagggaactggcagtctggatcacatggaagcatcttacagagttttctaaggtccctaacaatcttggcattgcagaacctcagaggcaagacttaacaattccctcttttccttccttccttccttccttccttccttccttccttccttccttccttccttcctttttccttccttcctccctccctccctcccttccttcctttttcccttcctttttctttcccttccaccctctctccttcctcctatcttttctttctccccagttcctctctcttttatgtcctccctcacctccttctttgattccacaaaactttgtgccgaacccaagttaattcctgtgcagagttaagaaagacctggtatggcctcagcatcggtaggagccatcttggttccatgagtccgccaaaagtagtctgcacaggtgagagtgtgcactcccaatgctaacagcttctgggacaggcgggagccacagagcttttgaggcagccacttttcaggctccagacatctgggcaccacacctgggcaccttcccggccagaggatatgtgtccgcctggcctgggagggctttgcctcagcatcagcaggagccatcttggttccgggactctgatgaaagtagtctgcacaagtgagagtgtggactatagaagcaaacagcttctgtgacaggccaaagcaacacagcttctgggacaggttctgttttgggcctaatcttgggctaggagggaggtccgaaagcagatatctgtgcactttccctgtaagaggagagcttgcctgcagagagtgctctgaccactgaaactcagaggagagagaaagtctcccaggtctgctcatagaggctaacagaatcaccagaggaacaatcactaaccagagacaactataacaattaacttcagagattaccagatggcaaaaggtaaacgtaagaatcttactaatagaaaccaagaccactcacaatcatcagaacccagcactcccacttcacccagtccagggcaccccaacacacctggaaagctagacctggatttaaaagcatatctcatgatgatggtagaggacatcaagaaggactttaataactcacttaaagaaatacaggagaacacagttaacaggtagaggacattaaagaggaaacacaaaaattccttaaagaattgcaggaaaacacaacaaaacaggtgatggaattgaataaaaccatccaagacctaaaaaggaaagtagacacaataaagaaaacccaaagtgaggcaacactggagatagaaaccctaggaaagaaatctggaaccatagatgcaagcatcagcaacagaatacaagagatggaagagagaatctcaggtgcagaagattccatagagaacattggcacaacaatcaaagaaaatggaaaatgcaaaaagatcctaactcaaaacatccaggaaatccaggacacaatgagaagaccaaacctacagataataggagtagatgagaatgaaaattttcagctcaaatgtccagcaaatatcttcaacaaaattatagaagaaaacttcccatacctaaagaaagagatgccaatgaacatacaagaagcctacagaactccaaatagactggaccagaaaagaaattcctcccgacacataataatcagaacaacaaatgcactaaataaagagagaatattaaaagcagtaagggagaaaggtcaagtaacatataaaggcaagcctatcagaattacaccagatttttcaccagagactatgaaagccagaagagcctggatggatgtaatacagacactaagagaacacaaatgccagcccaggctactatacccagccaaactttcaattaccttagatggagaaacgaaagtattccatgacagaaccaaattcacacattatctttccacgaatcacgcccttcaaaggataatagcagaaaaaaaccaattcaaggagggaaccatgtcctagaaaaagcaagaaagtaattcctcaacaaacctaaaagaagacagccacaagaacagaatgccaactttaacaacaaaaataataggaagcaacaattacttttccttactatctcttaatatgaatggactcaactccccaataaaaagacatagacttacagactggctacacaaacggacccaacattttggtgcttacaggaaactcatcttagggaaaaagatagacactacctcagaatgaaaggctggaaaacaattttccaagcaaatggtctgaaaaaacaagcttgagtagccattctaatatctaataaaatcgacttccaaaccaaagtcatcaaaaaagacaaggaggggcacttcatatgcatcaaaggtaaaatcttccaaaaggaactctcaattatgaatatctatgctccaaatacaagggcagccatattcattaaagaaactttaataaagctcaaagcacacattgcacctgacacaataatagtgggggtcttcagctcaccactttgaccaatggacagatcatggaaacagaaactaaacagcgacacattgaaactaacagaagttatgaaagaaatggatctaacagatatccacagaacattttattctaaaacaaaaggatataccctcttctcagcacctcatggtaccttctccaaaactgaccacataattggtcacaaaaaaacctcaacatatacaaaaatattaaaattgtcccatgcaccctgtcaaatcacatggactaatgctgatcttcaattacaaaataaataatagaaagccgaccttcacgtggaaactgaacaacactcttctcaatgataccttggtcaaggaaggaataaagaaagaattaaggactttttggagtttaatgaaaatgaagccaaaacatacccaaacttatgggacacaatgaaagcatttctaagaggaaaacttatatctctgggtgcccccaaaaagaaacaagagagagcacacattagcagcttgacaacacacttaaaagctcaggaacaaaaggaagcaaattcacctaagaggagtagatggcaggaaataatcaaactcaggggtgaaatcaaccaagtggaaacaagaagaaatattcaaagaatcaaccaaaggaggagctggttctttgagaaaatcaacaagatagataaacccttagccagactcactagagggcacagggaaagcatcctaatgaacaaaaacagaaatgaaaagggagacatagcaacagatcctgaagaaatccacaacaccattagattcttctacaaaagctattctcaacaaaactggagaacctggatgaaatggacaagattctacacagataccagctactaaagttaaatcaagatctggctaatgatctaaacagtcctgtatcccctaaagaaacagaagcagtcattaatagtctcccagccaaaaaaagcccaggaccagatgggtttagtgcagagttctatcagaccttcaaagaagatctaattccagttctgcacaaactattccacaaaatagaagtagaaggtactctacccaactcattctatgaagccacaattactctgatacccaaaccacaaaaagacccaacaaagatagagaactccagaccaatttcccttatgaatatcgatgcaaaaatactcaataaagttctcacaaaccgaatccaagaacacatcaaaacaatcatccatcctgaccagtaggtttcatcccagggatgcagggatggttcaatatatgaaaatccttcaatgtaatccagtatataaacaaactcaaagacaaaaaccaaatgatcatctcgttagatgcagagaaagcatttgacaaaatccaacacccattcatgataaaaatcttggaaagatcaggaattcaaggcccatacctaaccatgataaaagcaatctacagcaaatagtagccaacatcaaagtaaatggtgagaagctggaagcaatcacactaaaatcagggactagacaaggctgcccactttctccctatctcttcaacatagtacttgaagtcctagccagagcaattagataacaaaaggagatcaagggaatacaatttggaaatgatgaagtcaaaatatcactttttgcagatgatatgatagtatatatgagaccctaaaaattctcccagagaactcctaaacctgataaacagcttcaatgaagtagctggatataaaattaactcaaacaagtcaatggcctttctctacacaaaggataaacaggctgagaaagaaattagggaaacaacacccttctcaatagtcacaaataacataaaataccttggcgtgattctaactaaggaagtaaaagatctgtatgataagaacttcaagtctctgaagaaagaaattaaagaatatctcagaagatagaaagatctcccatgctcatggattggcaggatcaacattgtaaaaatggctatcttgccaaaagcaatctacagattcaatgcaatccccatcaaaattccaactcaattcttcaacgaattagaaggagcaatttgcaaattcatctggaataacaaaaaacctaggatagcaaaaactcttctcaaggataaaagaacctctggtggaatcaccatgcctgacctaaagctttactacagagcaattgtgataaaaactgcatggtactggtatagcgacagacaagtagaccaatggaatagaattgaagacctagagatgaacccacacacctatggtcacttgatctttgacaagggagctaaaaccatccagtggaaaaaagacaacattttcaacaaatggtgctggcacaactggtggttatcatgtagaagaatgtgaattgatccattcctatctccttgtactaaagtcaaatctaagtggatcaaggaacttcacataaaatcagagacactgaaacttacagaggagaaagtaggaaaaagccttggagatatgggcacagggggaaaattcctgaatagaacagcaatggcttgtgctgtaagatcgagaatcgataaatgggacctcataaaattgcaaagcttctgcaaggcaaacgacactgtaaataagagaaaaagaccaccaacagatcgggaaaggatctttacctatcctaaatcagataggggactaatatccaatatatataaagaactcaagaaggtggtcgctagaaaaccaaataaccccattaaaaaatgcggctcataactgaccaaagaattctcacctgaggaataccgaatggctgagaagcacctgaaaataatgttcaacatccttaatcataagggaaatccaaatcaaaatattccacctcacaccagtcagaatggctaagatcaaaaattcaggtgacagcagatgctgtcaaggttgtggagaaagaggaacactccttcattgctggtgggattgcaagcttgtacaaccactctggaaatcagtctggcggttcctcagaaaattggacatagtactactggaggatcctgcaatacctctcctgggcatatatccagaagatatccaaccggtaagaaggacacatgctccactatgttcatagcagccttatttataatagccagaagctggaaagaactcagatgcccctcaacagaggaatggatacaaaaaatgtggtacatctacccaacggagtactactcagctattaaaaagaatgaatttatgaaatttttaggcaaatggatggacctggaggatatcatcctgagtgaggtaacacaatcacaaaggaactcacacaatctgtgctcaatgataagtgcatattagcccagaaacttaggatacccaagatataagatacaatttgctaaatgcatgaaactgaagaagaatgaagaccaaagtgtggacactgtggcccttattaaattgggatcaaaacacccatggaaggagttgcagagacaatgtttggagctgtgatgaaaggatggaccatctagagactgccacatccggggatccatctcataatcagcttcctaacgctgacaccattgtatacactagcaagattttgctgaaaggtcccagatagagctctctcttgtgagactatgccggggtctagcaaacacagaagtggatgctcaccatcagctattggatggatcacagtgcccccaatggaggagctagagaaagtacccaaggagctaaagggatctgcaaccctataggtggaacaacaatatgaactaaccagtaccccctggagcctcgtgtctctagctgcatatgaatcagaagatggcctagtcattcatcagtggaaagagaggcccattgttcgtgtaaactttgtatgtctcagtgcaggggaatgacagggccaagaagtaggagtggttgggttggggagtgggtgggggagcgtgtgggggacttttgggatagctttcttatccttcctcagatttgtatccaacagctactgttgggcattcttctcatccctaactctcatcgtatcttctttcaggatgaaagtgggatcaagttgtcagatgcagacctccgggctgaagtggacacattcatgttcgaaggccacgacaccaccactagtggtatctcttggtttctctactgcatggccctttatcctatgcaccagcagcgatgtagggaggaggtccgtgagatcctaggggaccgggactccttccagtggtgagtgatctgagcatgagcttgacccatcttgctcagtccaggcacagcttgtacccgctctgccagtgcctacaaaagataacacacagctgttccagaggggaggtgatgttggcagcatttgtttcttattgttgttgtatagctttcttgcgggctaactatagatgtactctcctgccccagttcattctccccaaatgggggtttttcagtgtcacatcaagttgtcaacagaagctgaatttcgtaatgacagaatatgaatccacactgggtttctggatagagcagagacaactgagaaagagggggaagcaggagatgaaggtgagaagacagctgagaaagctaataatcccttgctgcctgctacctgcctcctgcctctggatgccagcacatagcccccagatgccacatttcttttaatggaaaaggagactaatttccaaataccaatacttaaaaacttctatgtgattcccccttctttgttcctcagctcaagcctgaagtcctaaatgtgacaccagcagaaaacttttctttcagagtggtctgggagtcgcacccagacctctcttgctgcttcctctttgtagacctttgtagcctgacagtcaccttctcccactgagttcctgatgtggctccagcactgtacaggacacatagaaggaatacagaaattggcctatcggcatcaggagtttctgttctcctaaggaggactgatctgtaattccagcgtcagagatgtgaaggacggagtctccataattgaagtttatttagtgaatgttggaaaccttccaaggggtccagcaatgaacaaagtactatctggagcacattgcaagggagaagaggagaggaggagccagtttgttcctcttgtgggagctttcagacagtcagactcacatgcttgaagtccagagaaggctgtaggagagtaacttcaagttgtctggatgttgagggtagaggggtgagaaggagaggggcttgaattgactttaaggaaggttaaacctcaggtgaagagagctgtacattcttggctaaataattatgtagatagtctgaggcaaagattaaatgcatattttattttcacttagttttatccagaatcccaagcaacatcaaggacacttatttaataaaataggacaagaaatgaaaagtcacaattatgagttgagtgatttggagtttgaggctctctaagaagatattatatatagttctgatggttgcgtctcacatttgggtttgagcttcctggtagccaaaggaatatttatatgactttatctttattcactcatggaaattagttggatcattcaactaaaaataatcaggctacctttttccattccaggcccacagggaagccaagcagaaattaaagaaatgttcttgtgctacttattaaggccctgtatgacacagaagtcacaaaagtgccttgcctttgagggttgggtgcacaaatgtctctagaatccttgccttctccttccatattgctaggtctacatgaccacccagtgttacattacacttaggcacttggagcctctatgactcctctgttggaagtatggtagtgataggaaatgaaaacaatatggtggtgaagttggtgatggggcctaccctctcctgggaccacactgctcctagttcttaagtgtcctgtgttgctggcagggatgatctggcccagatgacctacctgaccatgtgcatgaaggagtgcttccgcctctacccacctgtaccccaagtgtaccgccagctcagcaagccagtaacctttgtggatggccgctctctacctgcaggtaggttgctggaaacagtgagggtggaatgaaagtcctctggacgctgtttagtattgtctgtatcactggaccatctttacaccatgtggagagagcttaggctttgtgtgcagagccctgggccccaagcaccaggctcacagtgtatgggtaaacttgcctctgcccccaaacatccaactttccaactccctcttctataaaaagaatataaagtttattttccttttaggtttcacggtagttatatggatttatttttctgtggattgaaataacaaggatatatatatatatatatatatatatatatacatatatatgtatatatatatacacatatatgtatattatacacacacatacatacatatacatatgtaaatgtatatatataggaataggtatacgtatgcctatacatatatattagtgagcattccatagcttcagtaatagtgtcaggccctggcaggagttcttgtagcttgaaaattgtctctttctctattttcttctgtttaaaactatattaaattattctactgtcgtactattgtggccttgacaagatcagggagatgatttgcatacactatgacacaatgcacgtacatgtccaattctgtgtaatggcttcataagtgttcatctctgagcctgacatagtaagcatcaaatggatattatctcttattactaatagcacaataacttcctgggatattggagctgctgctgctgattattattattaaagtactttgattgtgaccaagagcacagtgtcactggcagtgaacaaacaggcagaggctggtgtccaagataaggggacattaggggacacaggcctaatgtggaggtggcctggctgcttcatgatcccttgttattagacctcattttgcttacaggcagcctgatctctctgcacatctatgccctccatcggaacagtgctgtgtggcctgacccagaggtacagtgtctctgggcctggaggttagacagggtatgggttaccctctgccaggatttggtgagtacttaataaagccctatctatctccttaggtctttgacccactgcgcttttctcctgagaatatgacaggacggcatccctttgccttcatgcctttttctgcagggcccaggtaggtagagacacaacattaacaggccctcatgactggggaggaaaagtgaaggccatgtgtgtgtgtgtgtgtgtgtgtgtgtgtgtgtgtgtgtgtgtgtgtgtgtctgtgtgatcatcttgcagtgctctgtaacaagggggcccttttgctattttttcctgttcctaggaaataggtgggacagctgttttcattctgtgagagactgaaagccagagctcccaatgtgaagctacccactgggactttttaccatgctcctaagatttgtgtttttaaagcccacatcaacaaatcaaccagccattgtgtgtccaaaactcgttattgttttttgtgggcctctaagaacactaacctccatcactctggttagccaacagcttgatgcttctctgtgttgtttgttgcaggaattgcattgggcagcagtttgctatgaacgagatgaaggtggtcacagccctctgtttgctgcgctttgaattctctccagatccctcaaagatccccattaaggtcccccagctgatcttgcgctccaaaaatggcatccacctctacctgaagccactgggccctgggtctggaaagtaggtcttaggagagcaaggatatggagtcattgtggatccctgcctgtggggggtttgtgagataaaagcatgcacattgagagtatcctggaagacattctcttgtaaacatgtgtgtggaatgattcaatgcctgggctttcaaactcattccttcactccacaaatatttgctgaatgtttccctgtcttgagaaacttcatttatttctcataactgcatttatttagccatctcagtgtgcattttggatataatagacataaggaaaattgcttaaactaaatctgtacaaaataaataatactttaaaaagcaaatactcaccactgaattcaaagaatatgaaatatgtttttactggcaggatgtctttcttgggatgtgtctctgtggtacttctaggtgttggtgtttcacagttatatagggctttgggcagtcacagtaactcttgggaaggtggtacaataacattaaaggggggcttcccaggaaagaggaaactcgtttctataaggcagggaatgaagatgcaaagtacttctgaggtgaagttcaggttggggcctacatatgatttagaggtcctgccttagcagtctctgcagcggcttcttgatggctatgggtacctatgtcactaggggtcaatgtctaaggtcactacactaggaggatcaaatcttggaattagccccacatggaaagagggcaccagaagctaggatcagaaataggagccaggaattttatccctgagacttggtaaagtttttagggcaatggttcttcaccattgaaaggccacatcccctttgataggaatgacccttttacagggtccaccaacactaatcagaaaacacagttttaatattatgattcattacagtagcaaaattacatttatgaagtagcaatgaattaattttatggctggggaggggtccccacaacatgaggaactgtattaaaaggtcaaagcactaggaaggttgagaactactgctctagtgcatcttgggaaatgtgccatatacctttcctaataccaattcttttcagattggaagaaggccatagcttataatttctgccctaagatactttctaactcctctaaagccatccctgttcactagaagctgggttgtaaaggtcccattatattatgcctattagctataagccttaatgtaactaacttgcccttttgtcctagcacacagataaacggttctctgtgggaccatgaaaggcagcctgtttcatgattgagctaggtttaaaccccagagccccagcagataagtctgcaagggatggaagaaagttgcccacgcccccagacaccaggctcctgacttgaggctccagctctccataattctgtggccatcagtcatgtagggcaatgccccaagcccctgttgtttgtctggactccacctccatagttacctggcaatagccaggtaggcctggtctgctataaaaggggctgcttgctccattcttcctctcttcctctcttattctcttactcttgcctctctctcttccctcttgctctccctctctccacattccctccctcccccttcacatggccatggcttctctactttctccctctgcctttctctgcctctactaccctcttagctcccctgccttcatgatagtaaatgctttaaaactatgacctgcctcttctcatagggatctgttgtgctggagcaacagagcaggtcttcctctaaagagcatccatctaatcttcccgaggaggcctccctgtgctctcagacatggcttccaccaaccaagacatcgctggacaaaccaaggactctcgttcctgtgacccagctggagtgcttccccttgcccttttccctttcaggccagggtcagccccacaggcccacactctgttctcagctctttctgagcatccagaagtgttcgccatgtccaagagctagagcctgctgtccctggcctctgtgtggcctgaggacctatgagcaagctaatggcagtgcttccccacccctggagtggcatcctgcagcttctcacagcccaacgcccacccagtggttgtgttgggtgtgtgaagtcaaactccccatgtctgcctccatgagcagtccaagccctgtagtgtgctgtatgcaggaccccattttaacccacagttctctaaccaatgtagtaatatttcaacatttatcaagtgggtggtgattgtccagtcataaccatcatgtgtctcttggtcaggtgctgagtatccagtctgtcctctcctgactttctaagaatcagcctgcactagctcagcatgctggtaggtaaggagaataggaaggagtcctggttgcatcagtggctgcacaagaagccctccccaggaagcagaacatggcatatcagggaaacagagaactcatcatggagcctgatccaggaacagtttcaagcaacatgggaacctgtgttcagattcatcaagagaagacaaatgctgtgcatgacactgggaactttattgcagaaaggagggaagatggagaaacttgtgtgaggaacaatcaggtagagagagattatgcaggggagatttagatactaggctgaataatggcttcacaatgatgttcaggtgttgagttttggagcccatggtacaaattgaataattcctcataattcaaaagggacttagtaggttacctcaaataagatacatttagatgggaaaactatcttggagtttttaggggtcttgatgatgtcataagcgtttgtaaaagggaaggacattagaagagaggggatgaggagggtgctggctttgaagcaggggaatattccagtgccgaggaatgttgatctatactgaacagaggttgagaggactctctggagtattcttctgaaaaaggtaggtcacaccaacaacttagctttctccagtgaaactcttctcagacattggagctccacaactgtaagataataactttcaattatttcagatcactaaattgtgacaatttattattggtagaatggagaagtcatgtagggaaaaataagatggtgggaagtgaagaggcaagaagagaaggctggaggagagaggaggttcatgatcaggtgcacggtcagatatgggtatctggagacagaaagacaaatggggaatcatggggaatctagagcaaggtgtgtgtgtgtgtgtgtgtgtgtgtgtgtgtgtgtgtgtgtgtgagagagagagagagagagagagagagagagagagagattgtgcaggaggcagggaacaaataggtgtgaagaaagatatacagagaggaagatggtggcaggacaagatgtcaggcagcatgtttatagagtctgtccttgtccttaccagaatcagtggagcttcttgagatgtaggtagatcccatttttggacttcagcacaattcgtgctaagggctcgggaaccctggtaggatctggcagtagctcgaagtggagcagtgtcagggccacaatcaccttcagctcactcatagcaaattgtttcccaatgcagttcctgggtcagaaagggacaatacaactcattagcctcttacctgttttaagggctgatccttgaaacagcacagaacaacattcagggcctattgtcacaggttcagtctaacagctgtgactacaggtcataccttcttttaccctaggtcttgtctctcctaaatttttgacatagcctcaacatttttcaaggccactttgaccctatttctttaagtggtatgaaatctgttaggccagtattttaaggactataggtcaaacttatagataattaatatgttaatcattgcttagtttacgccattcagggagatctagcacatagcttccacagagtggaatcagattatcagtagaaaagttgctacaggaagactgtgttgaggatcttcaagtggctaccccatctgcctcctacttagggtatcccacctccttaatccatcagcatctatagccttctaattctgcttcagaaatgttcaccattccttcttcagttttatttcctggacttctttggtctccctgatactccttccatgctgacccttgatacctccaccatgtaaggtatgttcagtgcctagttgcctcttcaggttatatatccccagtgtagtgagtcacagataaggtcattcccattgattcttagggtcttcccatatcccaggtctctgtctcatcccggagatgcccctacctccccacccaagtcagttgcaaatatccattcattttcatgtccaactagcgatctttcctgatggctagtccttccccacacctgatcatgaaccacttttcccttccccatactccctcccagttctctccctccatttgcttcttatgactattttattccctcttctaagtaaaatttgagccctgtcatttgggccttccttcttgttgagcttccctgttgcctctatgtgagatgtgttcttctagctgggctgtattgtctggcctcaatgagagaggaagtgcctagtttcacagagacttgaagtgccagagttgaggggggatactcagggggacccctacctgcacagaggtgaggggaaggggtgagttggaaaggggaagattatatgaggcgtcactggaagggagtcagtgagtggaatataaagtgaataagtaaaaagaaaattaaacaatccaaagcaaaacaacaaatgcctaactgcagctctatcctcttctggctgctgctctcatctctttcctgcctatcccacttcctacttaagatcaagctgttgaggtgtttgaacatgtctcccccacctccactcccccaccccacccctaggcttcatatttctgaagctcaggtcaatgagcagctggctcttacttttttgatgactgtccctgttcttctaagtacctatggtaccatccgtgccatatacaaggacatgccacaatcagggcatgggatgatggcaggaacatggaatgttttgcaaactgctaagtgggcaagtggaagaatggaggatgaatatattttaattacagatatatttgtctttgtagatgacagttttgaactcttagaggcaggaagggatagtatcactattcctatgtttttatgtagcaaagcacccgacacataggagtggtttaaactttattttacatttaaaaataattattttccttggttcttaatatttaatttatttaaatttaaggaatgaaaaaaaatagagtgaaatacaataaaaaattttaaacttctgaccaaagcaagctgggggagcctgtgactgaattccagtagttgggaagtagagggagagagaccatgagctccagacaagcctgagactctgtattagaaagcaccagcagcagcatggttcattccaacttaatctgagttggccaatactctcctggcttctagtggcagagacatggcttgcagtgagtggcaagcagatcattcaatcctgaagtacatcaagtgtgtgtgcatagcccgtgcttgaagaacaatttacttatagcctgttctgtgaaagctgatttgccattttatgaattcatgagacccttcttctgtaccacctttgaaagtttacagtgagtcgggtcccaagggacaatttccctggaagccatcagaaagtctttgtccagttcagtagctatttcaagagtgtcttttattttacgcactagaaacttcaaatattctaagtgaaacagaggatttacttaaaagcagactactttcctcctttttaatgccttttgtctgaagttagactatatatcctctaagtgtaaattaaagactatacattttctaccaagttttggcctatgtgcaacagcaagagagatgtgagcattaactttgattcaagaattgtgttgggacacatctaaaagctctagaaaaaaaaagaagaaaattcacccaagaggagtagaaggcaggaaataatcaaactcagggatgaaatcaaccaagtggaaacaagaagaactattcaaagaattaaccaaatgaggagttgtttctttgagaaaatcaacaagatagataaacccttagctagactcactagagggcacagggacaacatcctaattaacaaaatcagaaatgaaaagggagacaacaacagatcctgaagaaatccaaaacaccatcagatccttctacaaaaggctatactcaacaaaactggaaaacctggacgaaatggacaaatttctagacagataccaggtaccaaagttaaatcaggatcaagttaacgatctaaacagtcccatatcccctaaagaaatagaagcagtcattaatagtctcccagccaaaaaaagcccaggaccagatgggtttaatgcagagttctatcagaccttcaaagaagatctaattccagttctacacaaactattccacaaaatagaaacagaaggtactctacccaactcattctacgaagacacaattattctgatacctaaaccacagaaagatccaacaaagatagagaacttcagaccaatttcccttatgaatatcgatgcaaaaatactcaataaaattcttgctaaccgaatccaagaacacattaaagcaatcatccatcctgatcaagtaggttttattccaaggatgcagggatggtttaacatacaaaaatccatcaatgtaatccattatataaacaaactcaaagacaaaaaccacatgatcatctcgttagatgcagaaaaagcatttaacaagacccaaaacccattcatgataaaagtcttagaaagatcaagaattcaaggcccatacgtaaacatgataaaagcaatctacagcaaaccagtagccaacatcaaagtaaatggtgagaagcttgaggcaatcccactaaaatcagggactagacaaggctgcccactttctccctacctattcaacatagtacttgaagtcctagccagagcaattagacaacaaaaggagatcaaggggatacaaattggaaaagatgaagtcaaaatatcactttttgcagatgatatgatagtatatataagtgaccctaaaaattccaccagagaactcctaaacctgataaacagcttcggtgaagtagctggatataaaattaactcaaacaagtcaaaggcctttctctacacaaagaataaacaggctgagaaagaaattagggaaacaacacccttctcaatagtcacaaataacataaaatatcttggtgtgactctaactaaggaagtgaaagatctgtatgataagaactttaagtctctgaagaaagaaattaaagaagatctcagaagatggaaagatctcccatgctcatggatcggcaggatcaacattgtaaaaatggctatcttgccaaaagcaatctacagattcaatgcaatccccaccaaaattccaactcaattcttcaatgaattagaaagagcaatctgcaaattcatctggaataacaaaaaacctaggatagcaaaaactcttctcaaggataaaagaacctctggtggaatcacgatacctgacctaaagctttactacagagcaattgtgataaaaactgcatggtgctggtatagtgacagacaagtggaccaatggaatagaattgaagacccagaaatgaacccacacacctatggccacttgatcttcgacaagggagctaaaaccatccagtggaagaaagacagcattttcaacaaatggtgctggcacaactggttgttatcatgtagaagaatacgaatcgatccattcctatctccttgtactaaggtaaactctaagtggatcaaggaacttcacataaaaccagagacactgaaacttatagaggagaaagtggggaaaagcctcaaagatatgggtataggggaaaatattcttgaatagaacagcaatggcttgtgctgtaagattgagaattgacaaatgtgacctcatgaaactgcaaagcttctgcaaggctaaagatactgccaataagacaaaaagaccaccaacagattgggaaaggatctttaccctatcctaaatcagataggggattaatatccaatatatataaagaactgaagagggtggactccagaaaatcaaataaccccattaaaaaatggggctcagaattgaagaaagaattctcacctgaggaataccgaatggctgagaagcacctgaaaaaatgttcaacatccttaattatcagggaaatccaaatcaaaacaaccctgagattccacttcacaccagtcagaatggctaggatcaaaaattcaggtgacagcagatgctggcgaggatgttgagaaagaggaacactcctccattgttggtgggattgcaagcttgtacaaccactctggaaatcagtctggcagttcattagaaaattggacatagtactaccggaggatccagcaatacctcttctgggcatatatccagaggatgtaccaaccggtatgaaggacacatgctccactatgttcatagcaaccttatttataatagccagaagctggaaagaacccagatgcccctcaacagtggaatggatacagaaaatgtggtacatttacacaatggagtactactcagctattaaaaataatgaatttatgaaattcctaggcaaatggttggacctggagggcatcatcctgagtgaggtaacacaatcacaaaagaactcatataatatatactctatgataagtagatattagcccagaaacttagtatagtgatatataaggtacaatatgtaaaacacatgaaactgaagaagaacgaagaccaaagtgtggacactttgccccttcttagaattggaaacaatcacccatggaaggagttacagagacaaagtttggagctgtgacaaaaggatggaccatctagagactgccatatccagggagccatcccataattagcctccaaacgatgacaccattgcatatagtagcaagtgtttgttgcaaggaccatgatatagctgtctcttgtgagactatgccagggcctagcaaacacagaagtggatgctcacagtcaactattgaatggatcaccgggccccaatggaggagctagagaaagtatccaaggagctaaagagatctgcaaccctgtaggtgcaacattatgaattaaccagtaccccagagctcttgactctagttgcatatgtatcaaaagatggcctagtcggccatcactggagagagaggcccgttggacaggcaaactttatatgccccagtacaggggaaagccagggccaaaaaatgggaatgggtgggtaggtgagtgtgtgggggagggtgtgggggactttggggatagcattggaaatgtaattgaggaaaatacgaaataaaaaaaaagaattctgttaggaaagagtgcagaggtggaatcaccatatcctggtatgtaccttacctcaaacgacccactgtaacacttcacgtatctcattggacagttgcttgcatgtcattggctagcagacatgcaagcaaatgaattacttgtacagtgattccagaataaataattacccaggaatggtgatgggtcaggtctaggtgtggaaaagacaagctttttaagagccctaaaatttgacaagctagacacctaaagttaaagtcacttaaaaaacaaacaaataaacaaacaaacaatgtaaagtcctgcctttaaagtggggataatatcagaacacatgcaagtgcgtggcatccactgacataaatttgtttgaccaatggattgatgtcttcatagtgtgtgctgaagtgctaccctcctttagggcacagacacatcctcaagaagctcctccccctcccatagccaccaaatcaggatatacttggagatgtcatatatgcaggagaccaaaaacaaggtatgctgcaaatattctccacagtatattccatcatcatacacaggatctcacctggctcctcctgagaagggcaggaatgagtggctgtgtcggggagagtctggtgcaaacctggaagggtcaaacacctgcagggagacagcatgtcagtcaggacaggtagaggtcaattgcaacccacaaggggacaatatgcccagaggtgggaacaataggaggtatttattggtcttgagaccaactcttctgccct

SEQ ID NO: 718 - DNA, 1901 bp, Mus musculus
ggtcctgcgagtttagccatggcgctcagctttctctctccaagcctttcccgcctcggcctgtgggcttctgtagtgatcctgatggtaaccgtcctgaagctcctcagcctgctgtttcggaggcagaagctggccagggctttggacagcttcccagggccccccaagcactggctttttggtcatgcccttgagatccagaagacaggaggcctggacaaggtggtaacttggaccgaacagttcccctatgcccacccactctggcttggacaatttattgttttcctgaacatctatgagcctgactatgctaaagctgtatacagccgaggggacccgaaggctgcatatgtgtatgacttcttcctccagtggatcggaaaaggcctactggttctggaagggccaaaatggttccagcaccgcaagctgctcacacctggcttccattatgatgtgctgaagccctatgtggccatatttgctgagtccacacgggtgatgctggacaagtgggagaaaaaggctagtgagaataagagctttgacatcttctgtgacgtgggccacatggcactggacaccctcatgaagtgcacctttggcaaaggagacagcggcctaagccacagtgacaacagctactacctggcagttagtgacctcacactgctgatgcagcagcgcatcgactccttccagtaccataatgacttcatttactggctcacaccacatggccgccgtttcttgcgggcctgccagatagcccatgaccatacagatcatgtcatcaggcagcggaaggcagctctgcaggatgagaaggagcagaaaaagcttcaggagcggagacacctggacttcctcgacattctcctgggtgcccgggatgaaagtgggatcaagttgtcagatgcagacctccgggctgaagtggacacattcatgttcgaaggccacgacaccaccactagtggtatctcttggtttctctactgcatggccctttatcctatgcaccagcagcgatgtagggaggaggtccgtgagatcctaggggaccgggactccttccagtgggatgatctggcccagatgacctacctgaccatgtgcatgaaggagtgcttccgcctctacccacctgtaccccaagtgtaccgccagctcagcaagccagtaacctttgtggatggccgctctctacctgcaggcagcctgatctctctgcacatctatgccctccatcggaacagtgctgtgtggcctgacccagaggtctttgacccactgcgcttttctcctgagaatatgacaggacggcatccctttgccttcatgcctttttctgcagggcccaggaattgcattgggcagcagtttgctatgaacgagatgaaggtggtcacagccctctgtttgctgcgctttgaattctctccagatccctcaaagatccccattaaggtcccccagctgatcttgcgctccaaaaatggcatccacctctacctgaagccactgggccctgggtctggaaagtaggtcttaggagagcaaggatatggagtcattgtggatccctgcctgtggggggtttgtgagataaaagcatgcacattgagagtatcctggaagacattctcttgtaaacatgtgtgtggaatgattcaatgcctgggctttcaaactcattccttcactccacaaatatttgctgaatgtttccctgtcttgagaaacttcatttatttctcataactgcatttatttagccatctcagtgtgcattttggatataatagacataaggaaaattgcttaaactaaatctgtacaaaataaataatactttaaaaagcaaatactcaccactgaattcaaagaatatg

SEQ ID NO: 719 - protein, 511 aa, Mus musculus
MALSFLSPSLSRLGLWASVVILMVTVLKLLSLLFRRQKLARALDSFPGPPKHWLFGHALEIQKTGGLDKVVTWTEQFPYAHPLWLGQFIVFLNIYEPDYAKAVYSRGDPKAAYVYDFFLQWIGKGLLVLEGPKWFQHRKLLTPGFHYDVLKPYVAIFAESTRVMLDKWEKKASENKSFDIFCDVGHMALDTLMKCTFGKGDSGLSHSDNSYYLAVSDLTLLMQQRIDSFQYHNDFIYWLTPHGRRFLRACQIAHDHTDHVIRQRKAALQDEKEQKKLQERRHLDFLDILLGARDESGIKLSDADLRAEVDTFMFEGHDTTTSGISWFLYCMALYPMHQQRCREEVREILGDRDSFQWDDLAQMTYLTMCMKECFRLYPPVPQVYRQLSKPVTFVDGRSLPAGSLISLHIYALHRNSAVWPDPEVFDPLRFSPENMTGRHPFAFMPFSAGPRNCIGQQFAMNEMKVVTALCLLRFEFSPDPSKIPIKVPQLILRSKNGIHLYLKPLGPGSGK

SEQ ID NO: 720 - DNA, 40658 bp, Homo sapiens
gctttgttaaaaaagtgcttgatggcaatatgcttggtaaaagtcatcgccattctctaatctcaagtacccagggacacaacacactgcggaaggctgcagggtcctctgcctaggaaagccaggtattgtccaaggtttctccacatgtgatagcctgagatacggcctgaccatcccccagcccgacacctgtaaagggtctgtgctgaggaggattagtaaaagaggaaggcctctttgcagttgagataagaggaaggcatctgtctcctgctcgtccctgggaatagaatgtcttggtgtaaaacccgattgtatgttctatttactgagataggagaaaaccaccttagggcttgaggtgagacatgctggtggcaatactgctctttattgaaccgagatgtttgtgtgcatgcacatcaaggcacagcacatttccttaaacttatttatgacacagagacctttgttcacatgttttcctgctgaccctctcctcactattaccctattgtcctgccacatccccctctccaagatggtagagataatgatcaataaataccaagggaactcagagaccagtgcaggagggcacaggtactccatatgctgagtgcaggtccctttttctttctttctgtcttttctttctttcttttctttctctatactttgtctctgtctcttatttcttttctcagtctctcatcccacctgaggagaaacacccacagtttgtggaggggctggcccccttcagataagagacaaatggttgcattcttttgagtttctgattagcttctccaaaggaggcagtcagatatgcatttatttcaatgagtagagggatgactttgaatagaattggagacaggtttgccctaagtagttcccaacttgacttttccctttagttagtgattttgggggcccaagatttatttttcttttacaaggataagacaaagataagagaaataactgctacaagactgaaagtgaatgcagctaagaaaagttgcagactgaggtggaagatttagaaaactggcctaattggcgtttctgaagtggaggcgtgtggaggatggcatcctggaggaagagagcagttaggaaggacttggataaaggcggtctcattatgtccatctctttgcagcctcccttccctactcccataaccccagacctcttcagacacatgggaattaatctttgctaaaggcctaaagatttttttcccaaggagtctgaaagggaggcttctagtcttgccctacagtcctgtataacggagatctcttaggcaagtaccagtggtcaaggagagctgctatagtaactctgcagcccgggggttaggatcaatggtatgtttgaaagtgtttaacaactggcttctcaggggaaaaagtgggatttgtagcatttgccaatttctgtcatgtaaatattaaatactcctatgatagccaatttcaagctgctaatgtgacaccaaacctagagttgggaagtgatatacacaatctgctcttgagagccagtgccagcctgttcagtacactaatggactgggggccatctacaagccttttttttttttttttttacagttgaagttttctatgggactcttaaaggaagaactaagactactgggtggaagcttccaagaactttggcttccacaaatcacactgccaagatggtcagggtatgtagctagtaggatcaggacctgggagttgactgaagcctagcctctggctctggtcacatgatgacttgttttttgccctaaaaatgtgggtggctgccagatttcagccaaggggtggagagcagggtgtatggaaaatagatcacgagtgctgggctatatttctggcaggagaaggtatgtaggacctctgaggcacaagcaacatccaccctgctcattctccctctgacttcctctccctgcctgccaatccacactgagctccagcccccttgcaccccaccagccttgagtcatgccttctgccacctccctgtccaggtttgtcatcttccacaaagatcagtgcattgatagcttcctctctcctctccaacccttctgcaggccccacccccaccagcccaagtcattgcacacatacagaggaggtgatctttctggacctcacctctgatcacccttgtctctctgcttaaggccctctccatggccccctgcagcctagaagacaaagtttagtctccttacccctctatgctaaccctgcacttgacactccagtttcctaacatgttcctctcctttgtgttttctgcttgataatgtctcagatatctgcttcttctctaaactatgcccctcactttcaccatatccagattattgcttgctcctatcttatggaagctttgcccaggctaataccacttagaacttctctatgaactccctcagtatttcccaggcaagccccactgctcaaaatgtaccaagataatcccacttgtcccttcccaggttaatttcattcagtttgtcccaagctaaccccctaaatatgtttcagcccaatttagccaaggctttctcattttcccaggttttccctagtatatcacatagaaatactttggtttcaagcagcagaaaacccaactcagattgaatttaaacaaaggcgatttgttggttcatgtaattaagagtcaaagcgttggcctaggcaaagaatttatgactaaatcctcaaaagtaaatgcaaaaaaaaaaacaaaaattgacaactgggacctaattaaactaaagaaacaacaaaagaaactatcagtggccaggcgcagtggctcatgcctgtaatcctagcactttgggaggctgaggggggcggatcacgaggtcaggagatcaagaccatcctggctaacacagtgaaaccctgtctctactaaaaatataaaaaattagccaggcgtggtggtgggcacctgtagtcccagctactcgggaggttgaggcaggagaatggcatgaacccgggaggtggagcttgcagtgagccgagatcgcgtcgctgcactcagcctgggtgtcagagtgagactccatctcaaaaaaaaaaaaaaaagaaagaaagaaactatcaacagggtaagcagacaagctaccgaatgggagaaatattttcaagctatgcatccaaaaaaggactaatatccggaatctataaggaacttaaataaatcaacaataagcaaccccattaaaaagtgggcaaaggacatgaataggcacttttcaaaagaagacacacaactaactgagaagcatatgaaaatgcttatcatcattaatcatcagagaaatgcaaatcaaaaccacaatgagatgccatctcataccagtcaaaatggctattaccaaaaactcacaaaataacaggtgttggcaaggttgtagagaaaagggaacacttacacactgttggtggaaatgtaaattagttcagccactgtggaaagcagttggagatttctcaaagaactgaaaaaagaattaccattgacccagtaatcccaaaggaaaataaattgttctaccaaaaagatatctgtacttgcatgtttattgcagcactatctgtaatagcaaagactcaatggaatccacctaggtgcccatcagcagtggatcagataagaaaaatgtggtacatatacaccatggaatactacacagccattacaaataatgaaatcatgtcctctgtggcaacatggatgcagctggaggtcacttttttaagtgaattaatgcagaaacagaaaactgcatgttctcacttataggtgggagctaaacactgggtacaaatggacataaagagggaaacaacagccactggggactccaaaggtggggagggaagaagagcagcaagggttgaaaaacttcctattgggtactatgttcactatttgggtcatgggttcaactgaagcccaaacctcagcatcatacaatatagccatgtaacaaatctgcacatgttcccccgagtctaaaaaataaaatgaaataaaataaaatgaaataaaataaaataaaaagtgaaaggtaattctagcttcaggtgaagcttgatccaggagttcaaacaatgtgactgatatttagttccttttagtatgtttctcagttctgttgctatggtgttgagtacattcttgtctgcctctttccacattgatggcttctgagattacatgctctaggatcgaattcaatattaaagagagaatctgtttcaagatagcttaaattaaatactggaaatagatttcattcgccctgattggctgactttgttcgtgtgcctattcttgaaagaatcaattattgtgggcaagatgaatgcagactatgttaaataaatataagaccatactggagttgagggtgagggcaatctgaatgcacccaaggcttgcaaattcatggtactgggtggaagggggaagcaaggaatggatgctggggagtcattcaactgacgtccactctacccactcaacatcttctaggctaaccctattcccttcccaggtgaatcctatgtggtccttgccaggagccatggctctttcatcaggtgggagcccatttaggctctccctgaaacactccatcatatgaccaggctgaaactatgctgataaatgaattcaccatcaagaatggaattctgctgatagctcatcatgtttctttattctctgactcaagtgacttgctttttaaaaatttttaaaatatactttaagttctagggtacatgtgcacaacgtgcaggtttgttacatatgtatacatgtgccatgttggtgtgcagcacccattaactcgtcatttacattaggtatttctcctaatgctttccctcctccccccgccacctgacaggcaccggtgtgtgatgttccccatcctgtgtccaagtgttctcattgttcatttcccacctatgaacaagaacatgcagtgttttgttttctatccttgtgatagtttgctcagaattatggtgtctagcttcatccatgtccctacaaaggacatgaactcatcattttttatggctgcatagtattccatggtgtacatgtgccacattttcttaattcagtctatcattgatggacatttgggttggttccaagtctttgctattgtgaatagtgctgcaataaacatacgtgtgcatgtgtcttcatagcagcatgatttataatcctttgggtatacacccagtaatgggatggctgggtcaaatggtatttctagttctagatccctgaggaatcaccacactgacttacacaatggttgaactagtttacagtcccaccaacagtgtaaaagtgttcctatttctccacatcttctccaacacctgttgtttcctgactttttaatgattgccattctaactggtgtgagatggtatctcattgtggtttagatttgcatttctctgatggccagtgatgatgagcattttctcatgggtctgttggctgcataaatgtcttctttcgagaagtgtctgttcatatccttcacccactttttgatggggttatttgattttttcttgtaaatttgtttaagttctttgtagattccggatattagccctttgccagatgggtagattgtaaaaattttcacccattctgtaggttgcctgttcagtctgatggtagtttcttttggtgtgcagaagctctttagtttaattagatcccatttgtcaattttggcttttgttgccattgcttttggtgttttagtcatgaagtccttgcccatgcctatgtcctgaatggtattgcctaggttttcttctagggtttttatggttttaggtctaacatttaagtctttaatccatcttgaattaatttttgtataaggtgtaaggaagggatccagtttcagctttctacatatggttagccagttttcccagcaccatttattaaatagggaatcgtttccccatttcttgtttttgtcaggtttgtcaaagtttagatggttgtagatgtgtgatattatttctgagggctctgttctgttccattggtctatatctctgttttagcaccagtaccatgttgttttggttactgtagccttgtagtgtagtttgaagtcaggtagcatgatgcctccagctttgttcttttggcttaggattgacttggcaatgtgggctcttttttggttccatatgaactttaaagtagttttttccaattctgtgaaaaaaagtcattggtggcttgatggggatggcattgaatctataaattaccttgggcagtatggccattttcatgatattgattcttcctatccatgagcatggaatgttcttccatttgtttgtatcctcttttatttcattgagcagtggtttgtagctctccttgaagaggtccttcccatcccttgtaagttggattcctaggtattttattctctttgaagcaattgtgaatgggagttcactcatgattttgctctgtgtttgtctgttattggtgtataggaatgcttgtgatttttgcacattgattttgtatcctgagactttgctgaatttgcttattagcttaaggagattttagattttgggttgagatgatagagttttctaaatatgcaatcatgtcatctgcaaacagggacaatttgacttcctcttttcctaattgaatgccctttatttctttctcctgcctgattgccctggccagaacttccaacactatgttgaataggagtggtgagagagggcatccctgtcttgtgccagttttcaaagggaatgcttccagtttttgcccattcagtatgatattggctgtgggtttgtcataaatagctcttattattttgagatacatcccatcaatacctaatttattcagaatttttagcatgaagggctgttgaattttgttgaaggccttttctgtatctattgagataatcatgtggtttttgtctttggttctgtttatatgatggattacatttattgatttgcatatgttgaaccagtcttgcatcccagggatgaagccaacttgatcatggtggataagctttttgatgtgctgctggattccgtttgccagtattttattgaggatttttgcatcgatgttcatcagggatattggtctaaaattctctttttttgttgtgtctctgccagattttggtatcaggatgatgctggcctcataaaatgagttagggaggattccctctttttctatcgtttggaatagtttcagaaggaatggtaccacctcctctttgtacctctggtagaattcggctgtgaatccgtctggtcctggattttttttgattggtaggctattaattattgcctcaatttcagagcctgttattggtctattcagggattcaccttcttcctggtttattcttgggagggtgtatgtgtccaggaatttatccatttcttctagattttctagtttatttgcatagaggtgtttatagtattctctcatggtagtttgtatttctgtgggattggtggtgataccccccttcattttttattgcgtctatttgattcttctctcttttcttcattagtcttgctagcggtctatcaattttgttgatcctttcaaaaaaccagctcctcgattcattgatttttttgaagggttttctgtgtctctgtctccttcagttctgctctgatcttagttatttcttgccttctgctagcttttgaatgtgtttgatcttgcttctctagttcttttaattgtgatattagggtgtcaattttagatatttcctcctttctcttgtgggcatttagtgctataaatttcctccacacattgctttaaatgcatcccagagtcaagacccatcagtgtgctatattcaggagacccatctcatgtgcagagacacacataggctcaaaataaagggatgggggaagatctaccaagcaaatggaaaacaaaaaaaggcaggggttgcaatcctagtctctgataaaacagactttaaaccaacaaagatcagaagagacaaagaaggccattacataatggtaaagggatcaattcaataagaagagctaagtatcctaaatatatatgcacccaatacaggagcacccacattcataaaacaagtccttagagacctacaaagagacttagacttccacacaataataatgggagactttaacaccccactgtcaacattagacagatcaacaagacagaaagttaaacaaggatatccaggaattgaactcagctctgcaccaagcggacctaatagacatctacagaactcttcaccccaaatcaacagaatatacattcttctcagcaccacatcgcacttatgccaaaattgaccacatagttggaagtaaagcactcctcagcaaatgtaaaagaacagaaattataacaaactgtctctcagaccacagtgcaatcaaactagaactcaggattaatgaactcactcaaaaccgctcaactacatggaaactgaacaacctgctcctgaatgactactgggtacataatgaaatgaaggcagaaataaagatgttgtttgaaaccaataagaacaaagatacaacatgacttgctttttaaatggtgcactcaatgtctcgatcctataaaatgaagcacaaatgtgaaatttcaggaagtgtgacagaccaatggagaagacacttttggagttctttcattgtactctcttcttgctttctctgcctatgggtaagattggacattatgtctccccagcagaggaggaggcttggtctcttgtgccagaggggataaggcagccatgttgatggcgtatcattctctgaattagaacctgtgatctgagttctgagatttgagatccaagtccacctgattgctggtttttttcctgccacctccctgccagactgtccttgctcttatcttgctgggaggctgacttctgcagactgactccccaggctccttgccatttcacttctgattggcttggctgattggagacactagtaggagatgggagatggcagatgaaagagtttaggacatttttgctctgttcttccgctgttccagcatcacttctctcgcactagctgtgttccccataaatacaacccccaccaagctacaggatcatgattttcttcccttcttcctttagtcctggggtattgatgcatttcttgttgtttcaagtctctgcatgccacatcatatcttgtttgatttctttaatctgcctgcctctgcaaataacataccctccccaggcaaggcagtggtctgagccaaacttgttcttccacagaagcctgggctgtggcactgggagctgccaatttcttgctgtgcaactttggatatttccctacctctcttgagcttaagtggctccatccagccaggagggattgaatttgatgacctctcatcaccctgaaagttctatgttcctaagtgtcaaaatggcactattgttttaggggtggagttggcccctttctggcctggtatttcccttttggggctagaaccttgtctctgaaggtgcctcacaaaaaagaactcaaagcattgtgagcctagcataaatgccagctctcttaagggttcacattgaaggggacactggaagctttcttgagagaaagcataggcaagctgagcctcagcttcattatctgggaaatgggtataaaatgtgagtgcctctgacctccttgctgtttgggttaaatgagatagtatgtaaaaagtgcctgaaacattcacagtgcttgtatgagaagacagtggttattatgctgatgattacaccaagaattgccatctgtttgttctaaggaatcaaggtgggatacccattgactgttttttttggagtccactattaggtttctctttagctgaattttgggagaaggccactaggctctctcctctgttgtttgcagttttggaggttgctgtctccgccttatggcactcagcccagccttggctgctgctggctgcagggagtggctagggctggacgctgacaagatgcatgggtccagagtataaaggaacccaggagcagctgaaggcaggtcagatgaaggctaggtggctggaactgcaaccatggtgcccagcttcctctccctgagcttctcctccttgggcctgtgggcttctgggctgatcttggtcttaggctttctcaagctcatccacctgctgctgcggaggcagacgttggctaaggctatggacaaattcccagggcctcccacccactggctttttggacatgccctcgaggtatgtggaggtcgggagggtgggggagaaagaaaacatcctccctcctttcagagaatcaggcctaattcccagggggctgtggagggagacttcaaacttgggcagggggatgatgtcctgggatccatggcttccattcagctttcccaccggaatttctccttcactccagcctttcaagctgacttcagaagtgggggcaacttccaagtcagggctcaagcatggcacagacaccttctcctcattctgaggcccaaagtttggaccaggttctgctaaaagctcagcaatgacagaaaggcaatggcagaaatccaaaacctctggatagtacatagaagtaggcaatccattgaaagctcaatcagcgtccgtgttgttgtgtgtagtgtaaagatttccatttgtaaggcaggaaatgagagtgagcatgaagatgagtaccgccacatgacagacctcaccgagtgtctaagcggttggtgtccccaaaggcagggctctcccggccatgcctatgggtggctcaggagccgtgacaccttcccaggttcagatcatggttcgtcttcctgttactccagggtgggaaccaccttagcccctgctctcaggaagatctcttagtttcctactgtattggggatctagaccagaggtttctaattagacacagggcagggaattggaatcaactgggaggagcaaattcctggacctccagtccctggagattctaatttgtcagattggaactaggagtttacatttataaacctgtccaagtgttagtgttttgatctgcagccagcttggggaatccaggtagagatgccagagacttttctttctttccctctctttttcctttcctttccctttccctttctttctttctttttttcttctttctttctttctctttctttctttctctttctctctctctttctttctttctttctttctttctttctttttctttccttccttccttccttccttccttccttccttccttccttccttccttccttccttctttctttctttccttccttctctctctctcttttctttctttctttctttttttgatggggagttttgctctctctcccaggctggggtgcagtggcgcaattttggctcactgcaacctctgcctcccagattcaagcaattctcgtgcctcagcctcccaagtagctgggaccacaggcacgcgccaccatgcctagctaatttttgcatttttgtagagatggggtttcactatgttgggcaggctggtctcaaactcctgacctcaagtgatccacctgcctcggcctcccaaagtgctgggattataggtgtgagccaccgcgcctggctgacatgccagagattgaggctcagagtgaggcaagttccttctcctaccttctgaactcactttcctcattctcagtctggatgggggcactgcttctcttccttgattgacactagaaaagagcttgacctctaggcttattcttgccctgacagataaccctgtaacatgcatcctgaagacatccaggaaaggaaagtgtgggtcagagagatgaatcagacccaggcctggggttcaaagagcttacggtctgaagggaaaacagacaccagagccttgctcccgagctgggcgaggttcctccccaggattctgccttagccccattattttgatctcagcacctgtcctgttggattgaagtcttctgtttacctattcaacttctgcactagactttggctcctggaggatggagatctgatctgattcatccctgtaccctcagggtccagcataaagcctagcatagtgtaggcatcactaatgaaccagtagtgaatgttggagggtagggagagtatccacagaggagaaagcatgagggagaagaaaagcaaagggaccaggagggcttgggagaggctttgctaagtacacaagagggccaagggaaggttgaggtctgacgctaaaagggtacaagaggtatttagagagaactttctccctttcttcttgttccctctccacttctacctgccttcgtcaaagttgtgtttgccctcagccagggacttctttaggacagggaccttgcacccccacctccatgtcagagctggctgttttcttccccttaacggcccccacccccaccttgagagtatgcagagggcctggaacacagtctagctttggcttcttggctctaacacaactgtctgaagggccttctcttggcatcaggttgagcagacaaaggctggaggagtgactacttgtgggagctacaaaggtttcctggggaaccattgcaagcacaactcctgcagtcctcaagggcttggcacctctgttcttgcctggattcatacctgaacttgagaaatgggttgggcagagaggggattattttccctaatgtaaaaatgaggacattgaagttcagagagtgcaaagtatttgtctatgtctgtttagtagctcaggagttaggtcgagactgggcccaggacttctgcattttaattcgtaatgttgtcagaccataaaaggttactgcaaagttgattcttaggcccagcaatgatgggagtaggaaggggaggaagactgatgggtaaagggactgggggcagggaagagctgtccgtcaggattaatttctccttcttggtctctgattacagtctggaggccttggtagcatctacctgtcatcctcctcaattctcagaatgtgtcttctggaggtggggacatgtcctattcttccagggtccccctcattccagtctaggaaccagggaggactttgcacatagtaggtgctcagctatattgttggcctgaggttggaacccttgaaagaagccaacaaattggtgtgtgtgggtgtgtgtgtgtgtgtagaatgccagctcccagatcaaggaaatgagatactctgagactgcagaggcctctttcccagccatgccctttgctgtgagagtgcccttgaccttgtgctgtgtagtgaagacagggctgtggctcattttcattcagtaaacattgattacaggccttcactgtgcccagttagctaagccactttacctctctgtgcttctgtttccctgtcaacaaagtggagataatcatttttaccttactgggttagaaggggatagaaagagataaagtataggtattttgcaaactactgggcagataaacgtcaggtgttaaatcatcatagagggattcttgctacaaaacaccctggggcatttgctttcttcatccccttccttcttctcaaatcaacccagtctttgtgaaccagatatggtccctctttcctaagcaaccagcagtgtctgatcaacaactctgggtctggtcctatgctgaggccagaggatgaagaatcaagacaaagagcttgcctcagaggaactaggtctgtaggagagatgaataacacagcacatgtgttaccaatctttgggcctagagaagggcccctctcggcgtggggagtcagggaaggtccagggaggtgatgctgaggcacattctcaaagatctggaggtagaaacctgtggcaggaagtgcagaagaaaaggcagaaggtgctatctgtgcaaaaaggcacacaggctggaaaaagcagtgtgtttaggaaattaaattgtcttttggggtctaggacatacctgtgttagtacctcagcgcttctgcagtggtgacagggaggacagaatggagaggatgaggctggaggtagacggggcagtcacacagatccttgaggccaggtcaaaaggctttaccttattttgaggacgatggggaatgatggaaggaatttaagcaagggagagacaagctcagacttatgttttagaaagatcactttggcttcaaggtggcgaacagattgacagagggcaaataggaggcagggaggctagggtggaggtgatccaggcctccaccttgtgttggggagtgagccagtgggctggaggaaagtggaaggtagggcaggccaggtcttggcatggtagccacaggagagagaggcgttgagacctccaccatagccagatgtgagggtcagtgagggctcctccatgtagcaggaaaaggaaacaaggattacccttggagctctgttaattggaggcatcaacacagctggactagagcagaatctagcgaaagtcatcaaaggagagccataagactggattgtaaacaggaggaatgaatttctatgtctcaattttaaaatgtgggcatctgagacccaggaagaggaggctcagtggcgggcagcacctgtcagtgtctgggtatgggatcctcgagtactggatttggagaattccgtggcagagtctcctcccatgacctgctacatctggttctttttgctctggtttgctgatttcaatgtaaaaatcacttggtgggcctgcagggaggaggggctgcctccacagggcatccctcttcatattgatataaaccatggagaaaacgacattccatattcctggctagtttttgggtgggtgatggtaccatccccaggttcagtaggagaggcagattttggggacaaaagtgtacgaacatgtgtatgagtgtgggtttggaaatgctgggtctgaagaatctggagggtgtcatgcagagagttccgggggttgattatgattctggacctcaggagaaaggtaaactggaaagagctgtcaactgagaaattgttggtaggtagatggcacaggaaaccacagaagcaggtgagagctttcagggagaagacgcaagggaagaggccaaggactggatctggaggaacaaagagtgggtgaggagctgcccatggcagccactgggagagaggggaggacatccaggagacagtgcatgagagacagggagtcaactgggctcagcgccagggagggtgctggattccttagcaagatcagcataggagaggtggggccatcacaaggaattggaaacagtgggcacagctctttagagaagttagattatgaagggatgagcaaataaggtgttagctggaggaggaagctgaacaaagggaggtttggtttcattttctttcttttttttttttttaaagtgagagacttgaacaaattttgaatgaggatgggaaggagcctgcagagagggtgaggtctgtgatttgggagagaggggctgattgatgggtgaggtgccttgtggggagggttggaatccagatggactggtcttggacaggccctgcatgcttctctcctgaaacagagggaaacagagaggctgggtgcaggtggggtggtccttcaggtctgccagctgactttttggggtttcttatctgatggtttctattttctctgggaagtacagcaagggtgatctgccaggagtgaggaggggagaggtagagagggcagttgaaataaaagtttttgagaagcagattgtggctgatgccatggggctttccagaaggcatttctgctgatctttgctgaaatgtcaccttagagtggccttcctgacccacccccatccatagtggcagccctgccccttactctgctttttttctttctggagttatcactacatgaaattgtattcttggtgtatttgattctttttattttctttctccccacttggaatgtatgctggtggggcagggctttgtcttgctcaccactgtaaccagaaactagcactgtccctggcacaatgcccatgtgttggaagagtggatgaatctctggggggaaccaactctgggcagcaaagccacccatgcggactgaggacagatgactgcatccccttggactcttgggcatttcttgggtccctgccttcctgcctttttagctgtttggatgttttcctgcattcctcctctcatctgattgggtgctcctgagtctggagttcacctttggatgctgaagacaggagggatgttgggggcagagcacaggctttggaatctaaagactggggcacgatgctagttgtgtgactttgggcaaagcccatcatcacttcctagccaaggcatggtggctagagagtcctggtgaccacactgatctcacccaaagtctctttgctccttctattgagctaggggttctttctgtatgttatctgttcacatgtacatgtgtaatggtttatttgtctttgaaagggaggatggaggatgaagtcatgtttgtcaccagcatgggaggaagtcacctctctgctccctggggtattttgcattcgatcccctctttccaggctctccatggctctgttcaacctcacagctgaatccccaatgagtttttgtacattgagtctgcttttcccactgatttttatagttatttcagagatgctacatcttctcccttttggttgtttttttcttggcttctagctctttagctttatttaaaagcttggcagtggcttggactcatgcacacatggagctctggtaattttggggtgtggggagagggcccatagtagggagacagctgagactagggcaccaaagggcacctaagggtgtccatcctgaaggagagcagacctagggggttctagcccccaattcccaatccctgcaggacttccctgggcagtgggagcctgtgtggtcccagagggagacccatggggaaggctatgggcaggtgtctttcactttagcgactaagaagccttttgaggaattaagactgtccaaagatggttggggtattttgaaaagaagtttcctgtcactagagatgtttgagcacttgggcagggattcttactgggtgaaggtgctgggcaggcaccctgtgtgctgggaatccgagaccgacatgacctgccttgagggaactatgacatgctgccgaaaaggaaaccccttcgtctttctcctccctcaccttttgtttttcgaaactcttatccccattttgtgagcagactgattttcattctgaagcagccccctggggcactgtagctgcagcacactggtcaagggtagcttgtttcttggacactggcccactgagcttcgggtcaactggctgatggcttgagcaggcttgctaacaagggctgcagaaagagactaagccaggatccctggtctcccttaactcatgctggactgttccctttggtctttgtaccgcacgtttccacctttaaagagaggtcagggttccactaggcaatgttgaaatccttttccgatctgattcttggagcaaagcttactttaggctcttgagaagcagagaggaaagtggtgacgtatgcttgctcttcccaatccctccagtggtttatttctggtgaggtcaacaaggagtgccaatgtgagggtgggaggtggggctggggagctgggatcagtgaattattttcataccctgctctcttcctgtttccttccttctggagaaaaaacaagccgtcccagaacttccagtcctgtaagtgtcccagctcaggcattctgagggcgagtctgaggcatgcagttgtgtaatccagaggaactgtccaggcagtcacgtgtaccccacagggaggatgcctcagccctcttgaggggctgcagctgcaatagtgggaccaggtgctgggagctgtcctccttcttaccaggctcccggggtaatcaaggcaggtgcctggcaggtgcttctagttctctagctttatttaaaagtttggccatcgcttgggctcatgcacatgttttttatttatcttagttttctttatttcttaaataaatctaaagagctaggagaaagctgggcacagggaggcagtggcaagctggctgcgacctcgatcagggcacaggttgtgaatgtggtcagcatgagaccagggtctactgtcccttgtggggttgctgcagaggtgcacaagcatagctgataaggagggaagtggggcttggatgaaccagatcagccaaaggctccttccaatcctaagatcctatgagtctggcttttttgtgacttaagcctttccttgacccatccaattgggctttctggacctggtagggatggagagaaggggaatggccaggtgaccaggaagttggcaaggaaaacccaggagggcagatggaaaaataagacagacaccagggaaaggagcacttccagggataccagccaggagggaggcaggcatacaagaatgtttccccttgcctgtgggtggagatgatttttatcactttgtgttctttttgacatcgtgtactcaagggcagtgaaaactcttacagccctgttgggttgaactcaggattctgcgttcagaggcagtgagggaagggatcaatgggatgattacagacgactccacagagggcctaggaggggaagagccctagagaaggcacagacgggtggctggaggccaaaataggcccaatcccatgagcccttggagatagtggcttgggccagaaaggatccctgggggctacattatcagatgcctgtgtccttctttaagaatgttccctggaagatacaacatggatgtcttagtcctttgtgttgctgtaaatgaatacctgagactgggtaaaaggtttatttggctcacagttccacaggctgtacaggaggcatggtcaatatctgcttctggtgaaactgctattcatgaggaggagctttaggaaactgctattcatgaggaagagcagacatcacatggcaagagaggaggaaaggagaaagagagagagagagagagaggtgccagactctttttaacaaacagctctcaaatggtatttctagttctagatccctgaggaatcgccacactgacttccacaatgattgaactagtttacagtcccaccaacagtgtaaaagtgttcctatttctccacatcctctccagcacctgttgtttcctgactttttaatgattgtcattctaactggtgtgagatggtatctcattgtggttttgatttgcatttctctgatggccagtgatgatgagcattttttcatgtgttttttggctgcataaatgtcttcttttgagaagtgtctgttcatgtccttcgcccactttttgatggggttgtttgtttttttcttgtaaatttgtttgagttcattgtagattctggatattagccctttgtcagatgagtaggttgcgaaaattttctcccattttgtaggttgcctgcagccctcccattactgggtatatacccaaaggactataaatcatgctgctataaagacacatgcacacgtatgtttattgcggcattattcacaatagcaaagacttggaaccaacccaaaggtccaacaatgatagactggattaagaaaatggggcacatatacaccatggaatactatgcagccataaaaaatgatgagttcatgtcctttgtagggacatggatgaaattggaaatcatcattctcagtaaactatcgcaagaacaaaaaaccaaacaccgcatattctcactcataggtgggaattgaacaatgagatcacatggacacaggaaggggaatatcacactctggggactgtggtggggtggggggaggggggaggggtagcattgggagatatacataatgctagatgacgagttagtgggtgcagcgcaccagcatggcacatgtatacatatgtaactaacctgcacaatgtgcacatgtaccctaaaacttaaagtataataaaaaaaacccaaaaaacaaacaaaaaacaaaaaaataaacaatatgcaaaatccttaaaaaaaaacaaaacaaaacaaaacaaaaaaaagctctcatgggaactaagagaactcactcaatcctgccagaatggccccagggccattcatgagggatccacccctatgatgccaacacctcccatgaggccccacctccaacattggagatcagatttcaaaatgagattaggaggggacaaatgtccaaattattaaggtttggacatttttcccttcctaatttgtttggatactatcagtgaataggtggcaattgtgagagagaattttacggagagaaaaagcaggcccagcacaggctcaggcctcaacaggaattttatgggactgtaacctaacctctctattccttaggctcctcttccctaaaatgggaccacttagagttgttgtgaggattcaatcaggtcaaaatgtaaggtgcttagaacaaggtctagcacacagcaagtgcttaataaagattagtcattaccatgcctccccacaaactccagagcttggaccttttccaaggcccctgggcaggccactaggagtgttaagtgtatctttgaaagactcccactaaatggggaaaaatagttaaatacattatggtacatccttatagtgaaatactacacaactgttaaaaatagtaatgacagttaagtgcactagcttggaaaggaggacaagttatgttcaatgaaaaatggctggttttgcaaaaatatttattgtataacttcatttacttaaaacacctctgggtgagtaaacgtgactagaaaaacctccaaaggacatgtaccaccctctggatgacctattcaagctcatcccaggtgactgtcccaccatggggcagctcctggaagacaccatgatctttcccaacccagcgcgtttgtgctttctgttttctcacctggaatgcttttcctttatgcttcacatggccagagactcaccatccttcaagtttcaccttaaatgttgtctccaacaagaagccttccaagattaccctatctaagcaggccctccctgttagtgtctctcatagcactgtttttattctgagcactcactattgtctgtgattattttacttaattgtctacttgtctattatctgtcttctccatagaatgaaagggcagaacttgtctgtctcattcccctgagatgtctagaacagagccctgcacatgtaggccctcaataaaaatgtgttgaacgatacggcaggggtggaattgaggccatttctctattgcacaatgagcaaatattacctatctttataattaaagagctttaatgtggagaagaaagcactttctggctgcagtgcagtagagagttggtggcaggtgctaaatggaagcaggttggctactttggggatgttgagctaaccccggtgtgagaagagggcggcttggaattagagcagtggttgtggggctggagaggggactaagcccagggatgtttaggagaagagggtgcaggagaggtaaggaagcaaccagggcctgcctgggcagccttctcccctgccctcccagggacttggggcctagctggtgacaatgtgttcctgagtgaccttggccttctgtcatcatttcagatccaggagacggggagcctggacaaagtggtgtcctgggcccaccagttcccgtatgcccacccactctggttcggacagttcattggcttcctgaacatctatgagcctgactatgccaaagctgtgtacagccgtgggggtgaggagagaggatggggatctcaggagagggtggggcttcctgagaacaaagggctcagggcatgatatggggaggaagcctgggcctgtgtactaagtctgcggagctgaggttcccaccctactcataaatgagcctcctctaggaaccccgggtccctgcttgacctgattgtctcctcctgcagaccctaaggcccctgatgtgtatgacttcttcctccagtggattggtgagtgagcacctgccttccctgccctgccaacctcagacccgtggtgctgggtgactaggatcctggcctgtcccactcaattggttatcccagatggcctagttctcgggtgcccatcctaagctcagctgctcagtggagagacaagggaggagcaggagagcccccagctgtggggccaaggcatcttctctggcagggcctgattctctagacagggcaaaggctttggagaatgtgtgagtgcgaagaacagtttcctgaaggaggtggcactagagttgatccaaaaggagatttaaataggtagtgctggccagggcaagggcctaaggaaatggtgtggtggtaggaccatggctggtcaccagaggctgtgaggctgtcggggtggctacaaggcagagcccagcttggagatgatgctgggcagggaggacaggccagccttgactgccaggataaggaggtgatttgatgttgagagtaggtgggagtcattgagtattttattttattttattttactttttcctttacagaggtactcaagttaaagccattgagtattctttagccaaggccatatgcttctccaaagctcctcttttactcatgatcctatggtgtcttcagcgttttcctgggagctgagaaagggcagggccaagagggagaacacattcccaatcctatttactcaccgagtaccactgggaagactttttgcttctaaccctctttttagttatcaatgggaggataaaattagaaggcagacagaaaagggttaggaaaatgaagaggtggttttgaagacaggaatgcatttccattgctgggtgtgttggagtggggtaggaagggtcccacctgaggccatgaagcacgaacacggtgggacattccctaagtcctgaagctgtggccagtctcagcagctgagagtcaaggctcagcaggctccccctctgcttggctgtccccagggggatgcgtgtcctttgtctcacatctggcaatgtcatctgacacaagttcctggacccaggctttgtgggtgcagctgagatacagaaactgagttatcctgtcctaaggaaggagctcactcagccaagaactgctgccacctgtctcctgaggtcctggtagcctagggtgagggcatggagggcaatactgggtcgcttagtggcccacccttggagggttccaggctcagggatggagtcgtgtaggatgtgcttagccccaggctgccagggcctggactgaccagccctctctctcccatcccttccccagggagaggcctgctggttcttgaggggcccaagtggttgcagcaccgcaagctgctcacacctggctttcattatgatgtgctgaagccctatgtggccgtgttcactgagtctacacgtatcatgctggtgagctccctgtgccagagtactggaggctgttgcctgctgggctagcccctctccaccctgattttgtcctggggagagtaggtggtgctctgcagtaaggagaatagctgagccccaaggcctgttctgcctgcaacagcagtgccaaagccctgctctactgacatgtgccgcaggctgccactgagtcggtgctgaatctctaagtgtcctggcagcccgatccttgtctccaccaggagacccagccctctttcctcccaggccaaagggtctctgtgagaacttaataaggctcctagcatagcaggtttgaggactgcctatatttgagagtatggggaaaggctttcacatctaaaacgtgtctcctcattttctgtctaccacagctgcccagaattatgtcaatacaactcatctctaagagggatgtcagaggtcagggttagagtcttagggctgggtaatccctaagttatccaggctagtctttccccttgtaggaaactcccctccaggattacttacatatacaccgtgcgggggagctcaccacctctcagccatcctactcccttataggctgccctgactgggagaaaacgtctgtgtgctgtgcaagatctgcctcctggtcctgccctctgagcctgaagcccagaggcttccaaacttctacccaccctatcctgatattccagcaggatggagggcaggacagggactgggagtgtgtgaagggggcttggtggtggaggataggctacgggtcctggagggcagcttggggcatccagcccaactaacccctgcatcgcctcctacacattgcctcctatccctggactccaggacaagtgggaagagaaagctcgggagggtaagtcctttgacatcttctgcgatgtgggtcacatggcgctgaacacactcatgaagtgcacctttggaagaggagacaccggcctgggccacaggtcaggagccacctcggggctgaccgcactgtctccaaagccatcttagaggggagagttggcaggggtcctgggctctgatctgagaagagatagggtcctgccccagggagccttagcttgcggggagacaggacctgctcatggtggggtaaacacctggctttagcaaggaggcttaagggcagggagaagaagagcaggatgctctgtggttggggctagattcctggaatggagtttctctggctctgctcctgggccagtgtctaagccaatccctcctcctaccctctgcttagcagggacagcagctactaccttgcagtcagcgatctcactctgttgatgcagcagcgccttgtgtccttccagtaccataatgacttcatctactggctcaccccacatggccgccgcttcctgcgggcctgccaggtggcccatgaccatacaggtgggcctttcccacaaggctcacctctaggaagcctgggttcctcctcctggcccctctatgccccctcccattataggaccccagttcccctttggacaaaagatggcttcccaggcagtgacactctgtgcttttggttcagaccaggtcatcagggagcggaaggcagccctgcaggatgagaaggtgcggaagaagatccagaaccggaggcacctggacttcctggacattctcctgggtgcccgggtgagtacattgttgcccacccctacctgaggactggtcccagagaggtcttcaaccatcctcccaggacagcagaaggagctcttaagcatttcccctctttcctcagcaaatataacctgttcctcgtcccatgaaacatattagcaggggttcagaggtgggcaggtgtagggtgtgtgtgcctgagctgtggagttgggagcctaggtcacgtggtagtggctggacgacatttctagacttctaagatcccccaaaatgttggccttgtagaatcctagaatcttagacttcattcattcattcattcattcagtaagttctttattcatcaattctagaaactcactgagttctgactctgggtcatttccgtgctaggatgcagagatgggaaagacctggcccttccttccagatgcttacagtccagcaggggagacagtaggtagatgttgaccaaaatgtcttcctctggcaggtggtattctatgtgcccagtgagcagaactaacagtcagggctggacaaggtcacaagtcatttggccagagcatttagggagggctttgtggaggaggaggcatccaggctgagctttgaaggaatataggaatctgggggaaggtcctaatccaccctctgaaaaggagctttcactccctcccagagaccttcatttgacaaccaccattatgagttcttcttgttacccacctccaatacctcaagctgtcctattatgccttccctaacccagggaagatgacatcaaactgtcagatgcagacctccgggctgaagtggacacattcatgtttgaaggccatgacaccaccaccagtggtatctcctggtttctctactgcatagccctgtaccctgagcaccagcatcgttgtagagaggaggtccgcgagatcctaggggaccaggacttcttccagtggtgagtctgagggtgggcccggtttatcctgctcagcccttgggaagggcgatgcccatcctgtcctgaaccatcctggaaatcaggtgaggtggcggctgctatcctgttacccccagtgtcataccttttgtggtggtggggggtggggagagtggttggctgggcacagatgcacccctgagcccattctcccaaaatggagcctttcagaagtgttatgtagagaaagttgtcaacaagaggctgatattttgtgtgctaacttcttctgacggtagaacctgattacccttctgggtccctggatagagtagggagagctgggagagaaagaggtggaaatgtgggggtgaacagagctgagacagctgggagagccagttccttgctacttgcctttggatggcaatactcagcttccagatgccatatctctcctgctggtgaaggagaaaagacttccccaaacttcatcacttaaaaactttccattgttttcccctgtttcttggctcaagactgaactcctaaacacttaaggattgaccctgacctctctgcagtgtgatctctgggagtctctcaagaggctccttcacccttgctggctgcctgttcccctcaggcctttgcttgtggtcagacaacctgcctttctctctgggctcctgagcagcctccaagagggggctaggcacacagcaggggtacagaaaatgctgagccagagggggaactttagatccacttgaaagggactgacctataactccagggtctaggacctggagtatgaagcctccattaccatttctgttggtcatatgtgagaatcccccccccacggggtatccagacacatgccaggtgctatcaggggtgcagaacggaagagaaagagaagccatgctgctcgtggggagttttatggagacaaattcacataatcaaacagcgagagaaaaatcacaggatcacgtggtctgaatgttgagggcagagggaaggagtgaggcttgaactgactttctaaggagggttaaaattcaggcaaagagagagaggtaggcattgtaggctgggtaacaatgtgaacacaacccgaggcagggattagaatatttattttattttcacgtcattccatctagagcttgaagcaacttagaggacagttattcaataaaatagtaaaatgcaaatgaaaaataagagccagtggggagtttggggactctgcaataaaatattgccctgtagttatagttggatgtcacatttgggcctgagcttcccggttgccaaagggaaaagacacacacacacacacacacacacttcacctcattaaataatgcatcaactttggttggttcattcaaccaacgtgtatcagccccagtttctttcattcagctcagtaggggaaaccaagctgaaacctaaagaactgtcctttgtaggcttccatgggggtcctgagagttgcagaagtgaccttgtctttgatggctgggtgcaccttcatctctagggtcctgtgccttcttctcctaccagtgaagatgagaaagggatggagaaaagtggaaccagatcctttagatctgagtgttcacaccatgtcaggcctagcctggccaggggcacttggaactctgtgcctctgactcttgagtgtgtggtggtggtgagggaggaaaactggggctggggtctgctttctcgccaaatcctgttgcttcccattccaagaatgttctggttgtgttgctggcagggatgatctgggcaaaatgacttatctgaccatgtgcatcaaggagagcttccgcctctacccacctgtgccccaggtgtaccgccagctcagcaagcctgtcacctttgtggatggccggtctctacctgcaggtgggatgggtggatttgggggtggaaaaggagtccctgcatgctcctctggcaccctctgtgcctttagtcaaatctttgcacttttggggaagagctcaggctttgcgttcagagagccctgggtctaaatcccagccccacaacatattgatcaattcttctacctctgagcctccatttccccttctgtaaaatggggatgagaagagtatctatgtttctaggctgctgtcaggattaaagagaatgttcaccaaggctgccatgtaccaccatgcaggtcatgccctgaacagcaccagggagcaacactcacatagactatgatgctgtgcagtgtgcaacctgcacaactgtatgtggtagcttcataaagagtgttaagcctgtacctggttcatagcaagcacctggtgaatgatagctgttactgttggcagtataatattatgaataataacttcccaagagtcagttagctgaaaaggtttaatagttccttcctgttctacctcatgatggatgggttcattctcccctttattcatctcacaaatgtctatcaggtgctgtacccagtgccgggattacaggaactgggcatcatgatgatcaaagtactgtgatgagtcggatgtggtcatgaacgctctgtcactggcagtggtcaggcaggagctggcaccccagttaaggggtcactaggggactctgaccttatgtggaggtaggcctggctacccaggactacctggtcaccaacctctgttctgcccacaggaagcctgatctctatgcatatctatgccctccataggaacagtgctgtatggcccgaccctgaggtaccctttccctgggctgggagatcagacagggtgggggactgggagggtcaccctctgccagaacctggcgagtgtttaagcaaggcctgtcccttcaggtctttgactctctgcgcttttccactgagaatgcatccaaacgccatccctttgcctttatgcccttctctgctgggcccaggtatggagagacccagtatcccaggccctcaggactggggaggagagggtggatgacatcataggggaggcactattagaaggtactctgaataaaggggaatcatgctgggtttgtggtggttctaatgcaggaggcttcttcttgcaattatcatattcctgtccctgggaagtgggtgggatagatgagtcattccaagagagaaccccatgccagacccccaccatgtgaatctacctggtctgggaccctcaccatgctcccaaggtttgtttcataagcccaggtcaaccaatctatcagccagttattcatccaaaaacagttattgacttttgttggctgctaagagcactgaatgtcatcactctggatgctccattgcacgatgactctttgtgctgcttgctacaggaactgcattgggcagcagtttgccatgagtgagatgaaggtggtcacagccatgtgcttgctccgctttgagttctctctggacccctcacggctgcccatcaagatgccccagcttgtcctgcgctccaagaatggctttcacctccacctgaagccactgggccctgggtctgggaagtagctctgatgagaatggggtcccagatggctcaggctgtgacctccctgggcaccaccctccccaggctgggtgtggaggagttggggccccctgccttcaggaggcttgtagtttagaagggaagtaggcattaccatagacgactcctagaggacagtgctatgtaaaaatgtgtgtctataaatgtttatcatgcatgtattctagagctcattcatttattcaacaaacatttggtgagcacctatttcgttcgagaaacttcatttatctcctataattggcaaacttaaaaatgcagcagaaacttacattccaaccttagagactcatagtgagcacaaggaaagttttgccctgagattcatggttatggctgggtaccaccaaatagaagaatggcttaggggagtgccccttcactgagatgtgtttctttgttgaactttgtgtgtgtgtgtttagaatataacagacataagaaaaaattacctaaatgaagactgtacaaaataataaataattctgaagcagactctcttgtaaccatcactgaagtcaagaaatatggaatatggtatcactgatgtgtcttctgctcctcctgagatgggtctctgtggcacccctgccattgtcagtgtctgtgtctcacagtcacgtggtgctccaggcattcagggttcagctggggaaggtggccaagtggcattagaagggggtttcctggaggaaaggaacccctctcccccacttgaatcagcttaaatcaggccttgaggaggcctgggaggctggatgggagggggccattattccacttctgtaggaagggaaggaacctgtaagacactcatctgggaggagcttgagctgaggcctctgattctggcctctttgaccaagactccatcattgtactgacactctccgagagtgtgtgtcagtgtgaaaaggagctaagagctttggtgtgagaagggatagacaggctccctgtgggagggagataggaggctggggaatggtgggcaccaaagatggattccatttaattcttccagttctctaaacacactctgctgcctcctatgatcctggacatgtgtgtacatgtgtgtgggttgaatgtggagtgtgcaatggacacatacaggtgtggctgtgcctgagtgtctctatatggtgtcatggaatgtgcacagatgtgcactcagcctgagtcttgcccattgcatggactgagcaggttactttttggtcgctcattcatgccctatgggatcctgtggttagagcaactctccatggctgaccacccagaattctgagcccccactgtcctttgttctctgagcatggccagcacgagccctcgcgtgctatctgatactagggacctgctgaacatcctgtgcaggaagttcccagcccactcttctgtcccaaccctctccctctgaccccagtcaagcactgactgtccaggctgctcctttcctgcctcttctcagagcagggctaaagtaacccagtgatttgggaggtcaggggactgggagggaggttctgcctacagccaccaatttagggagaagccctgtcagagaagcagaaaaagatgtcacatcttagtaaaaagaaggtctgtctatggcattcagggacctgggctaaaaatgggggacacctgtgctcagatccagcaagagaagcaaggtctaaatggagagaaactggcacagcagggacaccagtccagtgaagctgtgagaagtaggggactgggtgttgaaacagctccaaggcagtcaccaagtgtggacagggttgaggatgtccctgttcactcggagtggccagccagagaggcaggaaaccaccacaaggctgtggtgtgggggaggaagtgcttggggtccgacatcctctccactggccagacccatttgtctaccttggctcctcccagaccttgctggatagctgcccactctgtgaacttcctgaagagcctgcagacctcatgtgtgagggagaccgacaggtgcctggtcatgtggccaggctgggctcccttttcacgtctcattgcgggtatgagaggctgggtccttgaggccctcatgccagaccaggcctgtgaggctttcctgctcagctcacaacagccctgctggttgggatgtggtgtgtcactgctcagactctggttgctaacttgattcccaatgtggcagtgtttggagtctgggccttgtgggcagtgtttgggtcatgggggtggatctctcataaatagattaatgtcctagaagaaaaccaaggcaataccattcaggacataggcatgggcaaggacttcatgtctaaaacaccaaaagcaatggcaacaaaagccaaaattgacaaatgggatctaattaaactaaagagcttctgcacagcaaaagaaactaccatcagagtgaacaggcaacttacagaatgggagaaattttttgcaatctactcatctgacaaagggctaatatccagaatctacaaagaacttaaacaaatttacaagaaaaaaacaaccccatcaaaaagtgggcgaaggatatgaacagacacttctcaaaagaagacatttatgcagccaaaagacccatgaaaaaatgctcatcatcactggccatcagagaaatgcaaatcaaaaccacaatgagataccatctcacaccagttagaatggcgatcattaaaaagtcaggaaacaacaggtgctggagaggaggtggagaaataggaacacttttacactgttagtgggactgtaaactagttcaaccattgtggaagtcagtgtggcggtttctcagggatctagaactagaaataccatttgacccagccatcccattactgggtatatacccaaaggattataaatcatgctgctataaagacacatgcacacgtatgtttattgcaacactattcacaatagcaaagacttggaaccaacccaaatgtccaacaatgatagactggattaagaaaacatggcacatatacaccatggaatactatgcagccataaaaaatgatgagttcatgtcctttgtagggacatggatgaagctggaaaccatcattctcagcaaactatcgcaaggacaaaaaaccaaacaccgccatgttctcactcataggtgggaattgaacaatgagaacacttggacacaggaaggggaacatcacacaccggggcctgttgtggggtggggggaggggggagggaaagcattaggagatatacctaatgttaaatgacgagttaatgggtgcagcacaccaacatggcacatgtatacatatgtaacaaaccagcacgttgtgcacgtgtaccctaaaacttaaagtattaaaaaaaaaaagattaatgtccccctgcagaggcatatgagtttttgctctaactgtaagggattagttcctgagaatgtgggttttgaaaggagcctggcttcctcagtcttccgtgcttccgctctcactacgtgagggtcctgggttgtagttttgtttattgtgcttgttttgtgttggttgaccttcagccaggaggtggcactttaaagagagcatcatctgtggtagtatagggaggggccagccatagagctcccaagagattatgtcctttgtctttggctaccaaggtgagtagagaaaaactatcaggtgggcacagggttaggcatgtctgagctcagactctccttgggtgaggcttgctgcagcagctgtgggggatgggagtgtggttctcaggccagtggaattatgttcccagggggattatggctgcctctgctgtgtcatgcaggttaccagggaagcagggaaagccataattataggccttacctagctcccatgcagccccaaaagcctgtctcattcccattatgcttcaccaacagcactgagtttatttccaggcagtgggtgagcagggctgagaagttgccccaggttgccagcctcctggctgagaaagcaagcagggcattcaggtttcatgcttcctcacctgctgtggcttctgtgctgtgtctgtactcccaatttccccctcccccaggttctgtccaggaaacttcacgttcagtcaaatttattacgaagttcggctggaaatttccttctttgtgtggtcttttcccagttcctctggcagccctccctagggactcctatgagacaaagtcagaaatggcttctttggggactgagagtgcccagtgcttcttctacccctgtatttcactcagctctgtaaattcatctcagctccaggtaaggtcaaatcctactccctcgatctggactttcagttttcccaatgagggtgtgtgttcaggggcagatgagtcccctttcacactttagacactcacagttttttgactgtttgccggggcctgcaacagcaatctgcttccttcagagggtctggggattctgtcagctttccaggtgttttcctgcactagttcttggaacaaaaattcatgatatgagtctccatatgctactctgtctgtctgaatgggagctgcaagttattcctgcttcctgtttgccattttttcccccaatcagtgtatattaacttttaaaaattagtgaaacatacagaacataaaattggacactttaacacattttaatttcattccattggagaaattggtttcataacatccatagcatgccttttattcattcaaatccatgaaaatttcaaaaaaattatacttaatattagttatgatcttttcccttttataggtctacctttagctgccaccataacatctgctaaattcacactgcagtcttgtcttcaattgcccagagaaggtcctacagcaatttcaatccaacttcagtcaagtactatagctatagtgggaacatgtttactaattctttttcattctacagtagagaaagattatacaaccagaactttacactctttttaggagccctgactgcctagtttagtacaatctgtgctgaacacaaaatgatatttagaaaatgattggtttgtcaacctgaagtcaagaagctctactaagagtaaccgttggtaagaactaacctttctggcacttttacatacctctatgtgagcattttctaaagctttattattctaatactctggatccattattcatcatttaaatgacaagacttttttttttaaataagacttttaaaaactcttttactctatcctcagtaatattggaagccttacagtcatagatgtaccattcctgacccgtgtctattgtaaagaaaaaaacaaatctgactttttgaaatcactttatattaaatagttgaaacaattttcatctaaataatgaacactgactttaccccaggtaaggcttgttaaggtgacagagctggtaattgtgtagaacttagacttataatcagaggtgcaactcttctgcttaaccatatgttcattaatgatgagaacacatagacacatagaagggaacaacagacactgggtcctattggtgggtggagggtgggaggagggagagaatcaggaaaaataactaatgggtactatttattaataatacctgggtgacgaaatactctgtacaacaaactctcatgacaagtgtttacctatatagaaaacctgcacatgtaccccttaatttaaaatgaaagttaaaaataaaacaaacagaaaagtttattattaatcaactcttattagttattcctgtttaattagccatagcattcttagtattgtacaaaattgcacaaaaagttttaagacatacacaactttgacaaggacctagtgttattgcccccatggactgctacaaccatttgcaaatgctttcaaattgtttcttcaagaatcattgtacctgtgagagaagcagcttgccactgcaaactctgtgagacagtcaaaaaactgtgagttcccaaagtgtgagagggggaaaagtctgtctctgaacacatatctccactagagaactggaaagtccagagcatggagaaggatttaaccttacctagggctgacatggatttagggagccaacaaaatataaaagcagaagcagccatgggaagggccctataggcactgctggtccccagcttgagcccagggaagccatccttgactttacctcacagggatccttggggaaggcagccagcagaattgggcagggattacagggtgaaggaagctcctagttgaacttcttttttttaattatactttaagttctagggtacatgtacacaacatgcaggtttgttacatatgtatgcatgtgccatgttggtgtgcagcacccattaacttgtcatttacattaggtatttctcctaatgttatccctcctcccttcccccacctcatgacaggccccagtgtgtgatgttccccaccctgtgtccaagtgttctcattgttcaattcccacctatgagtgagaacatgtggtgtttggttttctgttcttgtgatagtttgctgagaatgatggtttccagcttcatccatgtccctacaaaggacatgaactcatcattttttatggctgcatagtattccctagtgtatatgagccacattttcttaatccagtctatcattgttggacatttgggttggttccaagtctttgctgtttttaatagtgccacaataaacatacgtgtgcatgtgtctttatagcagcatgatttataatcctttgggtatatacccagtaatgggatggctgggtcaaatggtatttctagttctagatccttgaggaatcgccacactgtcttccacaatggttgaactggtttacactcccaccaacagtgtaaaagcattcctatttctccacatcctatccagcacctgttgtttcctgactttttaatgattgccattctaactggtgtgagatggtatctcattatggttttgatttgcatttctctgatggccagtgatgatgagcattttttcatgtgtctgttggctgcataaatgtcttcttttgagaagtgtctattcatatccttcgcctacttttgatggggttgtttgattttttcttgtaaatttgtttgagttctttgtagattctggatattagccctttgtcagatgggtagattgcacaaattttctcccattctgtaggttgcctgttcactctgatggtagtttcttttggtgtgcagaagctcttttgtttaattagatcccatttgtcaattttggctttgttgccattgcttttagtattttagtcatgaaatctttgcccatgcctatgttcttaatggtattgcctagcttttcttctagggtttttatggttttaggcctaacatttaagtctttaatccatcttgaattaatttttgtataaggtgtaaggaagggatccagtttcagctttctacatatggctagccggttttcccagcaccatttattaaatagggaatcttttccgcattttttgtttttgtcaggtttgtcaaagatcagatggttgtagatgtatggtattatttctgagggctctgttctgttccattggtctatatctctgttttggtaccagtaccatgctgttttggttactgtagccttgtagtatagtttgaagtcaggtagcatgatgcctccagctttattcttttggcttaggattgtcttggcaatgtgggctcttttttggttccatatgaactttagagtagttttttccaattctgtgaagaaagtcattggtagcttgatggggacggcattgaatctataaattaccttggacagtatggccattttcacaatattgattcttcctatccatgagcatggaatgttcttctatttgtttgtgtcctcttttatttcattgagcagtggtttgtagttctccttgaagaggtcccttacatcccttgtcagttggattcctagatattttattatctttgaagcaattttgaatgggagttcactcatgatttggctctctgtttgtctgttattggtgtataggaatgcttgtgatttttgcacattgattttgtaaccggagactttgctgaagttgcttatcagcttaaggagattataggttgagaagatggggttttctaaatgtactatcaatcatgtcatctgcaaacacggacaatttgacttcctcttttcctagttgactacactttatttctttctcctgcctgattgccctggtcagaactttcaacactatgttgaataggagtggtgagagagggcatccctgtcttgtgccagttttcaaagggaatgcttccagtttttgcccattcagtatggtattggctgtgggtttgtcataaatagctcttattattttgagatacatcccatcaatatctagtttattgagagtttttagcatgaagggctgttgaattttgttgaaggccttttctgcatctatcgagataatcatgtggtttttgtctttggttctgtttatatgatggcttatgtttattgattgcatatgttgaaccagccttgcatcccacggatgaagccaacttgatagtgttgggtaagctttttgatgtactgctggattcattttgccagtagtttattgaggatttttgcatcgatgttcatcagggatattgctctaaaattctctttttttgtgtgtgtgtgtgtctctgccagattttggtatcaggatgatgctggcctcgtaaaatgagttagggaggattccctctttttctattgattggaatagtttcagaaggaatggtaccagctcctctttgtacctctggtagaattcagctgtgaatccatctggtcctggactttttttggttggtaggctattaattatcacctcaatttcagagcctgttattggtgtattcagggattcaacttcttccaggtttagtcttgggagggtgtacgtgtccaggaatttatcaatttcttctagattttctagtttattttcatagaggtgtttatagtattctctgatggtagtttgtatttctgtgggattggcggtgatatcccctttatcattttttattgcatctatttgattcttctctcttttcttctttattagtcttgctattggtctatcaattttgttgatcttttcaaaaaacaagctcctggattcattgattttttgaagggttttttgtgtctctatcttcttcagttctgctctgatcttagttatttcttgccttctgatagcttttgaatttgtttgctcttgcttctgtagctcttttaattgtgattttagggtgttgattttagatctttcctgctttcccttatgggcatttagtgctataaatttccctctacacactgctttaaatgtgtcccagagattctggtatgttgtgtctttgttctcatttgtttcaaagaacatctttatttctgccttcattttgttaggtacccagtagtcattcaggagcaagttgttcagtttccatgtagttgagtggttttgagtgagtttcttaatcctgagttctgatttgattgtactgtggtctgagagacagtttgttatagtttctgttctcttacatttgctgaggagtgctttacttccaactatgtggtcaattttggaataagtgtgatgtggtgctgagaagaatgtatattctgttgatttggggtggcgagttctgtagatatctattaggtccgcttggtgcagagctgagttcaattcctggatatccttgttaactttctgtctcattgatctgtctaatgttgacagtggcgtgttaaagtctcccattattattgtgtgggagtataagtctctttgtaggtctctaaggacttgctttatgaatctgggtgctcctgtattgggtgcatatatatttaggatagttagctcttcttgttgaattgatccctttaccattatgtaatggctttctttgtctcttccgatctttgttggtttaaagtctgttttaccagagactaggattgcaacccctgcttttttttgttttccatttgtttggtagatcttcctccatccctttattttgagcctatgtatggctctgcacgtcagatgggtctcctgaatagagcacactgatgggtcttgactctttacccaatttgccagtctgtgtcttttaattggggcatttagcccatttacatataaggttaatattgttatgtatgaatttgatcatgtcattatgaagttagctggttattttgcccgttaattgatgcagtttcttcatagcatccatggtctttacaatttggcttgtttttgcagtggttggtaccagttgttcctttccatgtttagtgcttccttcaggagctcttgtaaggcaggcctggtgttgacaaaatctctcagcctttgcttgtctgtaaaggattttatttccccttcacttatgaagctg

SEQ ID NO: 721 - DNA, 2440 bp, Homo sapiens
aagaattgccatctgtttgttctaaggaatcaaggtgggatacccattgactgttttttttggagtccactattaggtttctctttagctgaattttgggagaaggccactaggctctctcctctgttgtttgcagttttggaggttgctgtctccgccttatggcactcagcccagccttggctgctgctggctgcagggagtggctagggctggacgctgacaagatgcatgggtccagagtataaaggaacccaggagcagctgaaggcaggtcagatgaaggctaggtggctggaactgcaaccatggtgcccagcttcctctccctgagcttctcctccttgggcctgtgggcttctgggctgatcttggtcttaggctttctcaagctcatccacctgctgctgcggaggcagacgttggctaaggctatggacaaattcccagggcctcccacccactggctttttggacatgccctcgagatccaggagacggggagcctggacaaagtggtgtcctgggcccaccagttcccgtatgcccacccactctggttcggacagttcattggcttcctgaacatctatgagcctgactatgccaaagctgtgtacagccgtggggaccctaaggcccctgatgtgtatgacttcttcctccagtggattgggagaggcctgctggttcttgaggggcccaagtggttgcagcaccgcaagctgctcacacctggctttcattatgatgtgctgaagccctatgtggccgtgttcactgagtctacacgtatcatgctggacaagtgggaagagaaagctcgggagggtaagtcctttgacatcttctgcgatgtgggtcacatggcgctgaacacactcatgaagtgcacctttggaagaggagacaccggcctgggccacagggacagcagctactaccttgcagtcagcgatctcactctgttgatgcagcagcgccttgtgtccttccagtaccataatgacttcatctactggctcaccccacatggccgccgcttcctgcgggcctgccaggtggcccatgaccatacagaccaggtcatcagggagcggaaggcagccctgcaggatgagaaggtgcggaagaagatccagaaccggaggcacctggacttcctggacattctcctgggtgcccgggtgaatgacatcaaactgtcagatgcagacctccgggctgaagtggacacattcatgtttgaaggccatgacaccaccaccagtggtatctcctggtttctctactgcatagccctgtaccctgagcaccagcatcgttgtagagaggaggtccgcgagatcctaggggaccaggacttcttccagtgggatgatctgggcaaaatgacttatctgaccatgtgcatcaaggagagcttccgcctctacccacctgtgccccaggtgtaccgccagctcagcaagcctgtcacctttgtggatggccggtctctacctgcaggaagcctgatctctatgcatatctatgccctccataggaacagtgctgtatggcccgaccctgaggtctttgactctctgcgcttttccactgagaatgcatccaaacgccatccctttgcctttatgcccttctctgctgggcccaggaactgcattgggcagcagtttgccatgagtgagatgaaggtggtcacagccatgtgcttgctccgctttgagttctctctggacccctcacggctgcccatcaagatgccccagcttgtcctgcgctccaagaatggctttcacctccacctgaagccactgggccctgggtctgggaagtagctctgatgagaatggggtcccagatggctcaggctgtgacctccctgggcaccaccctccccaggctgggtgtggaggagttggggccccctgccttcaggaggcttgtagtttagaagggaagtaggcattaccatagacgactcctagaggacagtgctatgtaaaaatgtgtgtctataaatgtttatcatgcatgtattctagagctcattcatttattcaacaaacatttggtgagcacctatttcgttcgagaaacttcatttatctcctataattggcaaacttaaaaatgcagcagaaacttacattccaaccttagagactcatagtgagcacaaggaaagttttgccctgagattcatggttatggctgggtaccaccaaatagaagaatggcttaggggagtgccccttcactgagatgtgtttctttgttgaactttgtgtgtgtgtgtttagaatataacagacataagaaaaaattacctaaatgaagactgtacaaaataataaataattctgaagcagactctcttgtaaccatcactgaagtcaagaaatatggaatatggtatcactgatgtgtcttctgc

SEQ ID NO: 722 - protein, 510 aa, Homo sapiens [sequence omitted]

SEQ ID NO: 723 - DNA, 30347 bp, Mus musculus
  misc_feature (1)...(30347): n = A,T,C or G
tttacaactctaataatgaggtggatggatggatttcgagcaagtgttagtgtgactagaaactagtggggaatagacgagcatctgttgacagtgcagtgcagtccttctctagctcgtgttggaaaggggtcatcccagcctgctgaagacctggcccccatgtggccatgagataacagaggccactttaggtaaacgctggcagtgaccagatgcctagtgaaaaatacaacacacgctcagaaagaagtgttcgaagaggttgggtgtaactgtcaggggaggtatagattgtagctcacatttctgtcttgctggaagcaggcttatgtgaccattgtttgggtcagagaaaaattcttgcccttctttacgaaggaaatggttagagaactgtaaagagcggtgtggtggggaagcctttagcatgggacagctctgcctgggagagaaaggagggggaggagaggggggaggggagagagaataaatatgaattggataagatcttgggaactcctgtcaagaattcttcccttcctttttttctctctttcagctcccaggcttgctagagctccttgtggaatatttccgtagatgcctaattgaaatctttggcattttaaaggagtatgaggtaggggacccaggacagagaacattactagaccctgggagattcaccaaggtgtatagtccagcccatacagaggaagaagaggaagaacaccttgatcctaaactggaggaggaagaggaagaaggggttggaaatgatgaggagatggcctttttgggcaaggacaagccatcttcagagaataatgaggagaagctagtcagtaagtttgacaagcttccggtaaagatcgtgcagaggaatgacccatttgtggtggactgctcagataagcttgggcgcgtgcaggagtttgacagtggcctgctacactggcggattggtggtggggataccactgagcatatccagacccactttgagagcaagatagagctgctgccttcccggccttatgtgccctgcccaacgccccctcggaaacacctcacaacagtagagggcacaccagggacaacggagcaggagggccccccgcccgatggccttccagagaaaaggatcacagccaccatggatgacatgttgtctacccggtctagcacattgactgatgagggggcaaagagtgcagaggccaccaaggaaagcagcaagtttccatttggcattagcccagcacagagccaccggaacatcaaaattttagaggatgaaccccatagtaaggatgagaccccactgtgtacccttctggactggcaggattcccttgctaagcgctgtgtctgtgtctccaataccatccggagcctgtcgtttgtgccaggcaacgactttgagatgtccaaacacccagggctgctgcttatcctgggcaagctgatcctgctgcaccacaagcacccagagcggaagcaggcaccactaacttatgagaaggaggaggaacaggaccaaggggtgagctgtgacaaagtggagtggtggtgggactgcttggagatgctccgagaaaacacgctggtcaccctcgccaacatctcggggcaattggacctatccccatatcctgagagcatctgcctgcctgtcctggacggactcctacactgggcagtttgcccttcagctgaagcccaggaccccttctcaaccctaggccccaatgccgtcctctccccccagagattggtcttggaaaccctcagcaaactcagcatccaggacaacaatgtggacctgatcctggccactcccccttttagccgcctggagaagttgtatagtaccatggtgcgcttcctcagtgaccgaaagaacccagtgtgccgggagatggccgtggtactgctggcaaatctggcccagggggacagcctggcagcccgggccattgcagtgcagaagggcagcatcggcaacctcctgggtttcctggaggacagccttgctgccacacagttccagcagagccaggcaagcctcctgcatatgcagaatccaccctttgaaccaactagtgtggacatgatgcggcgggctgcccgagcactgcttgccctggccaaggtggatgagaaccactcagagttcactctgtatgagtcacggctgttggacatctccgtgtcaccactgatgaactcattggtttcacaagtcatttgtgatgtactgtttttgattggccagtcatgacagccgtgggacacctcccctccccgtgtgtgtgtgagtgtgtggagaacttagaaactgactgttgccctttatttatgcaaaaccacctcagaatccagtttaccctgtgctgtccagcttctcccttgggaaagcctctcctgttctctctcctccccaccctcactccctcacacctttctgttccccatcctcacctgcttccctcaggaccccaccctatttgaaaagacaaagctctgcctacatagaagacttttttattttaaccaaagttactgttgtttacagtgagtttggggaaaaaaatggctttcccagtccttgcatcaacgggatgccacatttcataactgtttttaatggttaaaaaaaaaaaaaaaaaaaggaaaaaaaatacaaaaaaaccctgaaggacaaaggtgactgctgagctgtgtggtttgtcgctgtccattcacaatctcgcaggagccgagaagttcgcagttgtgagcagaccctgttcactggagaggcctgtgcagtagagtgtagatcctttcatgtactgtactgtacacctgatactgtaaacatactgtaataataatgtctcacatggaaacgagagaagacgctgggtcagcagcaagctgtagtttttaaaaatgtttttagttaaatgttgaggagaaaaaaaatggctttccccccaaagtatcctgtgtgaacctacaacgccctgacctctttctctcctccttgattgtatgaatagccctgagatcacctcttagacctggttttaacctttagctgcagcggctgcgctgccacgtgtgtatatatatgatgttgtacattgcacatacccttgaatctccacagtttggtccccttcccagctacccctttatagtatggcgagttaacaagttggtgacctgcacaaagcgagacacagctatttaatctcttgccagacattgcccctcttggtgcagtgctctacaggtctctgtaaaaagcccttgctgtctcagcagccaatcaacttacagtttatttttttctgggtttttgttttgttttgtttcatttctaatcgaggtgtgaaaaagttctaggttcagttgaagttcctgatgaagaaacacaattgagattttttcagtgataaaatctgcatatttgtatttcaacaatgtagctaaaaacttgatgtaaattcctccttttttttccttttttggcttaatgaatatcatttattcagtatgaaatctttatactatatgttccacgtgttaagaataaatgtacattaaatcttggtaagactttgtgaagctttttttattttcaaattatttaaaagctttgcctgtggctagaaagctagctagctcttcagttttaggaggactcatgcttgaacctgacccctctgactagggcacttgtgcttgcatccacatggacagaggatacagcaggacactcacacgcaaacacacaaacagttcaaactacatcttcaaccaagactggagaaatggctcactgatgaacagcttttcataggtccgcaggcttagccctcactctgtggcttatagccatctgtcttaactccagctccagggatgctccagcacccccagatggagcatgatctgaccccggtggctccatgtacacaagacagtgcacaaacataaaactaaacaaaatttttagccaggctagccaaagttctgcctcaataaaataatcttttaaaaggaatagatgctgggcatagcagcacactcctttaatcccagcacttaagaagcagagagagtttgaggctagcctggtctccttagttccgggtacagctatatagtgagtctctctgtctcagaagtaatgaaaacttgaccttctgtaggggatgaagaatcctgttctcttgaacacccctaatgtgctctcctgagtagtggttgacaaggaggaatagcctttacctagaagcagtttctgtctattggatctgcaatctggcattctcttgacaccagatcagcatcactactggaagcttgaatatatatatttttttcttatatatacattttttccttatatatgaaactggtctggaagcctatttttctcagtaaatggcaagtccaacctttggccagaaaaattccttaactcatttgattgttgtttttgtgatttttgatacaaggtctcgctgtagttcagtttgttatagaactcactttgtagaaacaggcaggcctgaacctcacaagaggtcagtgagatctgcctgctcctgcctcctgagattaaatgcatgcagtttcacaccagacccttgacacttctacatccagttgtcactcttgagggaatcctgcgcagtacaactactgccaccagaagttcatcactgtcgcatctttctcaatttcttaaaatctccctcccatcctgtgctttgcatgggtacaagcgtatacaagcacagcaagccattaaaagtcagtgcaaactcctacaatgctcagtgtgaaaaatcgagctcctgggtatagtgacatacaccttgagtcccagaactcaggcagaggccagcctgtctagacttacaggtcaactttgtctatatagtctcttaaaaaaaaaaggggggggggggcgggataaaatccaaagcctttatgtcatggacttctttgtcttgtcattcgtctggctggctcccaccctcttgcattctactgtctaaggagtttccactttggggttgttctgtatattcctctaccacagcagaaggctctcatcagataactgcacacatagctcgcattatcatctcaccttgttcacgtgtcagctctgcggtagcacctcatggcgcctaacacgcccaagagttagggctctaaaaacagagggagctagcaagatggctcaagttctcaaggtacttcctgcccaacctaatgacttgagttcacaccccagttcaccaagacccatatgctaggatagaaccctcttatacttctgaatttttccctctgaccttcacttgtgcatgagtacaccctgggatacatggtcgtatattcccgatcacatctattttgagacaagggctcgtggagctcaggcctcaaacttcctatgtagcctggtattcgccactctattttaaattgcagtctgaggtggtttaagggttaaggatccaaaagggaatattggatttcctcaagttacaggcagttgtgagctgtccagcatagatactgagggccaataatgaccaggttcagttcccagcacctccgtggctgcttactaatatttctaactgcagtcccagggggtcttatgcccttttctggcctccatgggcactaaacacaaatgcaggcaaaaacactcatacacatttttttttaactcccttctctccctcccgtctcgctttcctttctacccagtttcatacttccctgccatcttccactgaaatataaacagagcttgtgaggctcgctgttgcatccctttctgacatacatcctagcatactgcatcaacttagtaataactagctgagtggcatcatagcaaagaagcagttgctttttagatcagtcttgtaatacccctttctgtgcatcccttctatcattccttcctttaggaaagtggagaaaattaaggttcagattttttttttctggaataatcagagatactaacaaaaggtgagtgtagatacttagtgagacctgagaccgtttttttgttttgttttgtttttttatctgttacacacctgtcagctggacaaaatagatggcaaatagtcctacaacacccttgtgtctctgaggtaagtgcaaaacaaggccctctgaccaaggtccaagtttttcccagcaagtggcacaccacacttactccatccacagattgccactgggaggttggtttctattgtctttggcatgagacaaaagtgtctcaagaattttagtcaagtgctcgtcagacttgatgtagctgttaacagagtcgtcaggggcaagcatgggaaatgagcacttagtgaagaagaaatctttgacaaccaagatgctttctcattttaaagggggcgaggaaggggcttttcgtatcttacttagtaattgcagtagctatttttgttatggagctctcaagctcccacttcccagtctagaaagtgcatttctgggctgtgtgtggagcattacctaggagttctgtttcctgggctcctttcatctgctctctggcaattctgggggccgcctagcccagtctccagtttctgacgggagccactgggagagaggactgctgaccagcgagctgtgagtaattggcttttgagaagtaaatagaacccggccagtagagaacccggggtgtggctagtagttcttttcccaggctcctccctcccacccccacccccaaatgaccttaaccttctttcagagctggacagcagccaagccctgcctaaacaatactctgaagctcattggctcctttgcttggcagccaccgccacccccaaggggctaaggccttcccaccgtgtctcagtgaagtcaagtttcctaactgttcaaaggcaaaccctaaagggagggtttcagtaacaggagcatagattttgaagcatccatgtttggtacctgcacctggagacagggaagattcttagtactctgcagtgggtgaacatcttcaagtgacatgacagaggtcacacatggatcctttgggtaaaggtctgagaccctaattggtgtcatcctgatgtcaggatggctacatataaacaccacccttggaaactatcagatgatttttttatgatgagtgaagagaagtgtcaagttctggaaaggcatagcttctgttcatcacgagccttagactaaacccgctcactgtagatggtaaggaacccgagggtggccaggcagtggtggctcaagtcttcaatcccagcacccagtaggcagaggcaggcagatctctgagttccaggccagtttaaggtatacagtaagactcttctttttttgttgttttggttttggttttgatttgggttggttttggtttttcaagacagggtttctctgtatagccctcgctgtcctggatctcactttgtagaccaagctggcctcgaactcagaaattcgcctgcctatgcctcacaagtactgagattaaaggtgtgcaccaccactgcccagctactcttcttaataatatattaattgagccaacttggaaagctgggacctgacttcaagacatttgtgaccttaggcaaggcacttctctttagcgagccttaattcccttgtctgtaaaatatggcatcaagttaaaaatcaagtgaaactaatttatacagcagtctaggacaaatggtctgtctcatactccctgtccagactggcaagtgctctaacacttaggtgaaagattgccctggtcttccattatatacaggggctaattttccaaaagaggaaaacaaatgtcatgggcaggatgaagcagatggtgacaacatgcaaggcacagacagaccagggtggtggatgccggtgggtggatagagtttgtccctgaagccaaagggtagcctgctgtgataatgtttcgggcaagaagatcagcaaatgcagaggcaggcaaatttcaaggacaaaaatggtgtcatcgtcttgaatgttaggtttctagaacgcgcattgcttgcacaaatcagcttagggttctgttggtgaacctcgcctgatggtgtagggtatttccttcctaatgccaggtggaagatgtactttcaggagcccggggacatggctggctgtcttccttgccttcctggtggctcagcaggctccattttttaactgtagactctaaaggcaaactgcttagcactgtctctctcacctctcacagccttggagccctacacacccctcccatcccatcctgccaccttccagtccaaaaagccagagtgtcagggctttgagagcacaagattcagtttcctttttttttttttttcttctgtaggagaagaagccagaaaatgaaacgggaaacagcagaagagaagggggttgggcggctgggaagggaagggaagggaaggaaggagagattgcagccaagtgcgactgaagatctagtcaaagttctacctcctaaggaagggtgtttcagcaaacactctcacttctcacaaaaggacccctgccttttttacaagcagattctgcagggattctttattggacagacagaacctcgagcttgcatgccattttcccctgtgaattcacgaagcaaggatggttctttaaggtcagggtgctgcgaagactgtaagaaagtcaagtcacaacctcgggccctagtcacaagtgtgcctagagaggcactgacatttcactcacaggactggcaacaaatgctttcgggggggcggggggggaggaaaaatgactttggaaactcctgttttctctttaccagtcattaaattatacattatccaccttacacgcaaacatccaaggggcagttgacatcccagggcctgagacgatagacagacacagcttctggcccccaccgaactgatgaaggctagtttttttttttttttttttttttttttgcttggagagatagagacccatctccttgttcccacccacatttgtggctgttgcagaagataaacccctccctcagccagggctgtggccagaggttaacctagacccaagctacgtttgagaggacagataactgaaaccacacaaggctttggaatcctgagaaacgagaaatccaccaacggagaaggatttactatctgtttcctctaaggcgggtgcaaagttgttctaacagtttccgttagttacaggggtaccaactggccgctcctccccaacaggcggttttgttcaattagcttcctttttttttttttttttttttttctttttcttttttttggcgccagttcctgcgacagaaactgcttgagggagaatcctcgggggtgttctctgaggtttccttcctcgtctcatacagtcatctgaggtgggacagaggactgtcgcagggcagaggtccttcattgccaggaggggaaaggcagggggaattcccctactttcttctcacccaggcgcagggtaccgctgcttgccacaaaaaccccaagaaggctttcttttgcctattcatattgtctatcgtgtgccaggtcctgtgctgagctggggtggcggaacaccgagagaacgcgtggctctggggcagcgcccgggtccagcctcggctcacaccgggaagtcagaggctgctcacggcaggggactggggtgagagccccgacccgggagcgcagcgcccgcgcacaaactgctggcgagtcaagaggcctactcctcaggtgtcaccacgccgggaaggtgcgactcaccgccgccgcctcggcccccgccctagctggggtcaacatggccgccgaggaggggggcggggcgctccgagtccgggcaggagcggggcggggccgccgtcggccgagccggcgcgcaggcgcggcacggacgggacccggatggaggcgctgaagttggagctccgcgggggtggtctggacgcgcgggcgcggaggatccggcgccagctctgcaactctggagtcctccggggagggaagctgtcaaacgcaggccgagagaaattaggcggaggctgtagagaagcgaggagccccgcccctccgccatagcagcctccggcgccgcctcttcctttgcagcctccggccctcgtctgcttccggccccgttgcctggcccggccccgcgattcccccgggacgaagccctgggccgtggctcccttggggtgagggtcactgtcccgtcctgggtaggaactgtgtccgaaaagagcaggctggaacgggctcccagtatggcagggcttagcagaaggaggcggctcgctccacgttgcctctgggtcataacgcagcacccatttgagagtattagccttccgcagaaaatccaggactccagttcaacagatctttcccagttagggcccatcaccataagcttccagcaacaacatgtgctacagttggagaaagttctgggctaagccttggatgtcctggctggacaaggaatgcataccctttgtttatggcaaaaagctcccctgactgtggacataggttttagaaagcagtgcgtgaggagctttaagtggtgggcgtgtcacttggctccagtgagcctcagttttcacatccataaaatggcgatggtaattacacagtcttactggtgtctaatgagatctctgaagcctatttcacgggtaaattaaagaaaaatgaaactggttggtcctaagcatccggccagttaagagtctgatttggcaaggggcttctttcaaaggggtgttggcaaaatagctagagagataattgactgtcttgattttactttgtttaacttgagtgtgggtgggttgcatctcctgtggccactgatgccagagtttgaaagagggaaggactgagaatcaagatgcagaggtggattcagtacttttcctctctctgcctcctttgtgcgtgcggattggaggccagggaaaagagagggagggagggagagattgattgagtttgagttgggtgtgcatgtttctgtgatttatttgggtttagtgaatccagtgttggagatatcgtgggtagtcagaaaatgctgtttcctgcggcttaactttaaactgaattgtcctaaataaaccgacatggagttgggaggtgagggggcctccttttctcccggtctcctggtgatgaagtaagcagcaggtgccccctcgtgccgaggatggggtactgccgctattaaccagtcttgttcccttggcggagaattttttcttttctcccatgctttctgtgactttgtcatttgctttttttttttttaattctattttatgtgcatatgtttatgtatatatgtgtggagctacaggtgcgccttggcacacctaagtgaggacagagaacaactttgtgggagtgtcttctcatcttcagcctatgggtcactgtagtggcaagtgcctttgcccgctgggccatcttgctttttaacctgaaacacgatgggagaaatgcttggaccagtgatcttagttctagcgtcagaaaacttgacgattctctatcctgtccttgctacttcgtgcacttggagaacagatgtctgtttacatgctgggtcctgggatataatagagttaggagacaaagcccctgtcctcataaggaacagataggaagataaagatggcagggcatgaggcagtgagaatatagggctgtctggtgggatcagaaaattccagaaagcaagtgtagcctaaaagtttagagggtgttagccacgtgagagaagaaagacggggctcttcctctccttgcttaaacacagtaagagctgtgactgctattaaattgtgtttttaaagaaatgccttgatgtgcattctgtgcctcagaatggcactgggtttttgtatgagtttgccgccactcctgcggagatgggaaatggctgtttaccctgtcccgagtggtagactctgtcttccccgagtttgttttagcagtgggagctggccggagtcctgctgagcagtggttttcttttccttctccacttaatttaacagaccagctgaacacacatcagagagtgaagctggcatgtgtagtaattacgggcttctaggatggttctgtgccccactttggggactctggtttgggaattcgcttattattctgggcaaaagggaaaatggcacaggcaaataatagcagccacggcattgacttgtggggtaccttttagttcagtccattttaccatgatgacgagttggtgagatcggaggggtggagaatagtgtcctggtttacacacacaggactgactctcagagggactaagggagaacttgcaagtgacaaaattgggctttgaacccgggtctttgagtcctacataaaagcatttcaacgggcttttaaaagttctgtgagcttagctttccagctttgtgcttatctgtgtgttacttactgactggcctagagtgcttcaagagtgacacccagtggtccagctgccttcaggatagtcttcccaccgggaagccaggtggctctgtttgccatggccatgttgaagtgggtggttcccctggagaaaatgttattgatttgcttttagcctgtgtgtgaccttttctcccttgggtgttagaatttagaagccggaggaagctcagtcctggtggtgagagagaggatgggactcctggacccatcccagaaagaggtgctgagattcgcagtaaactgccgcatcctgactctagtgctacaggtcagtctctgatcctttcccctgagcatgcgcttgccatgtgactgagctagcaatggagaataagtggtcctcatctccctacttcctggtgtgcctcagcatgtgggtgatcacatacaggctgagacctggaacctgagaagtgggcaagagccttaaactgtgtatcgatcatgtgtcttacacgtgaagcagcaggttaaatgatttgtccaaagctaaagacccctagctccctgcccaaagtagagattttcctaacagccttagctatctgatggtcttgccaaccgagatacttttaaggtgtgtgtgaccgttcacagtgtcacacagggctctttttttcttggagttcaagttctgtgctacttgagtgggagagaggagccactttcaagttctgagaccatctatgaatatccacagtcctgagtccctctccttgctgtctccagcattcagttctcagtctttttgcccttttaccaacccctcccccaggctgccttgatacatactttaatgaaagttgcacatatgtgaattatttggtgcctagtgtactgctctgtacttgaagtcccaagtatatgactgtgaacagaggtcaccaccctagagttgctgagttgacataatgatggtgtctatgtcactcgtacctgggactcctagctgcttcctttgtagaaaccttttctgtccccctccgccccactgctaacccgctctgagcttctcgctctgagcttttcctcccctgctctatgctcacttcaggttctgctgactttgggcattaaagagtcttcatcttggtggcctgtactgttacctgtgattgtcaccccatcccatttcttttcactggagtggcctgatgaggaaactgacaagaagagaaagaacctttaagtgagctgtgctcttgtcgctgggctggggagcctgactcagtgatggctgagccagcaccagctgagctcctggcaggagcagaggagcaagtcagcagctgggaagggcagccagggcagctgggctctcaggcactgtgagcgtggaaacactctatttccccaaacccctgaagttcagccaccaaaattatagtaagtacttattccccaaactgtgctaaattgtgaacgaaaggtcatgttttccctcaagtagctgacaacctaatgaggcagaaagacatataacaataaattgatttcattctctctccttagccttccagctgtaatgctagtgttatcagattatagccctagctcccctccgttgtcgctggcatctctaccagtgacagttactctctgaaggttttaactccctgttcactggcaccctttctggcactgcgtctgttgatgtctgcagtttcaacagtaagaagatgatatgttctgtgtctgatccctcacatcatcgtcttgcctccttgcaaggcaggcgtgtcttcactgctcccaaagcgcagctctgtagccagctcctgccagggaatctgtttcctgcgcctgtttctctgaccactctcctgtctctgacactcactcctatccccgcagatgggatttttttcactccctctggctgtaatctgtggaacctgccatgttccttcagccttcagctttctccatcgcagagctgagtgtgctcctatgcatatgtacagctctcttgtcctgctacccctggtttactcatgagacaaaagtctagccttggtaaatacagtgacctgcctcctccatgcctacagctcccatttaaaaatgcaagtatattaactagcctcttgtagagaaaatatacaaggccaagcgagtccttagcagcacccggaagtcctgatgagttcccgtagcccactcccctcctgtcctctcaggtttttgcacatcagttacctgggggactttttacagactgcagtgctggaaggagacgtagcttaaggtacgaggctctggattttattttctagcacaaaaaaataaatatataaaaatgtattatccatttaaaattctaaaatgcagtactgggaagatggctcagtagatagatagccacatgagttgggtctctgtggtctgtagtagagggagaaaacccactccacaggctgtcctgctgtgtgacatgcatggcacacacccacacacaaagcgaataaaagtttagctctttttaaatcaaatgcccaggctctgtccaacctgattttaaataactaagagaaataaagacctgtcagcgttgtgtaaactcctgggtagttctagtacacagcccggctttaagccagcacttatgttctgtggtttcatctttccatggttggttgggttttggtttttttgagacagggcttctctgtgtagccctggctgtcctggaactcactctgtagaccaggctggcctcgaactcagaaatccacctgcctctgcctcccaagtgctgggattaaaggcgtgcgccaccactgcctggctccatgatttcttaaaaaggtttattatatgtatgagtatttttgcttgtgtgcatgttgcataccacatgcatacagtgccaaaggagggcagcaaattctttggaactagagttccagacagttgtgagctgccctgtgggtgctaggaaccaaacccaggtcctctgtaagagcagcagggcaaggcctcttaactgccaggctctctccaggcttggtgagctgcttcaaatccataactacctgcccagtactctgcagtgtgattcacattcctagttaaaatctcaggaaaatcaaattgccatgtccttccccctacctccatgtccccgtggtttactactgaaacgggatgcgccctctctcggcttccctgcccagtgttcttccctgccttctccttgctcagtggtttcttttcactggtgtattccagtgatgtgcaaaaatttatctcaaacgacctcccaccccaaccaggcttggtgacacacacacccatagccagcaatgggcatgcaggggcaaggtcactccgccatacatgagactgtcctttttactatatcagtggacctactaccacatttctcccttcatcctcacagcaaaactcaaaatcatcacatgcacggtccccccttttctgttacctgggcagcttcacttacccccgttctgctgaaatcactcttagttgccggttacctttaaagatgttgttgaagcctgtggtcagcctcacttcctcttactgggcctgtcagcagcgttcaacagttgttctagcatggctttcgcttggttctaagacactggtttcctctgggcttccacccccccactcctcactccctcttcctgcttgtgtgcctggaactcacagatagatacttgcctgcctctggctcctgagttcagagagtcaaggcttatgccagcatgcctgacttcctgctttctctccacgctgggtccttacttcctttccagaagaactccatcctcatccatgatgggctctgtcctcagagctcttctctgcctttacttcctccccaggcaggctccagcagtctcactcctgagagtaccggtcttgcttccatagccaattgatatgaatcctaatctggcttctaatgtagactcaggcatctcctggttgacttctgcactgatgtcaaactgagagttaattagttagcattggcactccttcctacacacacacacacacacacacacacatacacacacatacaccacacacacaccacacacacacacatacacacacacacaccacacacacaccacacacacacacacacacacacacacacacacacacaccacacacacacacacacacaggccaacaagtctgttcttcctttgtattttattaagtagcaattcttttcttgcagtcactcaccaacaccctggttcttcaccccacaggcactcttcaacctcatcatcccagatcaccacgcagatgccttttgccctccccgcctcgccccctcgggctctgcggatcagcttgtggaaggtcttctgggtggtctgtctcgatgggatgctgaacacttcctgtttatcgctgagcacggctacctttatgagcacaactttgccttcttccctggctttcccttggccctgctgatggggactgagctgctgagacccttgcagggcctcttgagccagcgcagttgcctgctggtctcagtagcacttctcaacttgctgttctccgtgctggctgcagtggcactccatgacttgggttgtctggttctgcactgtcctcggcaggccttgtgtgcagcgctgctcttctgcatcagtcctgccaacgttttcctggcagccggctactcagaggctttgtttgccttcctgacgttcagcgccatggggcagctggagaggggccgtggctgggctagtgggctgctctttgctcttgctgctggggtgcgctccaatgggctggtgagccttggcttcctcctgcactcccagtgcagaggcttttgttcctctctggcggtgctgagcccctggaagcccctcgtgaagctgatggcctctgtgtgcttgtcggtgctcatagtcagccttcccttcgccctctttcagtatcgtgcctacatccagttctgctcaccaggctcagccccctccatccctgagcccttgctgcagctagctgccgacaaaggctaccggcttgcaggagaaaatgcacccccatggtgctcctgggaccttcctctaatatacaactatattcaggatgtctactggaatgttggtcttctgcgatactatgagctcaaacaggtgcccaatttcctactagctacaccagtgacagtactggttgtgtgggcaacctggacatatgtgaccacccacccttggctctgccttacacttgggctgcaaagaaccaaggacagggagaacccggagaagccccaccgtggcttcctgagtccgaaggtgtttgtgtacctggtccacgctgcagcactgctggtctttggaggtctgtgcatgcatgtccaggtgaggtgggcttctgcctggggtggctgtgtgggtacagggagaacctgaaggtcaggaggacaggtacctttctcactcaatgacccatgcttcatttagtcaacagctgttaaagcagacagatacgatcagatacaactgtaatcccttgctgggcacacagtggtggtgcacatagtgaaaccatctcaccgcctggcttaaaatgggttttagagagtgaaaaacaaaccaacttcccatataggacgcttgcaggagtggagggatggataaattaatgaagtgcttatagcacaaacagactttgcattctcaacttaacacccacatacaaagccaggtatggtagaagaccactgatgtgctgggcagccaatttagcaatatgtccaggttcagtgaaaaacttgcctcaaaagatgggttcagccgggcgtggtgtcgcacgcctttaatcccagcactcgggaggcagaggcaggcagatttctgagtttgaggccagcctggtctacaaagtgagttctaggacagccagggctacacagagaaaccttgtctcaaaaaaaaaaaaaaaaaaaaaaatgggttcaataccatcctcgtacacatagtttgaggtcactacactacataaaattctgtctccacaacaaaaactggggaaggagtgggcatgacaaaggcaaagttctgaaggctaccagaaagaggccttagtcaggggccagggacaagggactgagatacaaagttacaaaccaaagcagaccaggcgtcctggttctcccagcatccctcagtccttacctggcataccttgccttccccagaggctcctccctatatacaaatccagatcttatggtgtgtctgtctgtctgtcctctcttcctccacatttctctgcacacaccctttctctcttcctcactccctccccagcccctcttttcccatggcagctttcctggccttggtccttggggccagtggactcacctgagtgcagctgcccaataaacctgcctttagtataatctgatctggctcatttcaccttgggtggagaaataagctctcagttctcttggggagctctccctggtacactgactgcccatattggccttttatggtgtcttgagcacaggcagtagacatcttgtccagggtttgggggtggtggtgacagtacaggatcagaggtttgattttatgtccagttttgaagttcttggctgtctccaaggaagtcttgttcttacactgaccggttctgtctatttgtgctgttctttgagccatgtagttagggagataaaagaatcgtaatctgtatctgcgaccgacgggatcagctttgaagtgagtgccaggcaggctcagactgtgcaagcaggtgagagagaatgcttggagacttggctccaaactcttgtgagatgggaaaggttgaactaagaggaaccgagtcctgctgcttctccctgctctcagcccttctgataaggagcctccaggttcctacttccaaagcagactaaaatgtagagactgtgggtaaaattagacctcagagagaccttttagtattggttggcccgttagtgtggtaattccactgagactggttgttgggaacacgaggtttgtctggcatcggcagattaataacattctcggtattaggcagatctgcagcttttgctgaacttgctttcccagtgggatgttgttcgttgtcaggccatgattgacccagccacatcactgatgctccaaccaacatggcttttctaggttctcacgcggtttttggcctcttccactcctatcatgtactggtttccagctcacctgcttcaggatcaagaaccgctgctgaggtgtgtggacacagagcctgggaagcttcctcaggagaagtccccaccaggacagaaggcccccagaaactgtctcatgaaactcttctacgattggaagagatgctctccagtcacaagatgcgttctggtctacttcctgacctactggcttctgggactaattctccattgcaacttcctgccttggacttgacctggagtgtcaagggttgaaagctctaagacgacaccctggctgggacagcccgcacactccggagagcactgtgcagtaggatctccgggtctctctgggggccagctaagaagggaaaatgggagcacaggcgccccttctcatcctgggcggggcaggtgtaggggagtaacttcagtgctcagtgcaggggtctcagatctccctagtccacaagtactaggcaatcttaaacctactactgatccacgtgtaagtctgtcttcttgttttttgagagaaggttggtttctctacattgccctggttgtcctggaactcactctgtagaccaagtttatgtagaccaggctggccttgaactcagagattcatctgcctctgcctcttgagtactaggcccaccactgagtgtgagccaccccctgcctggcctggtagataaatttaaatgtttgatcaaagcacaggccaacagcctgccccactcaggatggtggagtcagtgcagtgtagtgacagaaggaagaggggacagacagcctgctctaagtgagaggtttctgaaggtggttgttttcttttttttttttttaaagatgtattatattcatatgagtacactagctgtcttcagacacaccagaagagggcatcagatcccattgcagatggttgtgagccaccatgtggctgctgggaattgaactcaggacctctggaagagcagccagtgctcttaaccactgagccatctctccagctccctgaagttttctttatgatactggtgtatgtgtgtctgtgtctatcctacagactgtgaaaatctaaatactccttttgcaatgaattacctttttctggaggaggggtagtcaggggagctaagacaaggtccctctgtgtaactctgactgtcctagaacttgcttgctatgtagatctggctggttttgaactcagagatcctcctacctctgccgaactagtttctataaattatagagggttgaggctagaactccgtagtaaagcacacgaggccctaatttcagtaataaacaccacttggatcagagcacagggtctgaatcttggctcccattcctcactttccagctgtatgatctaaagccaccttcagagcttttgccttctctgaaattaaggaggagacttcttccctggggtgtgatttaggccttaaatcttgaggctaccttaaacaaaagataaatggaggctcacaagtggtctaatgggaaagtcctcctttgatcaattggaaacagcctcccccccacctctgggaacaactcggaatagctgtcgtggagagtaatgacacctggtggaaaatgacccagggtgactggttttccattctcaaagatcacacttgcatgagtcagaggcacctaccccacagccttgatgggggaaccttgtagctaagtcagtccaaggttgtctactgtagcatctgccctgcttcctggctccctgtggttactaagagtaaccctgcccctgaggaatgatgactccaggatgctgaggcgggaggtgagcttgagggcagctacagaataagaccctgtataaatgaaagacagtgtccctgctgcgcagcgtttgtgcattcttgagccaggtaactttggctcagtgtcaccatccttactccccactgggccaaaaattccaataagcagcattcttcaaaacagatggcagtcagcagtggcttctggaaagctcggagttggaatttggacacactccttccgaccgtgacagaaagctcaacttgccagctgaagggaagctcctggcccaggcccagcaccctctgtgggagcctccagccagcctggccaacgagcattcccacccagcaccacagcactagcacagccaagcatttggtccagagtcaaatgctactgaaaatgtacacacagattggggcagccctctgccttctgccaagacaccaagtgcccttcttggcaaaagacaacacctctcccctagtgtgtccctccagctggcagactgcagcctcttccccagcagctgcaaatcctaggactccccctccccctccaaaaaaaaaaaagtgcgtgggaggagccgggatcctttggtctccctctctgctccactttgcctccgtttggagggtaaccagaagtgattgttcctctcctgggaggggtgactcaccccctacagagcagcttcagtctcccctgttttgtccctagagccatcactgaagaaaccctacacctgggcaccccggctgggtaagcacacctggagaaggccgggcttctggcctgggaggctcacggctcagcttgtaaggagcgggctgactttatgaccagcagctgtccctttaccggcctattaacagtctttaatagtctgaaggaggaccatgaagggcccaaggccggagcttcctgtttccccgaggtctaagaatgccacagctgggtggggcggccacggtttcagagaaaagtcatttccttccaagaccctgctaaaatacaaaccagacactctgaggacccagaagtggatgtctttttgttctttaatggaggtgggaaaaggggaagctttggcgggtctctagtagtcccactggggtggggcagcggaagtctgggtctaaaaatgtaaagtgtggaggcttaagtttttaaaaggattcttttcaccagttgtttattaatgcctgttttggactaaggcaggcctagccacgcctcctgtcctcaagtgttgctggccagtgcaccggagcattcattagggaagtggtaaattctttaaaaagcaacattttatggtgtgtgtgtgtgtgtgagtgtgtgtgaacatgaacatcctatagcccacgtggaagtcagcattgccctcttgttgagtcttagttctttattatgctgtccttaaaactgggcatgtcaggcctgaggacaagtcccttcccccactgagccctctgagtgctggcccagaagtagcaaattctgaggcataaaggacatgttttgctatctttctacttaaattttttttataacgaggatgaattaaagttttaatttgaagatggtgtggtgcacacgtgcagtccctgcccttgtgagatggagcaggaagattgtgaaatctaagcctactgtggtgcacaccttcaatcctaggactcgggaggcagagataggggggatctctgtgaattggaggctatcctggtctacagagtgatttccaggacatccagggctacgtagtgaggccatgtctcaaaacaaaacaaaacaaaaagaactggaaagatgtctcggtggttaagagccccaagtcctgtttttgtaggggacccaagtacaagaccctatcactgtagctccagcagagccaacaccaggaaaccttgacaacctgcactcctgagcacattgcacataggaacacaaacactcttaaactccatggcctagagaaatagctcagtggttaaaagtgttagcattccgtctaggctccaccccacagtgacctggcaacagccaggtgtgcctgactcactataaaaggggctgctcaccgcctggccccccactgtctcttgctcctgccttcttgctccctctgttctctagcccctcgccccacatccctccccccacccctccccctctctacctgcctttctctgtctctcctaccctctctctttttttcccctcaaagatcttatttattttatgtatgtgaatacactgtcgctgtcttcagacacaccagaagaggacgtaggatcctattacaaatggttgtgagccaccatgtggttgctgggaattgaactcaggacctctggaagagcagtcagtgttcttaaccgctgagccatctctccagccccctctactacccccttaactcccctccccaggctctgaataaactattctctactatactgtgtggctgttcctcagggggaagnnnnnnnnnnnnnnnnnnnnatacttccaccaattccctctttatctttttataaacaacaaaaagtgtttactgctcttccagtggtctatgtggttccaagcacccttgttgggcagcttaagacctctggtaactccaaccccagggactctgacattctttttagcttccttgggctcctgaacacacatggcatacactcactcagatacatatatacataagaataaacacatcttcaaagagttgaaagcagcgagtgagtatattatctccccccatgccctagttagcattggcagcactgggggcaaacctgtcaggccagctaggtaagcggctgtactggtgagctacatccccagccagagagtgactacagcagatgggaagagaatcagggaagagcgctcagcttgaagggagccaaggaattactctaagatctggctccagagccaacccactgtacactaaagctgtgtgagctcactgaactcagcctgacttctctcatctgtccccgtgcctacggagttcttatccataaactcagccatcccttatgggaaggtaaatgttacttctggatattttgagacatctcataatagttcttattgaccttgaactctacatcccccagactggcccagaactgtccatcctccaggttgagatcatacatgcatgtacaccaccgtacacatcagagatctttgaatggggtaggtttttagtctcagaacttgaaagatagaggcaggcatatttctgttaagtctatgccagcccggtctatctagcaagtacctggatagccaggcttacatagtgagactgtctcaaaaaaaaaaaagaaagaaagaaagaaagaaagaaagaaagaaagaaagaaagaaagaaaggaaacacttgaaaaaaagaaattgatcagtactgagtgttgtgttttataaaaaaaaaagataaagaaaggaggaacatgttttgcagaggtgtagtcaggtaaggggggagggggtgcctcagctggcccatgctgagtcatccctgccccctgagggaccagccacacatagtatagaatagagattattcagggcatggcaaggggagttgagaggttggtagagacagaaagagagagagagagagagagagaagagaagagaagtagaggccagccccatgagcacgaggaggaagggaggagggaagggcgcgagccgacagagtaggagcaagaaggcaagagctagagagagcagagcagcccctgttacagtgagtcaggcacctgctgttgccaggtaactgtggggtggagcttagactgaatgagtatattagaccttttccattacttcctaaataacacagtacaactgtttatataccatttacacattatggattatagacgtgtttcaaaggtgcaagagggtttcttacataggttatttacaaaacctatgtcatttgtatttttgtacctggggttcccttcctagaccctggggacagttctttgggtcactgaggaatgactgcactgaacatagataggaataacatagtcttacagaataattgtaaaaattaaattttgacacatgacaaatttaggaaaacgctaacaaaagaatagctgggttttggagtgtattgtgccgtcggcacttcacgtgctgggacagtggactctcagaggctaggatgagtggagaggcatccgcacagtgtttactgcagtggtgttgggatgggagagatgagaaagaaggcactgtggggctttgggcaaatggctggccctctctagacctgccttctcatctgcatgtggagctcactcaggcttagctgctcctcaaggcccctcagggaagggaggagcactcacaagccttcttgggaggggcagtgcagggtccttccctccctggggatatgtaagccattaatgcttactggaggcagtggggacctgcccacactcctgttggctgactaattaaactgatgggttcaccaagctcaggtctttggtttgctgcaggtgctgtgtcttccttaggtaggcagacagacttgtgtgctcatacctccccggggaaagctaacataacagggtaacaggctgtaaggacgtggcagcttgggccccacagagtcatcatgagagcaaaagagtgcagtggagagcacacagtgacaacatcattgccattaaatgacaaataacattcccggaagggggagaagaaaggaagaagagctgcagagataactcattctataaaaatgcttgcccgcggggctggagagatggctctgctgttaagagcactgactgctcttccagaggtcctgagttcaaatcccagcaaccacatggtggctcacaaccatctgtaatgggatctgatgccctcttctggtgcatctgaaggcagctacagtgtactcatgtacatgaaataaatattcttttaaaacgcttgctaataagtatatgagtactcaagtttgatggccagaacctttatataaaaggttgggcttagtggtgctttgtgcttgcaactccagtacacacaagcaggaacatggagatcctgcggaggggctccctggccagatgacctagctgtgagggtttgaatgagaatggctcccttaggctcatgtgttgggattcgaggtttccagttggtaaaactctttgggaagaatcaggaggtatgggcaggccttgaggcttccaaagactattacatccctactgcaggctcctccttccccactctcacatcaagtgtatgagctctcaggaggtctgcctttgctccaccatcatggactcttaactcctcgaaacttcaagtccagtgtttaacactttagtttataaattgccttgggggctggtgagatggctcagtgggtaagagcacccgactactcttccgaaggtccgaagttcaaatcccagcaaccacatggtggctcacaaccatccgtaacgagatctgacgccctcttctggagtgtctgannnnnnnnnnnnnnnnnnnnnnnnnnnnnnnnnnnnnnnnnnnnnnnnnnnnnnnnnnnnnnnnnnnnnnnnnnnnnnnnnnnnnnnnnnnnnnnnnnnnnnnnnnnnnnnnnnnnnnnnnnnnnnnnnnnnnnnnnnnnnnnnnnnnnnnnnnnnnnnnnnnnnnnnnnnnnnnnnnnnnnnnnnnnnnnnnnnnnnnnnnnnnnnnnnnnnnnnnnnnnnnnnnnnnnnnnnnnnnnnnnnnnnnnnnnnnnnnnnnnnnnnnnnnnnnnnnnnnnnnnnnnnnnnnnnnnnnnnnnnnnnnnnnnnnnnnnnnnnnnnnnnnnnnnnnnnnnnnnnnnnnnnnnnnnnnnnnnnnnnnnnnnnnnnnnnnnnnnnnnnnnnnnnnnnnnnnnnnnnnnnnnnnnnnnnnnnnnnnnnnnnnnnnnnnnnnnnnnnnnnnnnnnnnnnnnnnnnnnnnnnnnnnnnnnnnnnnnnnnnnnnnnnnnnnnnnnnnnnnnnnnnnnnnnnnnnnnnnnnnnnnnnnnnnnnnnnnnnnnnnnnnnnnnnnnnnnnnnnnnnnnnnnnnnnnnnnnnnnnnnnnnnnnnnnnnnnnnnnnnnnnnnnnnnnnnnnnnnnnnnnnnnnnnnnnnnnnnnnnnnnnnnnnnnnnnnnnnnnnnnnnnnnnnnnnnnnnnnnnnnnnnnnnnnnnnnnnnnnnnnnnnnnnnnnnnnnnnnnnnnnnnnnnnnnnnnnnnnnnnnnnnnnnnnnnnnnnnnnnnnnnnnnnnnnnnnnnnnnnnnnnnnnnnnnnnnnnnnnnnnnnnnnnnnnnnnnnnnnnnnnnnnnnnnnnnnnnnnnnnnnnnnnnnnnnnnnnnnnnnnnnnnnnnnnnnnnnnnnnnnnnnnnnnnnnnnnnnnnnnnnnnnnnnnnnnnnnnnnnnnnnnnnnnnnnnnnnnnnnnnnnnnnnnnnnnnnnnnnnnnnnnnnnnnnnnnnnnnnnnnnnnnnnnnnnnnnnnnnnnnnnnnnnnnnnnnnnnnnnnnnnnnnnnnnnnnnnnnnnnnnnnnnnnnnnnnnnnnnnnnnnnnnnnnnnnnnnnnnnnnnnnnnnnnnnnnnnnnnnnnnnnnnnnnnnnnnnnnnnnnnnnnnnnnnnnnnnnnnnnnnnnnnnnnnnnnnnnnnnnnnnnnnnnnnnnnnnnnnnnnnnnnnnnnnnnnnnnnnnnnnnnnnnnnnnnnnnnnnnnnnnnnnnnnnnnnnnnnnnnnnnnnnnnnnnnnnnnnnnnnnnnnnnnnnnnnnnnnnnnnnnnnnnnnnnnnnnnnnnnnnnnnnnnnnnnnnnnnnnnnnnnnnnnnnnnnnnnnnnnnnnnnnnnnnnnnnnnnnnnnnnnnnnnnnnnnnnnnnnnnnnnnnnnnnnnnnnnnnnnnnnnnnnnnnnnnnnnnnnnnnnnnnnnnnnnnnnnnnnnnnnnnnnnnnnnnnnnnnnnnnnnnnnnnnnnnnnnnnnnnnnnnnnnnnnnnnnnnnnnnnnnnnnnnnnnnnnnnnnnnnnnnnnnnnnnnnnnnnnnnnnnnnnnnnnnnnnnnnnnnnnnnnnnnnnnnnnnnnnnnnnnnnnnnnnnnnnnnnnnnnnnnnnnnnnnnnnnnnnnnnnnnnnnnnnnnnnnnnnnnnnnnnnnnnnnnnnnnnnnnnnnnnnnnnnnnnnnnnnnnnnnnnnnnnnnnnnnnnnnnnnnnnnnnnnnnnnnnnnnnnnnnnnnnnnnnnnnnnnnnnnnnnnnnnnnnnnnnnnnnnnnnnnnnnnnnnnnnnnnnnnnnnnnnnnnnnnnnnnnnnnnnnnnnnnnnnnnnnnnnnnnnnnnnnnnnnnnnnnnnnnnnnnnnnnnnnnnnnnnnnnnnnnnnnnnnnnnnnnnnnnnnnnnnnnnnnnnnnnnnnnnnnnnnnnnnnnnnnnnnnnnnnnnnnnnnnnnnnnnnnnnnnnnnnnnnnnnnnnnnnnnnnnnnnnnnnnnnnnnnnnnnnnnnnnnnnnnnnnnnnnnnnnnnnnnnnnnnnnnnnnnnnnnnnnnnnnnnnnnnnnnnnnnnnnnnnnnnnnnnnnnnnnnnnnnnnnnnnnnnnnnnnnnnnnnnnnnnnnnnnnnnnnnnnnnnnnnnnnnnnnnnnnnnnnnnnnnnnnnnnnnnnnnnnnnnnnnnnnnnnnnnnnnnnnnnnnnnnnnnnnnnnnnnnnnnnnnnnnnnnnnnnnnnnnnnnnnnnnnnnnnnnnnnnnnnnnnnnnnnnnnnnnnnnnnnnnnnnnnnnnnnnnnnnnnnnnnnnnnnnnnnnnnagagaaaaggtttctaggaattggctctctcctaataccagtagatcccagagatcaaaagcaggtcatgaggttagtggcaaaaagcatctttcaccccaccgagccatctcactgacccagaagtttctgtctcccttacattgtagtcgagtgcaggtttgggaacaggggcctgtccttgtcaggacctagggaagccattccttgttttgtgactgacttagccctgccctggcttcccaggctccttgcttgctgagcattgaaaggtcagcccagcccagaggaccttccactgagcaggactgtcagtcaggaggccacccttacagcaagagagggaaagggggtgatcataaataatttcgtcgtttaaccatgttccaaatattgcacaggacatgacttatgctgagaaattcttggttgtttatctgaaattcaaatcctgcacttttcctagctaaacctggcagtccctacgaggaagtgaagcttggcccagcgctcaggaagatggagtctcggatctttgtatgtcagtgtctctctgagccaaatacctgtttttccctacagaatacatttacctcaagtcccatgtagacctggtactaagcacagagtcccgcaatcagcttcaggggcagttactgctggcattaacgcattaaacaaatcctctcctcttcacgggcgggcgtactcagtgtccatggtggggaggaagaaagggtaaagtggggtcagactgccaatcagaaaagggaagcagggaaagctggggcttttggtcaaaagcttgttaatcctcactgctcaggcaaagcaagactgccccagggactgggga

SEQ ID NO: 724 - DNA, 1236 bp, Mus musculus
gacccggatggaggcgctgaagttggagctccgcgggggtggtctggacgcgcgggcgcggaggatccggcgccagctctgcaactctggagtcctccggggagggaagctgtcaaacgcaggccgagagaaattaggcggaggctgtagagaagcgaggagccccgcccctccgccatagcagcctccggcgccgcctcttcctttgcagcctccggccctcgtctgcttccggccccgttgcctggcccggccccgcgattcccccgggacgaagccctgggccgtggctcccttgggaatttagaagccggaggaagctcagtcctggtggtgagagagaggatgggactcctggacccatcccagaaagaggtgctgagattcgcagtaaactgccgcatcctgactctagtgctacaggatgtctactggaatgttggtcttctgcgatactatgagctcaaacaggtgcccaatttcctactagctacaccagtgacagtactggttgtgtgggcaacctggacatatgtgaccacccacccttggctctgccttacacttgggctgcaaagaaccaaggacagggagaacccggagaagccccaccgtggcttcctgagtccgaaggtgtttgtgtacctggtccacgctgcagcactgctggtctttggaggtctgtgcatgcatgtccaggttctcacgcggtttttggcctcttccactcctatcatgtactggtttccagctcacctgcttcaggatcaagaaccgctgctgaggtgtgtggacacagagcctgggaagcttcctcaggagaagtccccaccaggacagaaggcccccagaaactgtctcatgaaactcttctacgattggaagagatgctctccagtcacaagatgcgttctggtctacttcctgacctactggcttctgggactaattctccattgcaacttcctgccttggacttgacctggagtgtcaagggttgaaagctctaagacgacaccctggctgggacagcccgcacactccggagagcactgtgcagtaggatctccgggtctctctgggggccagctaagaagggaaaatgggagcacaggcgccccttctcatcctgggcggggcaggtgtaggggagtaacttcagtgctcagtgcaggggtctcagatctccctagtccacaagtactaggcaatcttaaacctactactgatccacgt

SEQ ID NO: 725 - protein, 211 aa, Mus musculus
MGLLDPSQKEVLRFAVNCRILTLVLQDVYWNVGLLRYYELKQVPNFLLATPVTVLVVWATWTYVTTHPWLCLTLGLQRTKDRENPEKPHRGFLSPKVFVYLVHAAALLVFGGLCMHVQVLTRFLASSTPIMYWFPAHLLQDQEPLLRCVDTEPGKLPQEKSPPGQKAPRNCLMKLFYDWKRCSPVTRCVLVYFLTYWLLGLILHCNFLPWT

SEQ ID NO: 726 - DNA, 1733 bp, Mus musculus
ggatggaggcgctgaagttggagctccgcgggggtggtctggacgcgcgggcgcggaggatccggcgccagctctgcaactctggagtcctccggggagggaagctgtcaaacgcaggccgagagaaattaggcggaggctgtagagaagcgaggagccccgcccctccgccatagcagcctccggcgccgcctcttcctttgcagcctccggccctcgtctgcttccggccccgttgcctggcccggccccgcgattcccccgggacgaagccctgggccgtggctcccttgggaatttagaagccggaggaagctcagtcctggtggtgagagagaggatgggactcctggacccatcccagaaagaggtgctgagattcgcagtaaactgccgcatcctgactctagtgctacaggcactcttcaacctcatcatcccagatcaccacgcagatgccttttgccctccccgcctcgccccctcgggctctgcggatcagcttgtggaaggtcttctgggtggtctgtctcgatgggatgctgaacacttcctgtttatcgctgagcacggctacctttatgagcacaactttgccttcttccctggctttcccttggccctgctgatggggactgagctgctgagacccttgcagggcctcttgagccagcgcagttgcctgctggtctcagtagcacttctcaacttgctgttctccgtgctggctgcagtggcactccatgacttgggttgtctggttctgcactgtcctcggcaggccttgtgtgcagcgctgctcttctgcatcagtcctgccaacgttttcctggcagccggctactcagaggctttgtttgccttcctgacgttcagcgccatggggcagctggagaggggccgtggctgggctagtgggctgctctttgctcttgctgctggggtgcgctccaatgggctggtgagccttggcttcctcctgcactcccagtgcagaggcttttgttcctctctggcggtgctgagcccctggaagcccctcgtgaagctgatggcctctgtgtgcttgtcggtgctcatagtcagccttcccttcgccctctttcagtatcgtgcctacatccagttctgctcaccaggctcagccccctccatccctgagcccttgctgcagctagctgccgacaaaggctaccggcttgcaggagaaaatgcacccccatggtgctcctgggaccttcctctaatatacaactatattcaggatgtctactggaatgttggtcttctgcgatactatgagctcaaacaggtgcccaatttcctactagctacaccagtgacagtactggttgtgtgggcaacctggacatatgtgaccacccacccttggctctgccttacacttgggctgcaaagaaccaaggacagggagaacccggagaagccccaccgtggcttcctgagtccgaaggtgtttgtgtacctggtccacgctgcagcactgctggtctttggaggtctgtgcatgcatgtccaggtgaggtgggcttctgcctggggtggctgtgtgggtacagggagaacctgaaggtcaggaggacaggtacctttctcactcaatgacccatgcttcatttagtcaacagctgttaaagcagacagatacgatcagatacaactgtaatcccttgctgggcacacagtggtggtgcacatagtgaaaccatctc

SEQ ID NO: 727 - protein, 410 aa, Mus musculus
MGLLDPSQKEVLRFAVNCRILTLVLQALFNLIIPDHHADAFCPPRLAPSGSADQLVEGLLGGLSRWDAEHFLFIAEHGYLYEHNFAFFPGFPLALLMGTELLRPLQGLLSQRSCLLVSVLNLLFSVLAAVHDLGCLVLHCPRQALCAALLFCISPANVFLAAGYSEALFAFLTFSAMGQLERGRGWASGLLFAAGVRSNGLVSLGFLLHSQCRGFCSSLAVLSPWKPLVKLMASVCLSVLIVSLPFALFQYRAYIQFCSPGSAPSIPEPLLQLAADKGYRLAGENAPPWCSWDLPLIYNYIQDVYWNVGLLRYYELKQVPNFLLATPVTVLVVWATWTYVTTHPWLCLTLGLQRTKDRENPEKPHRGFLSPKVFVYLVHAAALLVFGGLCMHVQVRWASAWGGCVGTGRT

SEQ ID NO: 728 - DNA, 598 bp, Mus musculus
ggatggaggcgctgaagttggagctccgcgggggtggtctggacgcgcgggcgcggaggatccggcgccagctctgcaactctggagtcctccggggagggaagctgtcaaacgcaggccgagagaaattaggcggaggctgtagagaagcgaggagccccgcccctccgccatagcagcctccggcgccgcctcttcctttgcagcctccggccctcgtctgcttccggccccgttgcctggcccggccccgcgattcccccgggacgaagccctgggccgtggctcccttgggaatttagaagccggaggaagctcagtcctggtggtgagagagaggatgggactcctggacccatcccagaaagaggtgctgagattcgcagtaaactgccgcatcctgactctagtgctacaggttctgctgactttgggcattaaagagtcttcatcttggtggcctgtactgttacctgtgattgtcaccccatcccatttcttttcactggagtggcctgatgaggaaactgacaagaagagaaagaacctttaagtgagctgtgctcttgtcgctgggctggggagcctgactcagtga

SEQ ID NO: 729 - protein, 70 aa, Mus musculus
MGLLDPSQKEVLRFAVNCRILTLVLQVLLTLGIKESSSWWPVLLPVIVTPSHFFSLEWPDEETDKKRKNL

SEQ ID NO: 730 - DNA, 939 bp, Mus musculus
cgctgaagttggagctccgcgggggtggtctggacgcgcgggcgcggaggatccggcgccagctctgcaactctggagtcctccggggagggaagctgtcaaacgcaggccgagagaaattaggcggaggctgtagagaagcgaggagccccgcccctccgccatagcagcctccggcgccgcctcttcctttgcagcctccggccctcgtctgcttccggccccgttgcctggcccggccccgcgattcccccgggacgaagccctgggccgtggctcccttgggaagccggaggaagctcagtcctggtggtgagagagaggatgggactcctggacccatcccagaaagaggtgctgagattcgcagtaaactgccgcatcctgactctagtgctacaggttctcacgcggtttttggcctcttccactcctatcatgtactggtttccagctcacctgcttcaggatcaagaaccgctgctgaggtgtgtggacacagagcctgggaagcttcctcaggagaagtccccaccaggacagaaggcccccagaaactgtctcatgaaactcttctacgattggaagagatgctctccagtcacaagatgcgttctggtctacttcctgacctactggcttctgggactaattctccattgcaacttcctgccttggacttgacctggagtgtcaagggttgaaagctctaagacgacaccctggctgggacagcccgcacactccggagagcactgtgcagtaggatctccgggtctctctgggggccagctaagaagggaaaatgggagcacaggcgccccttctcatcctgggcggggcaggtgtaggggagtaacttcagtgctcagtgcaggggtctcagatctccctagtccacaagtactaggcaatcttaaacctactactgatccacgt

SEQ ID NO: 731 - protein, 119 aa, Mus musculus
MGLLDPSQKEVLRFAVNCRILTLVLQVLTRFLASSTPIMYWFPAHLLQDQEPLLRCVDTEPGKLPQEKSPPGQKAPRNCLMKLFYDWKRCSPVTRCVLVYFLTYWLLGLILHCNFLPWT

SEQ ID NO: 732 - DNA, 30402 bp, Homo sapiens
aggaggcagaggttgcagtgagctgagatcgtgccactgcactccagcctgggcaacagagcgggactctgtctcaaaaaaaaaaaaaaaaaaatacacacacacacactctcacacactagcccgatgtggtggcaggcgcctgtaatcccagctacttgggaggctaaggcaggagaaaaatcgcttgaacccaggaggcggaggctgcagccaactgagatcacaccactgtactccagcctggatgacagagtgagacttcatctcaaaaaaaaaaaaaagtgttgggattacaggtgtgagccactgcttccagcccctagatctaattcgaaagcccttatttttttttccatctgctctactgttcagccaaagattgtgactggagaggagtgttttcttctagaggtaaataaatggcctatatattatccaaggtggaatttgggtctctgtagcaccagcttggaccagtgtttggagagctgaagcctcgtcccactccttatgctgcaagatccatggagttccagccccctggacttgtggggagcttggagaagagagccatgaacatctgcccacatggcattctcttctcttagcttaagtcaccatgcctaagcttgggttccacttggcagtgagatggagagagtgtcctaaaagagataatggcaatgaccaccaggttgaaaactggcctggtgaagaaaagcagaagattaattgggaaaagagaaggctaagagatgattggccctggtgggtgaggtgcaaagctgttggctagtgttcctggagataggcttacgtgaaggtaggttgggcagaagaaagaactttgtgttgggcatagaagagattaagatgaacaatttgctctgtggagaacctttgggaaaggagcaactctgcctctcccaactgatacagaagacttggggaggtctctcaagtcaataattctgttcttaggccacttttctcccttaatttatttcctgttctttctctttttagctcccagggttgctagagctccttgtagaatatttccgacgatgcctgattgagatctttggcattttaaaggagtatgaggtgggtgacccaggacagagaacgctactggatcctgggaggttcagcaaggtgtctagtccagctcccatggagggtggggaagaagaagaagaacttctaggtcctaaactagaagaggaagaagaagaggaagtagttgaaaatgatgaggagatagccttttcaggcaaggacaagccagcttcagagaatagtgaggagaagctgatcagtaagtttgacaagcttccagtaaagatcgtacagaagaatgatccatttgtggtggactgctcagataagcttgggcgtgtgcaggagtttgacagtggcctgctgcactggcggattggtgggggggacaccactgagcatatccagacccacttcgagagcaagacagagctgctgccttcccggcctcacgcaccctgcccaccagcccctcggaagcatgtgacaacagcagagggtacaccagggacaacagaccaggaggggcccccacctgatggacctccagaaaaacggatcacagccactatggatgacatgttgtctactcggtctagcaccttgaccgaggatggagctaagagttcagaggccatcaaggagagcagcaagtttccatttggcattagcccagcacagagccaccggaacatcaagatcctagaggacgaaccccacagtaaggatgagaccccactgtgtacccttctggactggcaggattctcttgccaagcgctgcgtctgtgtgtccaataccattcgaagcctgtcatttgtgccaggcaatgactttgagatgtccaaacacccagggctgctgctcatcctgggcaagctgatcctgctgcaccacaagcacccagaacggaagcaggcaccactaacttatgaaaaggaggaggaacaggaccaaggggtgagctgcaacaaagtggagtggtggtgggactgcttggagatgctccgggaaaacaccttggttacactcgccaacatctcggggcagttggacctatctccataccccgagagcatttgcctgcctgtcctggacggactcctacactgggcagtttgcccttcagctgaagcccaggaccccttttccaccctgggccccaatgccgtcctttccccgcagagactggtcttggaaaccctcagcaaactcagcatccaggacaacaatgtggacctgattctggccacaccccccttcagccgcctggagaagttgtatagcactatggtgcgcttcctcagtgaccgaaagaacccggtgtgccgggagatggctgtggtactgctggccaacctggctcagggggacagcctggcagctcgtgccattgcagtgcagaagggcagtatcggcaacctcctgggcttcctagaggacagccttgccgccacacagttccagcagagccaggccagcctcctccacatgcagaacccaccctttgagccaactagtgtggacatgatgcggcgggctgcccgcgcgctgcttgccttggccaaggtggacgagaaccactcagagtttactctgtacgaatcacggctgttggacatctcggtatcaccgttgatgaactcattggtttcacaagtcatttgtgatgtactgtttttgattggccagtcatgacagccgtgggacacctcccccccccgtgtgtgtgtgcgtgtgtggagaacttagaaactgactgttgccctttatttatgcaaaaccacctcagaatccagtttaccctgtgctgtccagcttctcccttgggaaaaagtctctcctgtttctctctcctccttccacctcccctccctccatcacctcacgcctttctgttccttgtcctcaccttactcccctcaggaccctaccccaccctctttgaaaagacaaagctctgcctacatagaagactttttttattttaaccaaagttactgttgtttacagtgagtttggggaaaaaaaataaaataaaaatggctttcccagtccttgcatcaacgggatgccacatttcataactgtttttaatggtaaaaaaaaaaaaaaaaaatacaaaaaaaaattctgaaggacaaaaaaggtgactgctgaactgtgtgtggtttattgttgtacattcacaatcttgcaggagccaagaagttcgcagttgtgaacagaccctgttcactggagaggcctgtgcagtagagtgtagaccctttcatgtactgtactgtacacctgatactgtaaacatactgtaataataatgtctcacatggaaacagaaaacgctgggtcagcagcaagctgtagtttttaaaaatgtttttagttaaacgttgaggagaaaaaaaaaaaaggcttttcccccaaagtatcatgtgtgaacctacaacaccctgacctctttctctcctccttgattgtatgaataaccctgagatcacctcttagaactggttttaacctttagctgcagcggctacgctgccacgtgtgtatatatatgacgttgtacattgcacatacccttggatccccacagtttggtcctcctcccagctacccctttatagtatgacgagttaacaagttggtgacctgcacaaagcgagacacagctatttaatctcttgccagatatcgcccctcttggtgcgatgctgtacaggtctctgtaaaaagtccttgctgtctcagcagccaatcaacttatagtttatttttttctgggtttttgttttgttttgttttctttctaatcgaggtgtgaaaaagttctaggttcagttgaagttctgatgaagaaacacaattgagattttttcagtgataaaatctgcatatttgtatttcaacaatgtagctaaaacttgatgtaaattcctcctttttttccttttttggcttaatgaatatcatttattcagtatgaaatctttatactatatgttccacgtgttaagaataaatgtacattaaatcttggtaagacttttgtgaagctttttattgttttcaaactaaaacttgaccttttgtcggggggcagggggatagtcctgtttttgcaaacctcccttagtgtgagatctcccctaaatagtggcattcctggaccctgtcatttatttactatattccaaaataagacaaccatttatctggaggcaatctccaacttaatcacttataatatctctggactggctcttttccctgactccagactagagcattcagccacctttcttgtcatccctgcttggaagtttactttgaacatgccaaagctaaaatgtcctgtcttcccccactagaaacctgcttctcccatagttttggtttttttgtttgtgttttccttttagtaaatggcaactccattctatcacttggctaaaaaaatccttgacttctttcacttccacatccaatctgttagcactcttcataaaataatcctcaatcccacactactgtagttcaagatactgtcatatcttggattcttgaaatacctccaaattggcctccctgcttctgctttgcctggttgaacctattctcaacagagcaaccaaaaggacccctataaaaggtaagtcagatcaaacgccttcagtgcttctgactcagtaagtaaaaatccagactcttaaaaagtggcctacaaggccctgagttatctagcttacctctacctttcctgcaccatctgtcttgcccgttgctcaccccactgtatagagatgtttccaccttggagtctttgtactttatactctctcaccaaataactgcatggctcaagtcctcgactgcttcaagtctttgtccaaatatataagtaaggcttttcatggtcaccttacttagaatagcaatctctgccccccactatgtttcccttgtctgccttatttttcctgtggcacttgttactgtctggcctgttgtgtgttgtacttacctgtcaccttccactgaaatgtaaactgagggtggtgggaggggtgttttgttcactgctgcatcctggtgctaacacatagactggcacatagcatctacttaagtagtagttgaatgatactgtcgatgttggctagatgcagttgcttttatgaggctaatgtcacaatatatagtttctctgttcacccccttccttagggaaacaatagagaagcctcaagttcctcaggagaaatcagaagcagaaagagaaaaaatgctatcattgtggacacttagaagtgaaatttgaaacaagaaacaacagttttctattgtgtacctacttatattctggacatagcacatcacaatcctacaacaatcctgtgcctgtgaagtcagtatgtggctcccattttacagttgaagaaagaggctaagaaaagtgaaaggctttttaagttcatacaccaagcaagttccacctgactccaaggatcatgcttttcttaatataccacactacctcctttctggatgagaacccaacccaggagtaagggatctagctgtggagctcagcaagcaagatttgtttttattgtctttagcacgaggtaaaattgtcctcagaatttcaatcaagtgttcatcagactaagtgtggctgttaatatttgggtcaggaacaggatttgaataattagtatttctcaattgagagaggaaaacctttgtcaaccaagatgcgttcctaggattcttctagaaaaaggtaaatgggaagcttttcatatctacaattttggtaagcaatattgctaatggctatttttgttctaggcctcgagctccgtttgctagtctagaaattgcatatctgggctgtgtgtggagcattacctaggagttcggtttcctgggttcctttcatctgctctcctgcaatgcagggagagcctagcctggtctccagtttctgactggagttaccatggccaagagaactgctggccagtgagctgtgagtaatttgcttttgagaagtaaatagaacctagccagcagagaacccaggggtgtggccagtagttcttttcccaggctcctccctccccaccccccaaatgaccttaaccttctttcatagctggagagcagccaagtccagcctaaacaatactctcaacctcattggctcttttgccttgcagccactgccacccccaagtggctaaggccttcccactaggcctctcagtggggtcaaggttttctaaccactgaaaggcaaacactgaaggaatggtgaaaaatacctagtgaccatgggctttaaatgatgagtgtttgggtactgcagttggaggcaaggcagagtctttgtccttgggtggatgggcatcttcaagtgatcgggcagaggccaaaaaggatgcttttggtatatgagacctgactggtgtcaccccaagtgtcaggatggatgtaaatgtcacccagcatcttggaaactgccaatgaatgccttttatcccacagcaaaaagaagtagcataaagttctggtaaagtacagcaggccagtatggtcactttcgccccacaatggcatgacatcagagccagcatcccagattaggatcagctattccaatcccataggactggggccatggaaagtttagcttctagaaactgaactgctgagagtagttgggctacttactgggctggtcctctgcccagcctggggccaaggccacttccagaagtggaggcaggagcaaggcaaggcagctacagagagaaatgtcagttgctccagggaagtgagtgttctgtgagaaccacctaacttccttctctacactttcagtgggaaaatcacttttttgttcagtgagttgtaatagcccatctttattgagcattgtatgccaagcactataaatcctatgaggtagatatcatctccaccagggcaaggattgtttctatcttgctcagtgttgcatcttcatcccatcacatagtaggcattcctgtactgttgaacaaatcaaacagataagataggaatttgatggaggaaagagtaggtcagagctgttaagacttggtgtgcccatcttagcatagcccgtaaagactcttacatatgggaaaaatggaagagagggaaagaggtaaatctgtgaaagattaaaatagtgtagagtgggagaaccagcctgggaggctggagacctgaattcaagtcccatcgctaccactagctatgtgacttcttgccagtcacttaccctttgtgatccttagctccctcatccataaaatataggtataggattaaagaaattgatttattgaccagatctttattgaagacacacagtgtgcaaggcactgttctaactggaaatacattggtgaacaaagcccttgctcctccattacactcagaagcttacattctagaatagggaaacagacattgaaacaagtaaaattcatggacaggacaagcagatagtgttaagtgctatgaagaaaacagaggccgggcgcagtggctcacacctgtaatcccagcattttgggaggccaaggtgggtggatcctttgagcctaggagttccagactagccttggcaatatagtgagacctcatctttaaaaaaaaaaaaaaaaaaaaaaaaaacagaacagactgatgggatagtacagggaaagcctctctaaggaggtgacttctctccggagacccaaacataatgggctagccaaagggtggtctggaagtagagtgcttcaagcagggaaaatagcaagagcagagccaggcaagttcaaagaacagaaatgatgtaaccctcttaaatcctaagcttctagaatagtaatgcattgcttgcattgttctggttagggatttgtatgtgatattgtttcttggtgatgtgggatatgtgcttcttaatggaaatggctgggaagtgtggagtctttctggagcctgggatatggctctttctcacttgctttccacagttctggtagctcagctggctccctgggtagatgcaggctccatcttagctgcagactctacaagaacactgagaggctgcctccgtcactactcaaagccttggagtcccagaatcccctcctatcccacctagccttcttccaatctgaaaccagggagtcagggctttgagagcacaagattcagcttccttgttttcctgtcagagcagaagtcagaaaatgaaacaggaaacagagcggaagaggagggggttgggtagcagagaaggaaaagagaaattgcaggaaagtacagctgaaaatctggataaagttctacctctacagggtgacagctgagcttttaaaaaacattctgacttgtcttgagagacccctggcctttttacaaatagatttttgagagaatttgatgtggacagagggaaccctgagaatgcatgtcttttttccccttgtgaatttacagagcaaggacagttcatttctcagttttgtctttgcagagagagtgctgcttggagcctcatggtggacttctagagattcaagtcacagccttaggccccagtcacaagtgtgtccccaggctttgccacgttactcacaggcctctggagctgagaacaagtgcgtggcactgaaaaacctgggggaagggccatgaaactccattttttcccccttctccaacacacaacgactaaatatgatttgccttttctccaccttgcacacaacagatatctgaaggcaatttaggtctcagggcctgaaatgagttacagagtcaagagatacagtcccaggcccccacagactgatgtgggctggtcttcgcctggagaggtagcaaccatctctttgttcccacccacatgagtagccgttgcagaagataaacccctccctgagccaggctgtggccagaggctaacccggcccctggcttcgtttggagggcagataactgaaaccacataaggctttggaatcctgagaaacaagaaatccaccaacggagaaggatttatcatctgtttcctttaaggagggtgcaaagttgttctaacagtttccgttacaagggtacaaactggccgctccccccaatagacggttttgttgagttcgcctctttttttttcttctttttttggccccacttcctatgagagaaactgcttgggtgagggaggtgaaaggagccctggagggtgttctctgaggttttcttcaccatcctcattagccacctgaggtggggctgaggactaaagtaggacagaaggtctctggtagatagaggaggggaaaatcagggggatcccccactttcttcacacccaggacgcagggtgccgctgccggccacagaaaccccaagaatgtttttctttggctattcagaggacatctattgtgtgtcaggccctgtgctgagctgttgttgcctgacagcaggaagagcgcggctctggtttctgtgaagaggctgcgggtcagcctccgactacaagagcctcggcccacaccgggaactcagtgaacgtcagcgggagctggggcaagagcactgactctgagacagcagcctccgctcactatttgaaggcggggtggcggggggccttgaaggagagcgaagtgcgagagaactcttcaggtgtcaccaaggtgggaaggtgctacgaggcgaggcgccgagcggcgacccccatcccgctcgcccggagtcaacatggccgccgcgcagggaggcggggctgctccaagtccgggcaggagcggggcggggacgccgtcggcggagccagcgcgcaggcgcgggccgcgtgggccccggatggaggagctgaggttcggtccccgccggggaggtcgggacgggcaggggctgaggaccccgcgccagcttgggagccctggagttctggcgggagggaagctgtcaaatggaagccggtagaaatgagacagacgcccggagaagcggggagccccgcccctccgccatagcagcctcgggcgccgcctcttcctttccagcctcccgccctcgtctgcttccggccctgtggcctggtggggctctgcaggctccctcgggagtggtccttgggccgtggcccctctggggtgagcgtggatgattagtacccagaagggactgtgtccaaaaggagccggccagaaacgggttgcggacacggctgggctgacagaaggcagcccccacgaggcctttggctctgaggaccctgggtcagagcgacttctccagcctgcgcagggggtgttagtcttacccagagggtccagagctgccgttcaacaggatgtcccagattctcagatagggcccaactaccctaagcatacctagcaagggcaggctgcggcatggaagtactgggctaggcgtttgggtgacctgggtcataatcctggctcggaaagggcgcgtaccctttggcgagggatgcgggctggtaccgtgaggtttaagaagcagaaaacatgacagcctctttaagtagccctgggtacgtcacttgaccccagtgagcctcagtttccatatccataaaatggcgatggtaattatactagcctcacagtgtctgatgagatctctggagcctatttatctcacgggaaaatttttgaagagtgaaactagttgatctgtaagtgtcctgccagttaagagtctgtgatttggcaaaggggttgttgggaagtgaggtgggcaattagctgagagggagaattgactagctttgtttttacttggtttacctgtaagcaaagtgtgggctacacacatctgtagtcgctgaggctagagcttgactcgagagaggaaaggaagaatgcaagcatggtcaagtggcagaggtgggttaggtgcttttctgatcccagcttctcttctgcatgcgcgtgggaagccaaggaagaggaaaaaagagtgaattcgccctaggatagggaaggagtagccgcgtgaggttgagtatgcccatttccgtgatttctctcgattcagcgagtcatacgttggaaacgtttagattcacaaactatcgttactgtctggggctttcagaagcttgcctttgaaccgaattttcgtgagccaaccggtgtggaattgggggcccctcccttcctccaggcctcctggcgatggagtaagcagcaggcgcccccttgtgccaaggaaagagtactgttgccattggccaacttggctccctttctggggaaattttattttcctgtggcttctgtgactttgtcgtcttgctcttgacatgagatatgatgggaagaatacttggggcactgatttcatatctagagtcagtgaactgctgatgctgtatcctgtccctaccacttccattcattcagaacacaggtttaagatgcctatttgtgttctaggccctgggatatagttgtgatgtaaagcccctgcccttagcaacttaaataagcaatagcaataacggcaatagggcagaatgtaatgagggcatagcacactgtctagtgaggatcagagaattccagaaacaagtgatacaggttttttaggtattcgccagataagagaagaaaaagagtcttccagccgtcctccttaaatttctcagttcaaattttttttttccttttaggcatagttcttcatcccaaattgatgagctgcctctgatgcttttgctttcctttcaaatttcccaggctggtgtttgaaagttcttgaggagcctttatgactccttttagctcaaggaattataaaagatgccttaaggtgcattccctgcctcggagtggctttgcgattgtttatacgttgctaccatcccaacaaagagatggcaaataacagttttctccatccctggtagtctactctgtcttcaccctcagtttgtttcagcagtgtgagctggctgaggtcctgctgagtggtggttttcttttccttccccacttaatttaacagaccagctgaacacacatcagagagctaagctagagtgtggagtcattatggtcttctagtatggttttatgccccactttggggactctggtttgggacctagtttattattctgggcaagaggaaaagggcacacgccaaataatagcaaccacaacacagatttgagtagaacttcacactttggtctgtttcaccatcatgacaattttgtgagataggaaaaaaaaaaagtctgctcccattttttatataaagaactgaggctcagagggactaatgagaacttgtaagtgacagagtcaggagttgaacccagatctttagttcctgcagaagtgcatccaataggctttaaaagatttctgtgaccttagctttccagctacttgcttagctgtatggaactttaccaacgacagttcagggcttcacagtgacacctactgaacccatttgctgtcaagatgctttcccctcatctgggaagttaggtggttggttaagtttgtcatagtaattctgagaggggaggttccagtgacgaatgctttcaagaatttgctttcactcgatgtgtgacattttcctcctttggggtttagaggcctgagggagctcaatcctggtagcaacacccctgaattcctggtggtgaaaggatgtggccccaggacccatcccggaaggaggtgctgaggtttgcagtcagctgccgtatcctgactctgatgctgcaggtcagtctcccatcctttgtcctgaatgtgctattgctacatgactggactaggcagtaagaagtgtccccatctcctttccacctctcaggtgtgcccctccatgtggttggaaccacagagacatagactttagagctgaaaagttgtcaggaatcttagaaacacggtctgttgatcttgttttacccatgaagcagcagaggcccagaaaggttaagtgacatccccaaagccacatagcaagatagagaagggctggagtttgaccccatgtttcctaactcctgagctagtggtctctccaacagactgtgatgttccgtaaccagagatgcttatagggtgggacagctcaaagtattgccctgtgtccccttactaggagactgagcattgtgtcagttgagtgggagaaacgtggcaatgtgcaagtcctaaaaccatctggatatgtaatagttcctcctattcccccgagtgcctgcccttcctgcctcacccacacacaactctcagtgcacttgcccgtttgcagctcccttttccctccgaggctccccttgatacacattttaataaaatatcacgtatatatgaattatttgctgcctagcacagtgcttggtgcctagctcagtatgttcataaatgaatgaatgttgttgaatgtatgtcaacaccctagggatgttagattcacataatgatgtgtaccttttatccctgtaccattctctctgaggctcataactggtccctttgtggaaactttcctctctcctttcccactacataaggcatggcagactctgctgggtttcgagattagttaaacgtgtccacctgcaggctagggctgtttatctgtgactgtcactcctatcctgtttgtttttactgtttgaagtggcctgataaggaaactgaccaaaaagttaaaaagccttaaaaatggtgctatgctcctgttgccaggctagggagacttactcagtgatgtctctcaaccagcatcagctgggttactggcagaaccaaaggagcaatgctgcaagtcagcatccaggatagggaaccaggacagctgggctctaattcgggtggtaattttggaaacagtatatttcctctaggcagttcattcaaccaccaaaaatttttaaagtacctattgcgttccaagaactgtgctaggtggtaagtgtaaaaagacatggtctcttttctcttaagtagctgatgatctaatagggcaaaaagactttttttttttgagacagagtctcgccctgtccccccaggctggagtgcaaaggcgcgatcttggctcactgtaacctctgcctcccaggtttaaatgattctccctcctcaggctctgaagtagctgaggcgcccgccaccacacccagctaatttttgtattttttttttttttttttgagacggagtctcgctctgtcgcccaggccggactgcggactgcagtggcgcaatctcggctcactgcaagctccgcttcccgggttcacgccattctcctgcctcagcctcccgagtagctgggactacaggcgcccgccaccgcgcccggctaattttttgtatttttagtagagaccgggtttcaccttgctggccaggctggtctcgaactcctgacctcgtgatctgcctgcctcggcctcccaaagtgctgggattacaggcgtgagccaccgcgcccggccagcaaaaagaaatctaacagtaaatgcgatttaattatcatccccccacttccaatgctcaagccatcagagtatatccctaagttacccttcgttgctgctgtcgtctctgtcagtgacagctaatccttgacggttttggctcctggttcactgtcactcttcccagcactacttctattgatttcctggtgatttcattattaatgaagatgatgtgtgcagtgtcctgaaaagagtctatcacttgagtgtgagttctggggaaagggtgttagagatttgaggaaagagaaaaacatgtaacatgtaacaaattgttttcctaaatgacaactcagaacaatagaaggcattagaagagaccttccatatgcgcccatcacattcttcagcctacctatgtctgcacctttgtgctttcagtactgaaggttggatgaaccgtctgtcctcttctctaaggctggctcctctacctttgtaccctttttgcctacccagcaattctcccctctctcctgcatacccttttactgggttatttccactagcatacaaacctttacctcccaccttaaaaaaagttttcactttaccccacattgttgttcacctactgccccatttttctgcttccccttatggcaaaactcctcaaagtttcttttctcccattctctgttgaacccagtctaggtagacttctctctcttccactccattgaaatagcccttgtcaaagtcaccagttactttcacattgttaaatccagtggtcagttttcagcccccatcttacttgacctaccagcagcatttaacagagttgatcactccttttcttcccttggttctaatgctctcttgggttccctgccacctcactgactgttcctttttttctttattgctggattttcatcctctttctagccttcagatgttaacatgtccagggttcagtcctcaagaagagttctaagtgtttttgaaacagggtctcatgctgtcacccaggctggaatacagtggcacaatcatgtctcactgcagcctcaacctcctgggctcaagcaatcctcccatctcagcccccccaagtagctgggactacaggcatgtgccaccacacccagctaatttttatttttttatttctagtagagacaaggtcttgctacgttgcccaggctggtcttaaactcctcggctcaagtgatccttccacctcagcctcccaaagtgccgggataacaggcgtgagccactgtgctcagacttttttttttagtttttatagagacaaggtcttgctatgttgcccaggctggtcatggactcctgggttcaagtaatcctcccatctcagcctgccaaagtggggattacaggcatgagcctggccttcttcctcattttattaaatggcaattcttttcttccagttactcaaccaaaattctggtttttctttactccacaggccctcttcaatgccatcatcccagatcaccatgcagaagccttctctcctcctcgcctggccccctcaggctttgtggaccaactcgtggaaggtcttctgggcggcctgtctcactgggatgctgaacacttcttgttcattgctgagcatggctacctgtatgagcacaactttgccttctttcctggtttccccttggccctgctggtggggactgaactgttgagacccttacgggggttactgagtctacgcagttgcctgctgatttcggtagcatcactcaatttcttgttcttcatgttggctgcagttgcacttcatgacctgggttgtctggttttgcactgtccccaccagtccttttatgcagctctgcttttctgtctcagccctgccaatgtcttcctggcagctggttactcagaagctttgtttgccctcctgacattcagtgccatggggcagctggagaggggccgagtctggactagtgtactcctctttgcctttgccactggggtacgctccaacgggctggtcagtgttggcttcctcatgcattctcaatgccaaggctttttctcttctctaacgatgctgaatcctctgagacagctctttaagctgatggcctctctgtttctgtcggtgttcacacttggccttccctttgccctctttcagtattatgcctacacccaattctgtctgccaggctcagcccgccccattcctgagcctttggtacagttagctgtagacaagggctaccggattgcagagggaaatgaaccgccttggtgcttctgggatgttccactaatatacagctatatccaggatgtctactggaatgttggctttttgaaatactatgagctcaagcaggtgcccaattttctactggctgcaccagtggctatactggttgcctgggcaacttggacatacgtgaccactcacccttggctctgccttacacttgggctgcaaaggagcaagaacaataagaccctagagaagcccgatcttggattcctcagtcctcaggtgtttgtgtacgtggtccacgctgcagtgctgctgctgtttggaggtctgtgcatgcatgttcaggtgaggtggattcctgactgggataaggatgtgaatacaggcaaaaccccttggccaaggacagggaaggcagctaacatctcccgtttgagtgatccatactgaatttattcattcaatgactatttagggttattctttatgccagactctgggtcagacctctaaggatgaaacataaataagacaaaattgcggccaggcgcggtggctcacacccataatcccagcaatttgggaggctgaggtgggtggatcacaaggtcaggggttcaagaccagcgtggccaagatgttgaaaccttgtctctactgaaaatacaaaaattagccgggcgtggtggcaggcacctgtaatcccagctactcagaaggctgaggcagaaaattgcttgaacccgggaggtggaggttgcagtgagctgacattgcaccactgcactccagcctgggcgacagagtgagactctatctcaaaaaaaaaaaaaaaaaaaaaaaaaattactgccttggggggtctcatggtataaataggaggacagacatttgacataaattatagtacagtgggatagaaaagggagtgctattttgagatttattttattttactttatttatttatttatttatttatttttttagatggagtctcgctctgttgcccaggctggagtgcagtggtgcgatctcagctcactgcaacctgtgtctcctgggttcaagcgactcttctgcctcaatctcccgagtagctggaattccaggcgcctgccaccaccgcctagctaatttttgtatttttagtagagatggggtttcaccacgttggccaggctggtctcgaaatcctgacctcaagtgatctgcccgcctcatcctcctaaagtgctgggattacaggcgtgagctaccacgctcggcctgagattttttttttttttttttttttgagacggagtcttgctctgtcacccaggctggaatgcagtggcatgatctcagctcactgcaagctccacctcccaggttcacgccattctcctgcctcagcctcccgagtagctgggactacaggcacctgccaccatgcctggctaattttttgtatttttagtagagacgggatttcaccgtgtgagccaggatggtctggatctcctgacctcgtgatccacccgccttggcctcccaaagtgttgggattataggcacgagccactgcgcccagcaagatttttttttttaaagctcagataaagtattatggaggcgaagaagtaggtaactcactggagtacttgagaaaggcatcatatttcagctgggtcctgaagaatgagattttccatataagaagcagaggaggaacattctaggtaaaaggaagggcatatgcaaaaacacgagggttgtgaaaggacctgattggactgagatacaggaataagcacggaggatatctctgggatctttttccctaatacacagttatagttatatccatattggtttcttgactgttgacttcaggaggttctcaactcaggcaggcccccaatttccagaggagataaccttaaccaatgttttgggtggtggcggtggtgatagagagggatgggaaaggtttgatcttatatctgattttctgttcttggctgtggccccaccctggggacatcttttttccccatgccgacctcttagcagtttcttcctgttggagttgcacattggctgtttctaaaattctccaagctgtatggataagagacacagaggaaatagaaagtagcattccgtgtttttagctagattaaatcgtagaatgtgtgccagcaaagcttaaagtttccaggttagctgagggaggccatttggaaacttgtgtctgaactccaataggagagagaatgttcaagcaatgggtcttctgcccatttccctctgctttgccatcccatgggataagggaaccacctcaggttcccaatccccaaatcaatatcacagagtttagagtccaggccctcggctaaaattagaccccatagagtttctagtattaattggcccattattttaatagtaattaatgtaattagtctgtagctatgtttatttgtaatatggaggatgcctgtctgctgtacatacatctttctaagacagatcctaagctgtgttcaatttcttttccagtgtaatacatttctagtcacaggaccatagttcacccagcagtagagaagtccccgggctggtccaatttgagtcagtgacattccagtaaatgtctggatattcccctctcatgatttctaggttctcaccaggtttttgggctcctccactcctattatgtactggtttccagctcacttgcttcaggatcaagagccgctgttgagatccttaaagactgtgccttggaagcctcttgcagaggactccccaccaggacaaaaggtccccagaaatcctatcatgggacttttgtatcactggaaaacctgttctccagtcacacgatacattctaggctacttcctgacttactggctcctgggactactcctacattgcaacttcctgccttggacatgacctggactctccagggacaggttggaagccaacttaacccaggggtctgaaagtaaaaatacacattggaactgcctctgctgccctgggatcattactgtgtccattataatctttctctttctctttgaaagctggtcaggaatgggagaagtgtcagacactagagagccccttctggtcctggctagggcaaattttagacaactattttctctgtaagtgaagattgtcgtattccaagtctaaaatacacctggatctgtctagtcaatcaacatagcagagacagtcttaaacctaccattgacctgtgtgtaaatttaaatgtcaatttattgaagtgtaaatttcatcaaaggcattagctgacaggctggtaacagtccacacaagatggtataggcctgaacagtgtagtggcagtaataaagtgggaccattttttccaaatgcgacattgtttctgatgtttttttttatgatttgtgcatgtatttttatatgaaaaaaacttacaaagatatgcaaattaaacttctttcagttatacatgcaatgaattgcctttttaaaaataatacaggccaggcacgacgtttcacactgtaatcccagcactttgtgatgccgaggtgggcagatcacttgaggccaggagtttgagaccggcctggccaacatggcaaaaccccgtctctactaaaaatacaaaaattagccgtgcatgatggtacacacctgtaatcctactcgggaggctgaggcatgagaattgcttgaacttggaaggcggaggtttcagtgagctgagtttgcgccactgcgctccagcctgggcaacagagtgaggctctgtctcaaaaaaagtaaaaaataaaaataatacaaatctttccatgtggcaaaaagtaaaataattttaaaaagttaaaataatataaatcagctgggggaaaaaagggtaagaagaaggcatcaggaaccctggattctagtcctctcagtaaaaccccatttaccagccatgtgacttgggagagttttcagaaccttagttaccacctctgaaaccatgggaaatgatgatattcttcagggggtggtggtgaatgatgcagtctcttgtaggtccctttctgctctaacatcttaagaactgccttaaacaacagaatcaccccagtctaaatgctaatgtagaggcttaaatgtgtgattttaggagaaaatatccagttctcctgttttcagcaattagaagaaactcctcctccaccgagtgcaactcttgggagtaatttaggtggtctttcctttcaatgagggaaagcagtaacatctggcagataaggtgcctgttgtgccgttctcagatgcctgcttacttgatcagtagacatgggtcagaggcgccaacacggcggcaggaattggtaaattgtacgtaagtccaaggtggaatgaaatggtatctgccctgcttcctggcccccgtttggtcatgagcctatcactataatggtagtaagatcactggcccctgctgagctacttttgcccattccttgagccagacgagagtttggctctgtatcatccatcacctcttttatttcccatttaagccaaaacatccagtaagcagaaactcttcaaaacagatgggtaatcataagcagcttctggaaagcctcaagaattggaattttgacacactccctctgaccatgacagaaagctcaacttgccagctgaagggaagctcctggctgagccccagcaccctctgttggagcttctggtcagcctggccaataagcatttcccatccatcgccccagcactaggacagctgagagaatttggttcagagtcaaatgcttctgaaaatgtacacacagatcagggcagccctctgccttctgccaagacaccaagtgcccttcttggcaaacgatgatcacccctgccctagtgtccctccagttagttggcagaaactgttccctttctccttgccaacagctgcaaatccagagacttccaccttgcgtgcaggaagtgttggggtcctgtttcagctctttattgccgaggtaggagcactgggttcttcgctctcctctttgcctccttttgggggataatcaggactgattattcctctactggaagaggtgactcagaccccacagagtaggtgtgatgtcactgctctggcagtctcagtttaaccttcacactagatctcatcatgcccagaaaccttgtaacaggagcccagctaggtgggtgcacctggcatgagctggacaaggttttctctctgaccttgcagggatttagttgttctctaaggagctaaggaatgggctgattttatgaccagcagctgtccttttaccatcctattaacagtctctttaatagtctgggagagggacatgaaggacccaaggcaggaagtttcctgtttaccctgaggcctaacaatgccacagctaggtggggtgtctacagtttcagagaaaagtcatttccttctgagaccctgctaaaacagaaaccagacgcctcagcctcacgtacctagaagtagatgcttttttttgttctttaatgaaggtgggaggagagtgtttgacatacctttaccagtcctcctggaaaaatgttacttttattgaatagaccctctcactgtcatctgaaaatgtaatatgtgcaggctcaagggatttgaaactgattgattctttcagtaattgtttattaatgcctattttaggggaataaagatgactcagctatgcctcctgtcctcaaataactgtctaataagagttgctagcagacacagaaacattaaggcagaaagcaataaattctggggagtgaaaggacactgaagcttcttgctctgtatctcactacttgaacttttttttttttttttttttttttgagacggagtcttgctctgtcacccaggctggagtgcagtggcgcgatctcggctcactgcaacctccgcctcccaggttcaagcaattatcctgcctcagcctccctagtagctgggattacaggtgcccgccaccacgcccagctaatttttgtattttttagtagagacggggtttcaccatgttggccaggctggtctcgaactcctgacctcgtgatccaccctccttgggctcccaaagtgctgggattacaggcatgagccaccgtgcccagccctacttgaactttttatgattagaatgaattcaagttttatttgtgtgcttagaaaaaggtaagtgaggcagagagcatgtactctgtaagtttacacgagatggagatcccttccagcttgggatacctgaaaagacttcatggaccaatgatagttgagctagactttgaatgatagggaggatttgaaagttcagggtacagaatgaatatagaaggcaggaaatggaacaggataggacagggagaaaccagtgtgaatggagctgaggtcttaatctaggccttgaaatcagccccaagcccagctctactgtgtactaactgtgtaaacttgagccagatactgactctctaagcctcagtttactcatctgtaaaatgtagataataatatctagctcatagataaaagaataataacatctcatagggtggtggtgggaattaaatgttaccatatgaaaagtgttgagaacagtgctaacaaagcaatagctgcattttggacatgttgggtttacgataccaagcagcacatttatgtgccaggaaatgtggaactggagaccaagagagtggtcagggaaccatgcacacagacacggtaattacagcagccatgctgttggatgggattgtcaaaaaaagagtgtggagagagaagagagaggggctgtaagagtttgggtaggttggctgggcgcggtggctcacgcctgtaatcccagcactttgagaggcagaggcaggcggatcacgaggtcaggagatcgagaccatcctggctaacacagtgaaacccagtctctactaaaaatacaaaaaattagccaggtgtggtggcgggcacctgtagtcccagctactcgggaggctgaggcaggagaatgacgtgaacccaggaggcggagcttgcagtgagccgagattgtgccactgcactccagcctgggcgacagagtgagactctgtctcaaaaaaaaaacaaaaaacaaaaaagagtttgggtaggtggctcaacctctctaagcctgttttctcatctacagtgggggtgatagcatctaccacatgggcagtcatgaagataaagcacttagcacagtgcctgtatggcaagaacttcatgaatggtagctattgtattatcattattatcattaaaggaccagaaacaaattgtatcattggcggaaaagagagtttcaaggccaggcacagtggctcatgtctgtaatcctagcactttgggaggctgaggtaggtggatcgcttgagcccaggagtttgagactagcctaggcaacatggtgaaaccccatctctacaaaaaatacaaaaattagccaggtatcctggtgggcgtctgtagtctcagctactcgggagactgaggtgggagggtcacctgatcccaggaggtcaaggctgcagtgagcagtgatcacaccactgcactccaatgtgggtgacagtgagaccctgtctcaagaaaaaagtttcaagaagaaagaaatggttagcagggtcatatactgttaaggaaaggatgagaaaaactattgaatttagggattagggatattatccaaggtaggctaacggcgataccaaacaaccgccaaaactcagtggcttaataataaaagttcctttcttttttacttcatagtctagtgcaggtttaggaagggaggtctgttccgcccaattattggggacccagtcttgtccattttgtgactgtcctgctctagctccttagagtcctctactcccggaaaagtgtttttttttttttttttaatttaattttttttttattgatcattcttgggtgtttctcacagagggggatttggcagggtcataggacactagtggagggaaggtcagcagacaaacaagtgaacaaaggtctctggttttcctaggcagagtgtttgtgtccctgggtacttgagattagggagtggtgatgactcttaacgagcatgctgccttcaagcatctgtttaacaaagcacatcttgcaccgcccttaatccatttaaccctgagtggacacagcacatgtttcagagagcacagggttgggggtaaggtcatagatcaacaggatcccaaggcagaagaatttttcttagtacagaacaaaatgaaaagtctcccatgactacttctttctacacagacacggcaaccatccgatttctcaatcttttccccaccttgcccccttttctattccagaaaaccgccatcgtcatcatggcccattctcaatgagctgttgggtacacctcccagacggggtggtggccgggcagaggggctcctcacttcccagtaggggcggccgggcagaggcgcccctcagctcccggactgggtggctggccaggcggggggctgacccccccacctccctcccagacggggcggctggccgggagggggcgctgacccccccctccacctccctcccggacggagcggctggcccggcggggggctgagccccccacctccctcctggatggggcagctggccaggcagaggggctcctcacttcccagtaggggcggccaggcagaggcgcccctcacctcccggacggggcggctggccgggcggggggctgagccccccacctccctcccggacggggcggctggccgggcggggggctgacccccccacctccctcccggacggggcggctggccgggcggggggctgacccccccacctccctcccggacggggcggctggctgggcagaggggctcctggctgggcagaggggctcctcacttcccagtaggggcggccgggcagaggcgcccctcacctcccggacggggcggctggccgggcggggggctgagccccccacctccctcccggacggggcggctggccgggcggggggctgacccccacctccctccccgccggggtggctgccgggcggagacggtcctcacttcccagacggggtggcaaccaggcggaggggctcctcacttctcagacggggcggttgccaggcggagggtctcctcacttctcagatggggggcgccgggcagagacgctcctcacctcccagacggggcggcggggcagaggcgctccccacatctcagacgatgggctgccgggcagagacgctcctcacttcctagatgggatggcggccgggacgaggcgctcctcacttcccaggtgggatggcggccgggcagagaagctcctcactttccagactgggcagccaggcagaggggctcctcacgtcccagacgatgggcagccaggcagagacgctcctcacttcccagacggggtggcggccgggcagaggctgcaatctccgcactttgggaggccaaggcaggcggctgggaggtggaggccgtagcgagccgagatcacgccactgcactccagcctgggcaccattgagcactgagtgaatgagactccgtctgcaatcccggcacctcgggaggccgaggctggcggatcactcgcggctaggagctggagaccagtccggccaacacagcgaaaccccgtccccaccaaaaaaacacgaaaaccagtcaggcgtggcggcgcgcgcctgcaatcgcaggccctcggcaggctgaggcaggagaatcaggcagggaggctgcagcgagccgagatggcagcagtacagtccagctttggcccggcatgagagggagaccgtcgaaaggagagggagagggagacgggagagggagagggagacgggagagggagagggagacgggagagggagagggagagggagacgggaggtgttttttttttttttttgagacggagtctcgctctgtcacccaggctggagtgcggtggcgcgatctctgctcactgcaagctctacctcctgagttcacgccattctcctgcctcagctccagagtagctgggactacaggcgcctgccaccacgcccggctaattttttgtatttttagtagagacggggtttcactgtattagccagggtggtctcgaactcctgacctcgtgatccacccggcttggcctcccaaagtgctgggattacaggcgtgtgagccatcgtgcccggctactcccggaaaagttttaaggagccagcctggaagagtcagcacatcattccattctgctagctagaacttagtcacatggccatgtctaaccgcaaaggagtggggaagtaggttcctagataaaatacagcatgcccagttacatttgaatttcaggtaaacaagttatttttcagtataattacattccaaatattgcttgggacgtacttctaagaatttcttccttgcttaattgaaattcaaatgtaaccagcatcctgtatttttatttgctatatctggtagccctactgggaagtgaagtctggctgtgagttcaagaagagaacacagataattgtatgttacagtctgcctttctgagccaaatacctgtttctcttcacagaatacacttacccttgcccaggggaaatagccccaaatcccatctagtcactgtattcagctcagagtctctcagtcagcttcagtgtggttccttatggtgatttgtgaactgaaaaagcaaggtatctgcacttcacaaacatacccagtatacattggtagagcaagaaaaggatagcctcaatacaaactcccagtcagaaaaggaaagcatggaagaagtgccacagtcactggtccaaaacagttttgaattcccactgctcaggtaggtcaaagtccccgtccctggactgcagggagttcctggattagaacttgatttttttttttttttttttttttttttttttttttttttagagacagggtccactctgttgcccaggctggaaggcagcccaggctggaaggcagtggtgtgaccatagctcactgtaatctcaaacttctgagctcaagggattctcccatctcagcccctcccaagtagctgggactacaggcatgttccaccacgcctggctaatttttgccatattttatagagataaggtctcgctatgttgcccaggctggtcttgaactcctggcctcaagtaatccttttgccttggtctctcaaagtgctgggattatgtgcatgagccaccacacccagcctagaccttgtttttgttatgggatggacttttttgttgttgttgttgttttgttttgttttgtttttgagactcgctttgttgcccaggctggagtgcagtggcgcgatcttggctcaccacaacctccacctcctgggttcaagtgattctcctgcctcagcctcccgagtagctgggactactggcatgcgccaccatgcccagctaatttttatattcttaatagaggcggggtttcactatgttggccaggctggtctcgaactcctgacctcgtgatccccctgccttggcctcacaaagtgctgggattacaggcgtgagctactgtacccggcctgggatggactcttttgtccattgtactccatggctcctggatgtgactttctaggaagttcttccttgcctttttaaaattttattttgaagagacagggtctcactctgttgtccaggctggagtgcagtggcaggatcatagctcactgcagcctgaaagtcctagactcacgcaatctgcctaccttatcctcccaagtagccccaactactacaggcacacaactactacaggcctgacttcttccttgttgattattcttcatggccacatctgagattggctttggggattatgaccttctcctttgcgaattatgaccattctccttggagaatgctcaggtgtcaccaagccacttcctactggtgaaaacaagggagcctaaagttattttaagtctcaactagtcagactgtgtatgtatgtgcactaaaatgtatctaacaaaattaccatcttaactttttaagtgttagttctgtagcattaagtacattcacattgttgtgcaactaacaccactacctatctccataactttttttttttttgagacggagtcctgctctgtcgcccaggctgcagtggagtaacacgatcttggctcactgcaacctccgcttcctgggttcaagcgattctcctgcctctgcttcccgagtagctgggactacaggtgcccaccaccacactcagctaattttttgtatttttagtagagacagggttttgccacgctggccaggctggtcttgaactcctgacctcaagtgatccacccaccttggcctcacaaagtgctgggattacagacatcagccaccatgcccagcccagaacttttttatcttcccaaactgaaactgtacccattaaacaataacttcacattccccctgctctccaacccctggcaactgccattctattttctgtctctataaacttgactactcttggtacctcatataagtggcatcataaaatatttgtccttttgtgtctggcttatttcaattagcataaggtcttcagggttcatccatattgtagcttgcatcagaatttctttctttttttttttttttttttttgagacggagtctcgctctgtcgcccagactggagtgcactggcgcgatctcggctcactgcaagctccacctcccgggttcatgtcattctcctgcctcaccctcctgagtagctgggactacaggtgcctgccaccacgcctggctaattttttttttttttttgtatttttagtagagatggggtttcactgtgttagccaggatggtctcgatctcctgacctcgtgatccgcccacctcagcctgccaaagtgctgggattataggtgtgagccaccgagcccggccaccagaatttctttttaaggctgcatatattccattgtagtacatcttgtttatccattcatctgtcaatggtcatttggatagcttctgccttgtggctataatgaatagtgctgttatgaatattttatataacagatataaaaatatctgttcaaatctctgctttcagttcttttgtgtatacagccagaagtagaattgctggattatatggtagttccatgtttgcttttttgaagaatggccatactgtttttctacagcagttgcgcattttacattcccaccagcaatgcaaaagggtcccaatttctgtatatcctcaccaacatttgttattttctgttttttaattctagccaccttgg

SEQ ID NO: 733 - DNA, 2194 bp, Homo sapiens
ttacctgtaagcaaagtgtgggctacacacatctgtagtcgctgaggctagagcttgactcgagagaggaaaggaagaatgcaagcatggtcaagtggcagagaggcctgagggagctcaatcctggtagcaacacccctgaattcctggtggtgaaaggatgtggccccaggacccatcccggaaggaggtgctgaggtttgcagtcagctgccgtatcctgactctgatgctgcaggccctcttcaatgccatcatcccagatcaccatgcagaagccttctctcctcctcgcctggccccctcaggctttgtggaccaactcgtggaaggtcttctgggcggcctgtctcactgggatgctgaacacttcttgttcattgctgagcatggctacctgtatgagcacaactttgccttctttcctggtttccccttggccctgctggtggggactgaactgttgagacccttacgggggttactgagtctacgcagttgcctgctgatttcggtagcatcactcaatttcttgttcttcatgttggctgcagttgcacttcatgacctgggttgtctggttttgcactgtccccaccagtccttttatgcagctctgcttttctgtctcagccctgccaatgtcttcctggcagctggttactcagaagctttgtttgccctcctgacattcagtgccatggggcagctggagaggggccgagtctggactagtgtactcctctttgcctttgccactggggtacgctccaacgggctggtcagtgttggcttcctcatgcattctcaatgccaaggctttttctcttctctaacgatgctgaatcctctgagacagctctttaagctgatggcctctctgtttctgtcggtgttcacacttggccttccctttgccctctttcagtattatgcctacacccaattctgtctgccaggctcagcccgccccattcctgagcctttggtacagttagctgtagacaagggctaccggattgcagagggaaatgaaccgccttggtgcttctgggatgttccactaatatacagctatatccaggatgtctactggaatgttggctttttgaaatactatgagctcaagcaggtgcccaattttctactggctgcaccagtggctatactggttgcctgggcaacttggacatacgtgaccactcacccttggctctgccttacacttgggctgcaaaggagcaagaacaataagaccctagagaagcccgatcttggattcctcagtcctcaggtgtttgtgtacgtggtccacgctgcagtgctgctgctgtttggaggtctgtgcatgcatgttcaggttctcaccaggtttttgggctcctccactcctattatgtactggtttccagctcacttgcttcaggatcaagagccgctgttgagatccttaaagactgtgccttggaagcctcttgcagaggactccccaccaggacaaaaggtccccagaaatcctatcatgggacttttgtatcactggaaaacctgttctccagtcacacgatacattctaggctacttcctgacttactggctcctgggactactcctacattgcaacttcctgccttggacatgacctggactctccagggacaggttggaagccaacttaacccaggggtctgaaagtaaaaatacacattggaactgcctctgctgccctgggatcattactgtgtccattataatctttctctttctctttgaaagctggtcaggaatgggagaagtgtcagacactagagagccccttctggtcctggctagggcaaattttagacaactattttctctgtaagtgaagattgtcgtattccaagtctaaaatacacctggatctgtctagtcaatcaacatagcagagacagtcttaaacctaccattgacctgtgtgtaaatttaaatgtcaatttattgaagtgtaaatttcatcaaaggcattagctgacaggctggtaacagtccacacaagatggtataggcctgaacagtgtagtggcagtaataaagtgggaccattttttccaaatgcgacattgtttctgatgtttttttttatgatttgtgcatgtatttttatatgaaaaaaacttacaaagatatgcaaattaaacttctttcagttata

SEQ ID NO: 734 - protein, 491 aa, Homo sapiens
MWPQDPSRKEVLRFAVSCRILTLMLQALFNAIIPDHHAEAFSPPRLAPSGFVDQLVEGLLGGLSHWDAEHFLFIAEHGYLYEHNFAFFPGFPLALLVGTELLRPLRGLLSLRSCLLISVASLNFLFFMLAAVHDLGCLVLHCPHQSFYAALLFCLSPANVFLAAGYSEALFALLTFSAMGQLERGRVWTSVLLFAFATGVRSNGLVSVGFLMHSQCQGFFSSLTMLNPLRQLFKLMASLFLSVFTLGLPFALFQYYAYTQFCLPGSARPIPEPLVQLAVDKGYRIAEGNEPPWCFWDVPLIYSYIQDVYWNVGFLKYYELKQVPNFLLAAPVAILVAWATWTYVTTHPWLCLTLGLQRSKNNKTLEKPDLGFLSPQVFVYVVHAAVLLLFGGLCMHVQVLTRFLGSSTPIMYWFPAHLLQDQEPLLRSLKTVPWKPLAEDSPPGQKVPRNPIMGLLYHWKTCSPVTRYILGYFLTYWLLGLLLHCNFLPWT

SEQ ID NO: 735 - DNA, 2365 bp, Homo sapiens
gtccccgccggggaggtcgggacgggcaggggctgaggaccccgcgccagcttgggagccctggagttctggcgggagggaagctgtcaaatggaagccggtagaaatgagacagacgcccggagaagcggggagccccgcccctccgccatagcagcctcgggcgccgcctcttcctttccagcctcccgccctcgtctgcttccggccctgtggcctggtggggctctgcaggctccctcgggagtggtccttgggccgtggcccctctgggaggcctgagggagctcaatcctggtagcaacacccctgaattcctggtggtgaaaggatgtggccccaggacccatcccggaaggaggtgctgaggtttgcagtcagctgccgtatcctgactctgatgctgcaggccctcttcaatgccatcatcccagatcaccatgcagaagccttctctcctcctcgcctggccccctcaggctttgtggaccaactcgtggaaggtcttctgggcggcctgtctcactgggatgctgaacacttcttgttcattgctgagcatggctacctgtatgagcacaactttgccttctttcctggtttccccttggccctgctggtggggactgaactgttgagacccttacgggggttactgagtctacgcagttgcctgctgatttcggtagcatcactcaatttcttgttcttcatgttggctgcagttgcacttcatgacctgggttgtctggttttgcactgtccccaccagtccttttatgcagctctgcttttctgtctcagccctgccaatgtcttcctggcagctggttactcagaagctttgtttgccctcctgacattcagtgccatggggcagctggagaggggccgagtctggactagtgtactcctctttgcctttgccactggggtacgctccaacgggctggtcagtgttggcttcctcatgcattctcaatgccaaggctttttctcttctctaacgatgctgaatcctctgagacagctctttaagctgatggcctctctgtttctgtcggtgttcacacttggccttccctttgccctctttcagtattatgcctacacccaattctgtctgccaggctcagcccgccccattcctgagcctttggtacagttagctgtagacaagggctaccggattgcagagggaaatgaaccgccttggtgcttctgggatgttccactaatatacagctatatccaggatgtctactggaatgttggctttttgaaatactatgagctcaagcaggtgcccaattttctactggctgcaccagtggctatactggttgcctgggcaacttggacatacgtgaccactcacccttggctctgccttacacttgggctgcaaaggagcaagaacaataagaccctagagaagcccgatcttggattcctcagtcctcaggtgtttgtgtacgtggtccacgctgcagtgctgctgctgtttggaggtctgtgcatgcatgttcaggttctcaccaggtttttgggctcctccactcctattatgtactggtttccagctcacttgcttcaggatcaagagccgctgttgagatccttaaagactgtgccttggaagcctcttgcagaggactccccaccaggacaaaaggtccccagaaatcctatcatgggacttttgtatcactggaaaacctgttctccagtcacacgatacattctaggctacttcctgacttactggctcctgggactactcctacattgcaacttcctgccttggacatgacctggactctccagggacaggttggaagccaacttaacccaggggtctgaaagtaaaaatacacattggaactgcctctgctgccctgggatcattactgtgtccattataatctttctctttctctttgaaagctggtcaggaatgggagaagtgtcagacactagagagccccttctggtcctggctagggcaaattttagacaactattttctctgtaagtgaagattgtcgtattccaagtctaaaatacacctggatctgtctagtcaatcaacatagcagagacagtcttaaacctaccattgacctgtgtgtaaatttaaatgtcaatttattgaagtgtaaatttcatcaaaggcattagctgacaggctggtaacagtccacacaagatggtataggcctgaacagtgtagtggcagtaataaagtgggaccattttttccaaatgcgacattgtttctgatgtttttttttatgatttgtgcatgtatttttatatgaaaaaaacttacaaagatatgcaaattaaacttctttcagttata

SEQ ID NO: 736 - protein, 491 aa, Homo sapiens; identical to SEQ ID NO: 734

SEQ ID NO: 737 - DNA, 16684 bp, Mus musculus
ggacttcactgtacttgcctcggagcgctcggtccttcgcgtttcttcctcctcgactctgcttcgtctgcctccgccatggcccagtgagtgaccgacacgcgcagtcgggcccgggagacttccggggctgagcgtggtgatggcggggctctgctcagttgtctccctgttctcctcagccccggtggtcgcctgggtctcctcgcgcagccctgacccctgcacctcagggtccccgccatggccagcgcaagctccgccaccccttcgtgggagcttgcggctgcgacgggctcgcggggaaggaaggccgcgctgggtcggggacggcccacgccccttgtgctggccaggccataaggaacgacgggcagggccaggggcagggcatgggtggcttcgtgtgcccggacgccctttagaaggaacttccatggaactgtggggtgcagggtgcggtcgatcctaggtgcatggtgtgagccgagaagggtgcaggctgccagtcctaataaaagccactaagtaacactaatatcctttctttgtgtttgctttattgtttttttttttttttttttgtcatttcagagctgacattgcactgatcggactggctgtcatgggccagaacttaattttgaacatgaatgatcatggatttgtggtaagtagtgaggacacgttgccttcccgctgagagctgtgatttgtttttcagagatcccaaggcatcactcagtaagcactgtttggtgtctttgtagaagaatttctgctttagtcgtgctccctctgtagttaagggaagagcctccttggatagaaataaatataaaagcagtggttctcaacattatgatttataacactagcaaattacagttattgcgtagttatgaaaatagttttatgattgggggtcatcacaacacgaggggctatattaaagggtcgcagcgttaggaaggttgaaaaccatagatgtaaagggacccagatcttggaagctgtagctaggaaaacttggggtacatggagattgtttttctttgtagacagcagcttgtctcacagtgttgtcacactggagtctcagggccctctcatctcagctttctgagtccagggtcagaggatcctcctgcctgtgggctctgaatgttctttctaaatagtagcatggcttagacaccaggattaccagggacaaaggacccaggtagtagtgacaggctcaacctgataagcaacaagtggcaaccgcctttccctgggctctctgctgtgactggactttgcagagattgcctagcacttaaaaagaaaaggcaggtcagctctcgctagaccttggacagagtagacgtttctctgttgctgcatctaccacccgagggtcatgtgtgtgccagatcctctgacaggccttttgtccttccaggtctgtgctttcaataggacagtctccaaagtcgatgacttcttggccaacgaggcgaagggcaccaaggtggttggtgcacagtccttaaaggacatggtctccaaactaaagaagccccgccgggtcatcctgcttgtgaaggccgggcaagccgtggatgatttcatcgagaaattagtaaggccagctcggttctcggatgccgcccgcaaatccctctaactgtctcacttctgagatggtggtcttcagtgtctgagtacagactgatgggttctgataaagtgcttgagtgtttcaggcttggttgccttgacaggcacttatggaatagtatttttgttttgtttgttcttagtttttcaagacagggtttctctgtatagcctaggccttcctggaactcactttgtagaccaggcggctcagactcatagagatccccctgcctctgcttcctgagtgctgggattgaaggtgcgtgccatcaccgccaagttgtgttctctgtagagaggggttttttgttgtttttttgtttgtttgtttgttttttcattttattttatataaatgaatgtttgcctgagtgtgtaactgcaccacatacctgaagtgcctgatgaggccagaagaagagagtcagactccttggaattggagttagtgggcaattgtgagctgctatgtggatgctaggaattgaactcaggtcctctgcaagaccagccagtgctcttaacccttgagctatctctccagcccttatttaaaatatatatatatatatttagtatttgtgtgggggtaagcatgacacattggatgtggaagtcacggggactttttttgtcggagttggccctctacctccaccgtgtggtttgtggaaagaactcaggttgtctggcttaatggcaggtgcctttgcctgccgagccttcccactgggccagggttttattttattattatagtgtggggtcatgggagcatgcaagtgggggtcagagcacgactctgtggagtcagttctcttcagtctttgctttggctctcaagcacctcaggcttgggccatgggcttgtccaacagtgctttccccactgagccagtagtggcccacagggagctattcctgggtggtcgtaattctaggaccgtaaggacatttcagtcagatttgtgaagaggaatagcacttgaacaatagtcgtctattaatgtctgcctatctttgacagtcttgtgggtcccggtggggtgggtgtgtgtgccctgtgttcctgttgtgttcctgttgtgttcccaggctcaggtgctagagacctgttgtagagcctcgtgcatgtccatgccagggaaacacaagcaccctaagccacatcccagctgcttttcccttttgcttgtttttttccttcttctttatttttgagacagtgtatcactgtgttgtttggggcaggttgaaaacagtgtttccctttgcagctcttactgtcctggaactcactctgtatacagaccagggtgacctcaggcccacagatttagaagtgttgcagtgtttctcttaacctggctagcccaaataattgaaactagactgttaggtttattttacagctttaaggggaagcagttgatcagtatcactctattttaatgctctaagataatctatctacctcccagccttatggctgcagtacttggattttagtactgacctgggtgtatctcctggacacactcctcctctaggtgccttctccctcccatgaatgggaggaagtccaaccctattctctgccctgctcagtcattggctgatcaacttctttattggccaatcagggaataattggggccaatgcctacacatcattgagacaggaggttctcagagtaaggattgaaaccagatatggggtcccagaaatcggcatttaaataataaaaggataatctttacacagtgcataataacatgcctacacccctgcctcccaagtgctggggttaaaggcttgcacgtgcaccaccgcccggtttactatgtatttctctttctatttctatttctctggcttggtatgaactggctttgatcatgacaatttttcctcctcagtggacttagtgttaccatgcctgcctgtgttttctgttttagttttggtcttgaggaaaagaacccaggtccttccaccttctgagcacacactctcactgagatgtattctcagctctggtgtcctgcaatattgactgtgatatttatctatgtttagtgctagtccatagtaacctttgtgtccacactgggttttatttagacatgaattttcttccttcagtactcctataaaataacagttctcattaatagttgctttatttagcacccttgtatcaatttgttggctttaataagactatcttctgaagtgctggagagatggctcagccgttaagagcactggctgctcttccaaaggccttgagttcaattctcagtatccacgtggtggctcacaaccgtgtgtaatggcagctttagggcctcccaacgaatgcacacaagtagcaaacattcacacacacccctacatacataagtaaaaatatttttaaaaaagaatatctttggaagaaaaaatatacttctgaatgaaggggaacaggtcggaagagtttatttcggcactcagaaataacagtagagcaagcagtggagtgacacaagggactgctgtggaagtgatgtaaacagaactgtgatcccgagggggggagggttgaagtatgttaggcagagtggtggtgtggagatctgtactgaagacagaggaaactgaccagtacactactgtttaagaggcttagaaaggaaggacgctgaggtaactcctgtgctgcaggctgccaggccgcccaccgttggctcccacacagtgggctgcaggctggttggttggttttattttttgttttgtttttgttttttgttttgttttgttttttcaagacagggtttctctgtatagccctggctgtcctggaactcactctgtagaccaggctggcctcaaactcagaaatccgcctgcctctgcctccccagtgctgggattaaaggcgtgtgctaccactgcccagcggttggcttttctacagcctaggaaagtactgaagtgatctcaggtgcagccttggaagggggacactgagcaataaagaggaaagtcaagcatcgatttggggagggggaggaggaggagggagaggcagaggcaggctgggtctgtgatcgaggccacccagggcggcacagtgagacgctgcctcaggtgagagggatggaggagaagggaagaaggtgctgtggaagctgccactaaaggaaagatgtggttccatccaaagcggattctagagtctacatagtgactgctttcccactgtttatctgggatttatttttgttttggtccaccctaaggtagcgtttgttcacaggtacccttgttggacacgggtgacatcatcatcgatggaggaaattctgaataccgggacacgacagtaagtgttcctcaggccaaactctttcaggtcttgagaacattctagaaagaaatactagcattgttcatgtggccaaagagtggactgtcttgtgatccttggggattggtcctggcaccctggatctcagcctttttctgctaagacacttgatgggtgagatgatggcttagacaccgcaggctgagggcttcttgcgtaatctccaccttctgcactgcacggcctgctaaatccctgcccttactgtgtcagatgccaaagcaagtcacgtgggctagcgtgtgagacagcattaagtcacctccgcacctcttcagtgcacttcatcctataaggtcttctccatcaaaatgggactgtgtgttcaggaatttctcctagggatggtgcagctatctcagaaattcagttattcttttaaactttttacaggaatttttacctcagagttttaatcctcctgttctagcctccttcatttaaattataggactctataacatcctttgaactgtaactctgaatgtataaactgtctggagtggttggctgctcctgggtccttgggtcatttacttgcaaatgtgagctcttgattcctggccttgcacctcctcccaagaaagaatttattttgtgagaaaaccctgaaactgtttttctctcttttagagaagatgccgggacctcaaggccaagggcatcttgtttgtggggagcggagtcagtggtggtgaggaaggggctcggtacgggccgtcactcatgccaggagggaacaaagaggcttggtgagttcagcacaggcccagctaggcgggaggtgtaagggttcgatgggaggcctcagcccctgtctctcttgcgtcaggtgtggtcttccttagtgcggtcctaagcgttggttttgcaggtgtcaaggtttggggtctgtaccaaacgttcttgagaagatgagcctttgtttggtagggggaagggcctagcgtttcctctgagccgtagtgaggtgggatgagatgaagagttgctccagatgagagcatctcttagagtactgcacagccctggcttctctctgatccagatgtgcagagccatgttgtacctggtgacagacagccggatggtgagagtgtccctgagatgttcttgtactgcttggtttgggtcataaagtggtgggaccttcttctcctgttctgagggggtcagtgaggagctggggatggagcccgaggcctcgtgcatgacaggtgtgcactttaccgccgagccacacccctcggtctttggtgcgtctgccctgccttttcctttgtgaattggctgtctccactctgaggccacaccgggtgggtggtgcacgcttgtcagcaatgacaccagagtgtctctgcaaagtttcgcacagccattactctgagagtggcgtccctgcatggcactgaaagctcggccctctcctgttgattgaactcacttccccttccgcaggccccacatcaaggcgatcttccaagccatcgctgcaaaagtgggaaccggagaaccctgctgtgactgggcaagttctgggctaccctttgacgacgtgcaccgctgaagacagaccaccttggtcccagtggttagctctgtgctgtgagcctctcagtcttaagtcactgtcccagcttgtccctgaagtacatccccgtctgtcttcatgtccttgtagctgaaccagcccttgagagcccgaggttactgtgctaaaagcagcttcctcaaccctactaacaaggatcataaataggatcaggaatggtgaagggaagtcagaggtctctgtagctgtttacttcatggccagaggatgcaggagctagtgtgtgggttagccaccttgtcccaacagatgcctcgggccgtgcgggtggaagaatctttgcgtagcccaggtttccggttttctgtagatgttccccagagctcaggcacctggccatcggcactttcttcccccgtttgctgttgctgtgagaatcagtaccgtggactgactggaaagcccatcagctgcccttaggcttctctgttaactgacggctggcctaggacagatctctgtaggaaggcttctctgagcaacagctaagctaggttatctctgttcttaacagcttttcttcctctttcttcctttcttcaaatttattttcttttcttgtttcccttttcttcctctcagccttccattttctctgtctgtctgtctgatttgtacttctctctctggtgtatatgctggaaggtgataaagcagctgcctgtctgtggaggtcagagcacagtttgtagagttggttgtgtccttctgtcatgtggctgccttcaggtctggcagcaagcaccttcacctgctgaaccattttctgtccccaacaccgagtgtctcctcaagactgggtctcctgaattacaggcctgtgtaccaccacacctagccccctttctatacctgctatttttatgtgctcaccttattattttagtaatgtgtatgattaaaagtagggatgcataaggctccaggcatgtgggcattcgggaagctctcccactgacctgccagctttggtggctgcctttccccaggggccagtgtccttccttggtggcagacagctacttccttctaactccctctaggacagagtcaaaaggaaaagccaagcttgcactcttgggccttgactctgccatagtccacgcctgtggcctaaggcttgggttcaggtcgtaaggataagtagtgtagactgcaagtgggtgagcctggagcaacaggaagggggaagtaagatgtcttcatacgcacagttaggaaggggcaggccagtgatgaaggtagacaggcagcctctgatgagcagtgactgccagggaagactgtccagctgccctgctgtggaggtagctacttgtgactgtaagcctggaggcaccgtggactgactctgctgccttcttccatctccctgtccattagacagtgttcacagagtaactcagctgaaagaccctccctaaactcccgctgacaaactgataagctggatacatcctaccagattaccttgctttcataggaccatccgagaatgcacttctgcatttaaaaggtcaaggccagaccttgatagaagtcgttttaccctcagtatctgttagaaacaattgtattacatttgagtctagggagtaatctaatctattttacaagtaatctaatctatttagccagcagttgccagaagactggtaacatcaagaccatggagactttagtgtggggctggggtccgggagtggggagtagtttttaataacgagggacagtgggaagttgggctaaaggttttggatgctgggaggttcccatggaaccatactgtttcctcatgttatttttctgaagtctttcgtctgcggagacttctcccctgtagtttgctgctctgacggctcttgtttgtcgccaacaggtgggagatgagggggcggggcactttgtgaagatggtgcacaacgggatagagtatggagacatgcagctcatctgtgaggcttaccatttgatgaaggatgttctgggcatgcggcatgaggagatggctcaggtaagtcctgggcactgccgccacctgggtaatcacctcccaaaggagagagagcttgctactgacaattaacccttcctccttcctgttcacctgcctgtctggtggccccacatggactctgcctaatgtaagggaagccacggtaataacatcataaagtgtgatagccggccatgaagcagtaatcggccatgaagcagtaatcgtagtctgcagttagtgagccatgctttgtcaggcaccgtgtgtgacctcatatccatccctccccatagaacacagagcctggccttaggtgtggtagatgaggactccccacagagcccatcccagtccttcttttgttcctacctttgttccatacaggaagtaagtagctggctttgttgaccaagtagggggctcagcagttgagagcacttgtagaagactggggcgagtttccagagcccatccagtcatgtccttctgacctttgtaggccttgtatgcagtggtacatgtgaatacttgcaggcaaaatacccgaacacataagaaataaatatagtaataaatcttttaaaagaattaagttcatcccagtggggaagcacagacatcctcagcattttattatgaaaatattaaaatacataagaaccacagtatgagccagccatggtgctgcacaccttgatgcctcctagggaggcagatctctgagttccaggctagcctggtctacagaatgagttccagggtagccagggctacacagaggaaccctgttttcaaatccaataggaagaaaagaagaaaaaaaaagaacctcactgtccaccactgagctatgtatgtccagtcccaggaggtggggtgtaggtacgacaagaaggtgatattgtgcctaggcccagatgacatgaggggcttgactccaaggagaggggacagtctcagtgctgagaaattagccaggcagatactcaacagaacttcctgacctgggaaactcaactcactgggcaggaataggagtcttcaggccactaggaggagggtttgctgtccctatgtgctctgcagtgagggcaccagctacagacagaagcaagaatatggcagatgagccagggtgcccacagaaccctctcactgggctttctcctctgtgtgtaggcatttgaagaatggaacaagacagagctggactcattcctgattgaaatcactgctaacattctcaagtaccgggacactgacggcaaagagctgttgccaaagatccgggacagtgctgggcagaagggcactgggaagtggaccgccatctcggcgctggagtacggcatgcccgtcaccctcattggtaatatggcagctttccccttctttgtgtagttggttcttgagacagtcttgatgagtagctcaggttagcattgaacgtacatcagtctcagcctcctgagtaccggaatgtaggcctgcctgccttgttggctgttggttgtttttataagatttctttgataatgggttcagtaagccgggcatggtgacgcacacctttaatccaagtactcgggaggcagaggcagttggatttctgaggccagcctggtctacaaagtgagttccaggacagcctgggctatacagagaaaccctgtctcgaaaaacaaacaaacaaaaacaaaatcaaaaacaaaaatgggttcagtaagaaaagttcacaaacacattttgcttatgtagtagtcaacatgaattctctgggtttggatgtctgtctgtccgtcctcctcctttattttatgattatcctggctcaccctgaggaagaccagtgggtggtgagtcctgcacagataggaggaagttggctgcactagggccaatcccagcagtgcagagagcatctgtccaccacccacttagctatgcgtatcagggttcctgccttcaaaagcaccctcctccatcttagagactgggttccctcccactgctagggtggacgtggtcctttcctacctactgaactgaagaaggaagaggtctcagctggctccggtatgcctgggaggatttgccacacttgctgttgcacaattgtcttgcagtatttccttccacaagtgtgaagtaatgcagagaggaaggacagcggtcgggtcagggcaagccggcctcaagttatgtctagagtcctttccccaaaactaaaatgctgtcttagttcccagagatcaacccactttgtttagaggagaagaaaagtcatttatcttaaataaattgagcagtagtcagtctgccacaagggatggtttgttaaagtattaaatgtcctaatgtactgtattgaaggatattgtgaaacctaggattatgggtattaaaaccagcctaagggctggagagatgtttcggccgttaagagcatgtattttttaattaattaattagttagttaattaattaattaaatattattttatttatgagtacactgtcactgtcttcagacacaccagcagagggcgtcagatccaattgcagatggttgtgagccactatgtggttgctgggaattgaactcaggacctctggaagaggagtcagtgatcttaacccctgagccatctctccagccagagcttggcttcccagcacccacatcaggtgatcacaaccccctgaactgcaccaggcggatctgactcctggtctctgagggctctcgcgttcaagtgtacgaacctacactcagacacacacacatataaataattaaaaataagtcttacaaaaagaagaacactaaacctgggagctagtgagagagatggcctagtaatcaagagcgcttgttgctcttgttgatctgggtttgattcccagcacccacgtggttggatcttgcgccctcttctagcctctgaaggcactgcaggcaagtgatgcatatacacatgaaggcagacacccataaacatagaaataataaattaaaaatcagctttcaaagctgagcatggaggtgtacacatttaacaccagaacttgagaggcaggggcagggggtgctctgaattcaaggcaagcctggtctacatagtaagttccaaggcagccaggactacctggaaaaaccctgctgtctcaaacaaaaaattaataaacgtcttttttttaagacaataaattgcatctttggtgagcacttaattctcaccagtcaggtgtggagcatagctgtaatccaagcccttgggaggaagaggcaggaggacctgtgggtcaaggccgtcctctgccgtattgtgagtgtgaggtcagcttgtacttatgcagtcttgtctcacaacagttaatttcttcttcatagaaactgaggttttactcttgggttaatattgagttgttctgtgcaatccttgccttacctctctcacctcgagacgtccctttgaattccgagttgatctttgtagttgaatgcctgcgtctgtgtggagaggctaacttggtctttcagttctggaatgaacagagctatgtggcccttccccataacccaggtcaaagcactcagcccttggtgcaggctggatctcttgcccctgtcctggcctctggttggatccctgatcggccctgtcttccccaccaggagaagctgtctttgctcggtgcttgtcctctctgaaggaggagcgggttcaggccagccaaaagctgaagggtcctaaggtggtccagctggaaggcagtaagaagtcattcctggaggacatccgtaaggtgactgcccctcacctcgtcgcctgtggtggggtctgtagaggtcctccaattccagcctttcccgttctgtcaccctctctcacgtctctgaggtgcgaatgaaactgggacatgggtgtggctactccaccaaccacagctctgaagtcctgtgtcactttccaggccctctatgcttccaagatcatctcctacgcccaaggctttatgctgctcagacaggcagccactgagtttggctggaccctcaattatggcggcattgccctgatgtggagagggggctgcatcatccgaaggtaggtaagaggcgaacccgggactgcagtacactgcccagcagtgcgtgccttgccctgtagccgggacagccaccctgccactcaacactgcagcgtgtggatcccattgtcaccgcttatgcagtacttttgccttatgcagtacttccttctgcataggtgtccactttaaaacaattgtggttcaaaaggttagaaaagaatgagtcggagtggcacacaccttcaattccagcacagaggcaggaggatctctgagttggaggccaatctggtccacagacttaagttccaggacagccagggctacacagagaaaccctgcctggggggcaggcacaggtggaggacacaagtaaacagtgtgtaccgcacttgctaggccctttagaaaaggcagtgaacatttggagaccacttttctcagcatggctccccaggccgtgccgggaacctgcttcacgtcccatccacatcactgtgagcattgtaggcccgccggacggtgcactgcacggcgtctgtgtgggtggtttgattgactactctgggggaggagctataggtgccaggcccgtgtggaggtaagcaagacttgtaggaattctgctacagctcagtgtatctatcccagttgtacattctgggactgagggaataaccagaggctgagtttaggaagccgctgacctgctgtgagtttagcttcactaaaactccattaaacctgacctccacaggacctgccttagccggaggaccacagagcttcttgggctctcctagaactaggttgcctcaggaagtctgattctcctccaccccagcccctcagtgaagtttcccttgtaaagggctgcaggtcctcctttattcacagggttctaggtctagaaattggtccaggagctgggagtccatcttgttgggatccctgtaaccttcctttcacaggggcttttcttctgctgtgtctgtttcatccctggaaaccccacaacagagtagccagcacccgaggtctccacaaaccagaacaccataaatcactatggtgtgcccattacagtacccacacatcacagtgctcacacctcacagtgcccacacgtcacagtgcccacacgtcacagtgcttacatgtcacagtgcccacacatcacagtgctcacacctcacagtgcccacacaatatagtaccatacattacagtgcccacacctcacagtgctcacacctcacagtgctcacacctcacagtgcccacacatcacagtgcccacacgtcacagtgcccacacctcacagtgcccacacatcacagtgctcacacgtcacagtgcccacacctcacagtgcccacacatcacagtgctcacacctcacagtgcccacacatcacagtgccatacattacagtgcccacacatcagtgcccacacatcactgtgcccacacatcacagtacccacacaacacgttgcccacactcccctccatttctttctgtgtgccttctggggcttcaggttttgcagcaagcccctttgccactgagccatgtcactgtcccattaagtactaggattaagtatgaggctagttcatgaggggcttgagctctcaggagttttgactgaaccccttctctgggcttgactcctgggggccactgcctttttgtttgataggaggaagggcctcgcacagcccaggctgaccttcagctgacgggatccttccgtctccacctcattctctgtacttaaaaaaaactttttaaaaataacttttatgtgactagagagatgactgagcagttaagaacacaggctgctctttcatcagagaacccaggttcaattcccagcacccccatggcagctctcaaccatctgtaactccaatcccaaggggtacaatgccctcctctggcctccttcggcactgtatgcacctggtgtacagacatgcatgcaagcaacacacacacacacacacacacacacacacacacacacacacacacacacacacacacacactctgtctgtctgtctgtctgcatttgcagggtggtacacatgggccacagttgtgtgtaggtctcaggagcccatttgtggggatgccagcatttggggccaggaatggattcagattgtcagccttggccaatagcttcacctgctgagccacttcactggctcctcaggacttgtaacggtcgtcctgctggctctggggcacgggaactgtgactctgcacccaggacttgtaacagtcgtcctgctgcctctggggacggcacgggaactgtgactctgcacccaggacttgtaacggtcgtcctgctggctctggggcacgggacgggaactgtgactctgcacctctgtagagtatgcagggcttattcccagatgtttagcctgctactgttttttgttttgttttgttttttgtttttcgagacagggtttctctgtgtagccctggctgtcctggaactcactctgtagaccaggctggcctcaaactcagaaatccacctgcctctgcctctcaagtgctgggatttaaggcgtgcgccaccactgcccgactcctgctactgttttaagattgatttcttgcaaactatttcagtgtgttcctgggaaaaattaaagatgcatttgagcgaaacccagaacttcagaacctactgctagatgacttctttaagtcagcagttgacaactgccaggtacgtggttggcaatgggtggtgctgtgctctctgggtctcagtagcattgacgtccctgaagtgtgtcctgtagaccggaacctcagtgtctctagggcaaacccagctcctgaccttctgctctctgcgctcaggactcctggcggcgggtgatcagcactggggtgcaagcaggcattcccatgccctgcttcactactgccctctccttctatgatgggtacagacacgagatgctgccagcaaacctcatccaggtgagcgtggggcgggtggtaccttcacctggctggttccgtgggcctgagtatcaccctgaccctgaccaactgcattcctccctcaggctcaacgggattactttggggctcacacctatgaactcttaaccaaaccgggagaatttatccacaccaactggacgggccacgggggcagtgtgtcatcctcttcatacaatgcctagtaggcctgtggcttgccctccctcccagcaataggacagccccgtggcgctcagcaccccccctttgccctagttcctgctcttagccaagtgttggctgtgattgctgaagaagtcaccgaggtctatagtttctgaaccaccacatgctccacctccgtctctgtgctgcccaggacctgaccctgtgctgccactgcgtgacctgaccctgtgcgccactgcgtgaccactccctgactgagccgtgccatgtggaccagacaagctgcagctcttagctcacagagggggtgggtgtgtgggatcgtacaacctggacgtggaccatgcgtgtgggctctgctgtcctccagtcagtgaagtgtatatggttacactctctgggtgtgcctggcagaacgatctgcactgagttcactattgcaaattgatttgttttcctttagccttgttcacttttaactccggctttttttaaagactccaaataaaacaggacaggtagtgagtaaatctggagggaggtgcagagccgaggagtcggtgggcagaggctctcctgtcgggtatttcttactggcacagtaggtacctggatgttcacagagcatccgccccgtcccacttgtaataaacttttagactggtt

SEQ ID NO: 738 - DNA, 1906 bp, Mus musculus
ggacttcactgtacttgcctcggagcgctcggtccttcgcgtttcttcctcctcgactctgcttcgtctgcctccgccatggcccaagctgacattgcactgatcggactggctgtcatgggccagaacttaattttgaacatgaatgatcatggatttgtggtctgtgctttcaataggacagtctccaaagtcgatgacttcttggccaacgaggcgaagggcaccaaggtggttggtgcacagtccttaaaggacatggtctccaaactaaagaagccccgccgggtcatcctgcttgtgaaggccgggcaagccgtggatgatttcatcgagaaattagtaagaagatgccgggacctcaaggccaagggcatcttgtttgtggggagcggagtcagtggtggtgaggaaggggctcggtacgggccgtcactcatgccaggagggaacaaagaggcttggccccacatcaaggcgatcttccaagccatcgctgcaaaagtgggaaccggagaaccctgctgtgactgggtgggagatgagggggcggggcactttgtgaagatggtgcacaacgggatagagtatggagacatgcagctcatctgtgaggcttaccatttgatgaaggatgttctgggcatgcggcatgaggagatggctcaggcatttgaagaatggaacaagacagagctggactcattcctgattgaaatcactgctaacattctcaagtaccgggacactgacggcaaagagctgttgccaaagatccgggacagtgctgggcagaagggcactgggaagtggaccgccatctcggcgctggagtacggcatgcccgtcaccctcattggagaagctgtctttgctcggtgcttgtcctctctgaaggaggagcgggttcaggccagccaaaagctgaagggtcctaaggtggtccagctggaaggcagtaagaagtcattcctggaggacatccgtaaggccctctatgcttccaagatcatctcctacgcccaaggctttatgctgctcagacaggcagccactgagtttggctggaccctcaattatggcggcattgccctgatgtggagagggggctgcatcatccgaagtgtgttcctgggaaaaattaaagatgcatttgagcgaaacccagaacttcagaacctactgctagatgacttctttaagtcagcagttgacaactgccaggactcctggcggcgggtgatcagcactggggtgcaagcaggcattcccatgccctgcttcactactgccctctccttctatgatgggtacagacacgagatgctgccagcaaacctcatccaggctcaacgggattactttggggctcacacctatgaactcttaaccaaaccgggagaatttatccacaccaactggacgggccacgggggcagtgtgtcatcctcttcatacaatgcctagtaggcctgtggcttgccctccctcccagcaataggacagccccgtggcgctcagcaccccccctttgccctagttcctgctcttagccaagtgttggctgtgattgctgaagaagtcaccgaggtctatagtttctgaaccaccacatgctccacctccgtctctgtgctgcccaggacctgaccctgtgctgccactgcgtgacctgaccctgtgcgccactgcgtgaccactccctgactgagccgtgccatgtggaccagacaagctgcagctcttagctcacagagggggtgggtgtgtgggatcgtacaacctggacgtggaccatgcgtgtgggctctgctgtcctccagtcagtgaagtgtatatggttacactctctgggtgtgcctggcagaacgatctgcactgagttcactattgcaaattgatttgt

SEQ ID NO: 739 - protein, 462 aa, Mus musculus
MAQADIALIGLAVMGQNLILNMNDHGFVVCAFNRTVSKVDDFLANEAKGTKVVGAQSLKDMVSKLKKPRRVILLVKAGQAVDDFIEKLVRRCRDLKAKGILFVGSGVSGGEEGARYGPSLMPGGNKEAWPHIKAIFQAIAAKVGTGEPCCDWVGDEGAGHFVKMVHNGIEYGDMQLICEAYHLMKDVLGMRHEEMAQAFEEWNKTELDSFLIEITANILKYRDTDGKELLPKIRDSAGQKGTGKWTAISALEYGMPVTLIGEAVFARCLSSLKEERVQASQKLKGPKVVQLEGSKKSFLEDIRKALYASKIISYAQGFMLLRQAATEFGWTLNYGGIALMWRGGCIIRSVFLGKIKDAFERNPELQNLLLDDFFKSAVDNCQDSWRRVISTGVQAGIPMPCFTTALSFYDGYRHEMLPANLIQAQRDYFGAHTYELLTKPGEFIHTNWTGHGGSVSSSSYNA

SEQ ID NO: 740 - DNA, 2182 bp, Mus musculus
ggacttcactgtacttgcctcggagcgctcggtccttcgcgtttcttcctcctcgactctgcttcgtctgcctccgccatggcccaagctgacattgcactgatcggactggctgtcatgggccagaacttaattttgaacatgaatgatcatggatttgtggtctgtgctttcaataggacagtctccaaagtcgatgacttcttggccaacgaggcgaagggcaccaaggtggttggtgcacagtccttaaaggacatggtctccaaactaaagaagccccgccgggtcatcctgcttgtgaaggccgggcaagccgtggatgatttcatcgagaaattagtacccttgttggacacgggtgacatcatcatcgatggaggaaattctgaataccgggacacgacaagaagatgccgggacctcaaggccaagggcatcttgtttgtggggagcggagtcagtggtggtgaggaaggggctcggtacgggccgtcactcatgccaggagggaacaaagaggcttggccccacatcaaggcgatcttccaagccatcgctgcaaaagtgggaaccggagaaccctgctgtgactgggtgggagatgagggggcggggcactttgtgaagatggtgcacaacgggatagagtatggagacatgcagctcatctgtgaggcttaccatttgatgaaggatgttctgggcatgcggcatgaggagatggctcaggcatttgaagaatggaacaagacagagctggactcattcctgattgaaatcactgctaacattctcaagtaccgggacactgacggcaaagagctgttgccaaagatccgggacagtgctgggcagaagggcactgggaagtggaccgccatctcggcgctggagtacggcatgcccgtcaccctcattggagaagctgtctttgctcggtgcttgtcctctctgaaggaggagcgggttcaggccagccaaaagctgaagggtcctaaggtggtccagctggaaggcagtaagaagtcattcctggaggacatccgtaaggccctctatgcttccaagatcatctcctacgcccaaggctttatgctgctcagacaggcagccactgagtttggctggaccctcaattatggcggcattgccctgatgtggagagggggctgcatcatccgaagtgtgttcctgggaaaaattaaagatgcatttgagcgaaacccagaacttcagaacctactgctagatgacttctttaagtcagcagttgacaactgccaggactcctggcggcgggtgatcagcactggggtgcaagcaggcattcccatgccctgcttcactactgccctctccttctatgatgggtacagacacgagatgctgccagcaaacctcatccaggctcaacgggattactttggggctcacacctatgaactcttaaccaaaccgggagaatttatccacaccaactggacgggccacgggggcagtgtgtcatcctcttcatacaatgcctagtaggcctgtggcttgccctccctcccagcaataggacagccccgtggcgctcagcaccccccctttgccctagttcctgctcttagccaagtgttggctgtgattgctgaagaagtcaccgaggtctatagtttctgaaccaccacatgctccacctccgtctctgtgctgcccaggacctgaccctgtgctgccactgcgtgacctgaccctgtgcgccactgcgtgaccactccctgactgagccgtgccatgtggaccagacaagctgcagctcttagctcacagagggggtgggtgtgtgggatcgtacaacctggacgtggaccatgcgtgtgggctctgctgtcctccagtcagtgaagtgtatatggttacactctctgggtgtgcctggcagaacgatctgcactgagttcactattgcaaattgatttgttttcctttagccttgttcacttttaactccggctttttttaaagactccaaataaaacaggacaggtagtgagtaaatctggagggaggtgcagagccgaggagtcggtgggcagaggctctcctgtcgggtatttcttactggcacagtaggtacctggatgttcacagagcatccgccccgtcccacttgtaataaacttttagactggtt

SEQ ID NO: 741 - protein, 483 aa, Mus musculus
MAQADIALIGLAVMGQNLILNMNDHGFVVCAFNRTVSKVDDFLANEAKGTKVVGAQSLKDMVSKLKKPRRVILLVKAGQAVDDFIEKLVPLLDTGDIIIDGGNSEYRDTTRRCRDLKAKGILFVGSGVSGGEEGARYGPSLMPGGNKEAWPHIKAIFQAIAAKVGTGEPCCDWVGDEGAGHFVKMVHNGIEYGDMQLICEAYHLMKDVLGMRHEEMAQAFEEWNKTELDSFLIEITANILKYRDTDGKELLPKIRDSAGQKGTGKWTAISALEYGMPVTLIGEAVFARCLSSLKEERVQASQKLKGPKVVQLEGSKKSFLEDIRKALYASKIISYAQGFMLLRQAATEFGWTLNYGGIALMWRGGCIIRSVFLGKIKDAFERNPELQNLLLDDFFKSAVDNCQDSWRRVISTGVQAGIPMPCFTTALSFYDGYRHEMLPANLIQAQRDYFGAHTYELLTKPGEFIHTNWTGHGGSVSSSSYNA

SEQ ID NO: 742 - DNA, 132416 bp, Mus musculus
  misc_feature (1)...(132416): n = A,T,C or G
gacggcagtggtcccgggaggcgacagctcggatccgggcttctctctgttcctccgccgcatccaccgccgcgccccggcctcccgccaatcctcgatgcagagctgggcggccgcgtgatggggctgcggagcggcgccctgcggctcgcggcggccgctgcctgcgctgaggtgcgtcggtgcccggcctcccgcgcccctgcgcgcctcggcgtcttctgactcggccggctcgcccgtctgtccgcagcgcggctgaggtgaggaggctgaggtggggcggccgaggcgaggtgggcggtggtgccgcggcgccggtgtagggggccgctcccgcgggagggactcccggccggtgacgggcctggagggggcaaagcgaggaagcgggcgcggcctgccggggctctggctccgcggtgaggagcctcgccctccgtggagagacctggccggccggccgcgagcgccgggctttggtccagcggcctgccggtcccctgcagtgccctgcaccagccctccgcttcccctgggctgccaggccccgctctgtccgcgggccagcagatcggtcgctgtcccgccgtatgtgcgcacattgcagctctgaggagccagccgatctctcccccctcatctgctctctcaccccctattgtggttggcatcagggttccaaccgggaatgtggcaatgcccctgagcccgatgaaggtaggaaagggcatccgacagagcggagggcgcaagggctggacggaggaagcgatgcagagggagggggcttgttggatgctggccagatgggaggaaggctggtgtgggctcgacgttcagccgaccaggatcactctggcagccatattgggaggatgatctgacaaatcctttaggagccaagtccggttgctggtaggcaccgagtgacagccctggcagctttcagggtgactggccgcaccagaagccaagttgtgggggttgggaggccactcagagcaagctagtcattgttcatgcaacgcaaaccctcaccgactggaaatgcaaaattgagctcccaaatcactttttctctttggtgaattgctatatgagccttcagggtaaactggcttgaagattccattcttgttggggtgaaattctgtgtttctgtccttatcatcgcaatccaccgctgctttggccctcgaaggcctgttgatgtttaaggccactttaccatattggaggctcttggcgtattgcatggcgtgcatagatttgcatagtatctcttcgtgcagagattagggaaagtggaataaactggtagcagagaagacttgcagcagtatctcggaggatgcaggttgtcatctttgtggaatctggaggtagcctaatttagattgtcaacagatctcttgcttatgtagctctctctggtccaagcagctgttctgccaacactaagcatgctgctttgtgtcatgatgtgcctgtctcaacccagagaaaagtggtgttcagctttgaataactgtttaaaagtgatattatagtggatattggacttaaaggttggcattttgtggattcggcttagtcataaccaaattttagcttgcgttctcatttgagaagcgtggtagttgatattgattatgaagtaattgaagttgttaatgttctatttgaggagagactttgaagattactcatcttgatgttttaaagtagatttagaaatgatcaataactggcttcagagagagcctgtaaatgtgttttcctagactttgatcctgcacaggatctggagagatggtgtgactcctgccttctttatgccctttaatttaaacttcatttattatatatatttgtttttgggagggagttggagcgctagctcgggtcttagacatgttagacaagctgtctactaatgagctagactcccacgatccatgctcccttttttaaatgcgtaagttcttttttccccctattttaattatctgtctacttaagaataactacaaaaacaaattccaatgtttttctatttctaagaaaaatcagcacactattttttttttttttataatttttaccgttaggcaatctcagtgaactttcaacagacactaattttgtttttttttttaatttgtttattttatgtgtatgagtgttttgcttgcatgtatatgtatatgcactgtgtgcttgtgtggtgccctccaaggagagatgagggttggatcctctggacttggagtgacaggtgattgtgagccactctgtgggtgctgggagctgaaccagggtccccctcaggagcaaacagtgctcttaactgctaagctgtttctcaagactaaagttagtggtgttggcagtacattaattaatattaaaaaaatacagaatgtttgtttatgattccatatcaaaataaggagtagctttaagtacatgtaaagaactgagattaaatataatttaagcttttgaaaaaaattagtcctgctgggcagtggtggcacacgcctttaatcctaacacttgggaggcagcggcaggcagatttctgaatttgaggccagcctggtcaacagagtgagttccaggatagccagggctatacagagaaaccctgtctcaaacaacaacaacaacaacaacaaattagtcctgattataaatctgaaatggaggaaagatttcttgactctgcataggtctttgctgttgaatatatttctagaatttatccgattaaatacagatttcttgagtttgcataggtcttcactattgaatatttttctagaatttatccaattaagtacagtttctaaggcataggtcagacttttccatttcaaaaccagatatgaatgcactttctttttttctactaaattagtgcagggaataaattattgcccaagaaaagtctgtcaacagttcccaaggccaaagctttctagcctatttttttttctgttttggtcttgttctgtgtacaaaataaaggtcaacaatgaacccttgctgccttgtttgtaaaccccttcccaggctactcactgtaacaagtctttcccaagagtaagcatatcccttcggtcttgtaaactgatgtgatagaattcacagtgccctgaagttaaaggtgtattgttcctgtttcacagtgttctctttggaagaggccttgtgtgaacagatagtggtaaacgtgtgaactccataagagagtgaatatgtatacttctagaacctttattttggtgcagggtagaagacattaaacagatgtggctgtgataagaaagcttgtagaaggggtcttggactgcccagaggttgttttgttctgttttgttttgtttttgtgaagagctcagtgattggtttgttctcatagtggttagaggtcaatccagcccacagagagactcaggtcttcatcccaaaatactgtaaggcctaccatttgttcttagactcccttcgcattgcagttgcatattccctttacctctgatgcacttagtgcactgctgcttgtgctgtggaagcgtctgtgattttctctttctcatgctgtataatattaatggtcttatgattgtttatggctgcatacgaggtgcaggttaaaagactaacatctatgcgtgcgttggcagcacatatactaaaagacgaaaactatttcttagatacaaaacctttttttggttggcagggctgaggactggacttgttaggcaagtgctctacccaatccccagccccataaagcttttccattttattttacagtttaaaattttcatgtttacaacagagcttgacattgagttacatacttctgtcattttctcctttggtaacttgggcatcttttggctcagttttccctcacattcaaattttattgttatctttgtgttgctaggcactggaccctgggctttgcatatgctgagctagggaatgtgctcttgagcgagggctctagcctcatacaggtttttcacatcatctcggcagatgtcagtgactatctacgtaaacagtagcagcggcaataacgaggagaaaagcattgtgctcatattaagcagtttctatatatcaggaggctcttctgtaagcacatttattaaccaaattcatagacagccatgccaagtacatactgttatagctctttctcatgtgaagaaactgaaacctgctaaacttccctaccatgactagagctgggttagtgaccactgtgctgaacttctttaaaaactatccttcccttaaaattccttcacttctcgagcactggctgggttcttttctggttactgttgtgccacatcttctaacatgtcattgccttcagatctcgaatttgccttctgatcttaaaccctggtaatttagagttctcacttctgaagtcttcttgcttgtgcattccgtgttgaggccccaaggctcctcgtctcttcgtttcccacactgtgacgtctgggtttgctgctccagctcttttcttacgataccaaccgttgctgttttaagttccttactcttctgaaggccactagacacatgccagcctgaaccagtcctgagatccgtttggttgttgttttgagacagagtctctatgtcgctctggctgtcctgaaactcactatgtagaccaggctggcctcaaactcacagagagctgcctctgctttgcaagtgctgggactgaaggtgtacaccactaccaaacatttagtaccaggatgagtcaatgccttccccttaggctgtctttagagttttgttttttcaaacagggtctatgcagtccacgcttcccccctcctgcctcaagctcctgagtgctgggcactaatacctgacccactttaaaatttagcattaaaaactatgatttattttttccttttgctttaatttctaaactaaactattagtccaggcaagctgtatttttagttatccctctgtacacaagatttttgtttacttatatttcaatagtctcattatatgtggagcttatagtactttgctcaaatactttccaaaggcagtaagtattacaaagtataaacaaaaatttcttgtaatggcttattttactatttattttaactgggatgtatgttatacaatccaagtgctagttcttaaaatcaaaaccaaacaacacagcagatctttaaaatttatacaaaactctgtatttgatgagctggatggctgtgtgtgtgtagacaggaacaggactcaggagaccgaagccagccccacaaaagcagacaaaggttcaaggacagagcaagttaagtaagagacacttgcagagcagtggtgtaaaatgtgcataccacttcccgtcgcctcctagcaataaaggctggaaacctgaataagaacaatatcaaagaagtaggggactctagagccactcatgctgactgtaattagctggagagaggagacactttatttattttttaataccaggttgtgcacacctctatgctctattcaacatgttgcatacacagtctagggaatccctggcttggagaaactttcattctcttgggggaaagaggcattgaagctgagctgccctgaatggactcgagggaagggaggtaactaacgcccagaagtgaagtggtgtgtagctctgtagctcagtcaggggaggctgtgctgaggtggtaagatttaagcaaaaatcgtaaagaggtgaaggagttggccaggcagattagagaagaagagcaatccaagctgaagagcgcatgagccagccctaaggtagagcttgccaggcatgtccaaggagcagtgcggggaagtcagtcaaggagaaggggcatccaataaaacagatcgccaaggtaggagccagtggtacacagcacaggccagggactagctgaagtcagggagaggaacgcaaagtaggcagggaggtttgtaaagagacaggggaggttgaaggagcgcctgccttttccctaggcggtggtagatgcagtttttgctaagcaaaggcagtggaagatgaagccactgtgaacatcttgatagggccgagcagacctgctgcagcaagcatccaagtcaaactgaggggctccaccaatccccagccctatttgaggcttttccatgaaacaaagtaagatacacacacaaatgtaaaatgttttaaaaatcaagttcacttgcttttcaagctgggaatatagtattataacttaactctttctaactaagaatgtaatcatttgtttagaatactttatttcaagctgatgaaccatagggcctattttcctctaatctatgggtgcctcccttaaacccccatgctggggatagaatctagggctttgtgcatattagacaagcactctatatacaactgggctgcatctccaactcctgtttcttgaggcagttcttgatttctgagaaaaagcaaagaagccatgtcagcagtgcaaaggattcttgatctcgtagttgcagaggcaaaaggatacatgtctggtaaatctaaaaattgtatcaggttattttagacagtggttaaaagaaaacagttggagaacctggccgagcttgttcagccacattggaaattgaaaatcggatctgtcagagactgttgctgtgtcatctgaatcttggcactgagttaggatgcgaaaagcagcattcctgacaagggatctagtttgcatttcacagagtgaccagagaatcaaagaccaaaaatacacatacacccttccctttctgcttctccctctccctgtctttctgtctttcccccaacccccacattcttacatattggggccactttacaggtatagccatggtcctaaaacttgctttgcctttattgacgttattagatatagagaactgtataaatgttttatagaaaggagttattcttagtctctctctctttttaaagttttatttttatgtacacctgcatgccagaagagagcatcagatcccagcatagatggttgtgagtcaccatgtgggtgctggggattgaactcaggtcctctggaagaacagactgatcttaactgctaagccatctctccagtcccatagtctgtctatttattgttttttttttgagacagggtttctctgtatacccctggctgtcctggaactcactctgtagaccaggctggcctggaactcagaaatccgcctgcctctgcctcccgagtgctgggattaaaggcatgcgccaccactgcctggttctttttaatttttaaagatgatttatttttattttatatgcattggtattttgcctgcatgtgtttctgccagatcccttggaattgtagtcacagacggttgtgagctgctgggaagagctgctgggccatctttactgcctctatttgtagtatatcaaaggttctctactatagaagtttacgtcactttgtgatgtgtttgtttgtttgtttatttgaaatgtagtataatttactgtaggctggctttgaactcctgtgtagtagaggctgctcttggattccttatctgcttgccttcccttctcaagtgaatgagccaccctacccagctcattattattatttattttaaaggaaagctctcatgcaccccaggttagcactcactgtgtactctaggttaaccttgaattcccatcttcctgcctctgcctcccaagtgctatgattacaggtgtgtgcctctttacatgccttttctgtttgctttgttctttaaattacagatcattccttgagaatacagtttagtcacaggcatggcagtacatacgtgcttttaatcccagcattcaggaggcagagggatctctgggagttaaaggccagcctggttatgtcaattccaggacagtcagagcaacatagtgagactctctctctctctctctctctgtctctctctctgtctctctctctgtctatgtatatatatatataaaattttaaattccttgatgtcaaactgttgttctagaaagttgagctagtaatagtttctttttggaataaaaattagtataaaaactagattaaggtagctagctactgaaacaaacatctgcccagtcccaaactttatgcatctcagtgaatttctcaaattttgttttagatctatttatttttttattttattttatttttttggtttttttcgagacagggtttctctgtatagatgtatttattttattattttatgtgtacaaatgtgtaccgtgtggtgcttgttacccatggaaatcagaagggccgtggggtcttctgaaccacagttacagacgatgtgagctctgcgtgtggagagtcaagcctgggtcctctgccagggcacgtgctcttaacactgtgctgtcgtctctccagcctttttcagtggccttctcttcactagtgactttaatagactatttcttggttaaaaacgtctgtagctttaattttctttttcaatgtgtatgactgtttgtcttcacgtgtgggtacctatgaaggccagaggagggcattggagtccccctgggactggagttacatgataatgagccaccatgtgggtgctggggagtgaactcaggtcctctggaagagcaaccagtgctcttaaccactgagccgtctctgcagtccctaatctgtgttttaggaatataatcttacatgctttctataaacggatatgacaaaaataaattaacctcaaacaaatcaaaacagcttggtgtagtagtttgtttgtttgtttttttctattgctgtggtcaagaccttgtcaaagccacataggttggaaaggaccctttagcttacaggtgatatcacatcaccaggggaagccaaggcgggagctcaaggcaggcacttggacctgaaggagaggccactgagaaaccaaggaacccgggaccgctggctttcccctgggtgcttgttctgtttgctttcttataccgcacaggaccgcctgcccagggctggtattgcccatagtaagctggggcctttccacatcaattgcctattaggaaaatgcccccacaggcttgtctacggccagatctgatggaggtgttgtctcaattgaggtcttctcttctcagatgactctaactgtgtcaagttgacaaaagactagctaacacatctggtattattcataatagacaaatattgttcatttctacttcttcactttgcaggatgatcaatttgttttctccttacttctaataatctatgttgcctcaaatggaaatctcaaaagaacaaagataagcaggcaaaatttgagaaataacaccattgcatacactagcaagattttgctgaaaggaccctgatatagctgtctcttgtgagactatgccagggcctagcaaacacagaagtagatgctcacagtcagctattggatggatcacagggcccccaatggaggagctagagaaagtacccaaggagctaaagagatctgcaaccctataggtggaacaacgatatgaactaaccagtaccccggagctcttgtctctagctgcatatgtatcaaaagatggcctagtcggccatcactggaaagagagacccattggacttgcaaactttatatgccccagtacaggggaacgccagggccaaaaagggggagtgggtgggtagggcagtgaggggatgggtatgggggacttttgggatagcattggaaatgtaaacgaggaaaatacctaataaaaaattttaaaaaaataaataaaaaaattaaaaaaaagaaaaaaattgagaaatattcagttaagaaacttcaatttttccctccttagacagggtttctctgtataatagctgtgggagtcctggtctttgtagaccagactggcctcaaagtcacagagatccacctgcctctgccccacaagtgctgggattaatggtgtgtgccaccatgcccagcaaacgtgagagttttattgtccctgtaatgttagtgaatgcttctagaatttttgctccagtctattttcctaatgcttttaactatgttgtagtctggggtatatagcggacttatacaccccagctgcttttcttgtgtgttgtgtgcattcatgtgtgtttatgtgtttgtgtgtgcatatatgtggagaccagagaacaactttacaagtgatttttcagtagtcttttactggcctgaagtttatgatgagcttggtcggctggctggcaagcagccacagatccttctgtctctatttctctgtttctctgtttctgggactggaacgtgttttgtttttgagaaagggtatcactatatagttttggctggcttagaactcactctgtagaccagatcatacagatcggtctgaccctgcctcctgactcctgagtgctgggattcaatttgtttaccatcacacctggcaagttttgaagttgtaattgtctaatggacatctgttatagaagactatagttgtaggtaatttatgtattaacttttttatagttcacttaactataatttcaattatgataatgaagatagtctgttttaccacagagttaaattaaaaagtatgtatttttttttatatttttgcatgttcatattgttgtgggaaagttcctcccccccccacttattgcattttgtgggaaaagaaaattaaaatgtatatattattggatggggatgtatacttggtaaagtgtttgtctagtatgcatgaagccctggatttggagcaggaggatcagaagttggaagaagggagggagagagggggacacaaataattgcttctccaaccaaaaaggaatttgatgattaactaacaggaacatggtaggaatggaaagaaattttatggctagatggatagagggggcaagcttgtttttgggtgagagctatttggccttgtttatttgaggttgaatgaaatgtgcgcagaagagttagggaggggagctaagccggctgcacagtgatggtgtgaggatgttagagatactcagtgtcttagtcagggtttctattcctgcacaaacatcatgaccaagaagcaagttggggaggaaagggtttattcggcttacacttccatactgctgttcatcaccaaggaagtcaggactggaactcaagcaggtcaggaagcaggagctgatgcagaggccacggagggatgttacttactgccttgcttcccctggcttgctcagcctgctctcttatagaacccaagactaccagcccagagcactaattgaggaaatgccttacagctggatctcatggagacatttccccaactgaagctcctttctctgtaataactccagctgtgtcaagttgacacaaaactagccagtacactcgggttttagttcatggtgacaagcctgttttgtcaaaagctgagtaaagagggttcagggtttttaatttctaagcctgaagctttgagtaatttgctaggtcttaggtagaagacaaaaaggaaaaacaaacaaatcttttttaaaaatcaaagtattcgaaataactgccaacattttagcaatctttttttctattctggttatcaaaaattttacgacttttcttgaagaaagatcattgcttttggttgataaatgaccttttttataaccaccttcttcccagttctgctatttgaagaaactgggtgacttgttcagtatttcttcccctattctgaatatgggtaatatctttctgttagcactgagagctggattatttgggtctatttagcagttgtgaaagaccctggggttcggaaggaattgggctagaacatgggttgtgtcctttgactttggtcgtagattcttagcaatgagagagaccggaagccatgctttttagccatgatttgatttgggggctggactcttgtttcggaagcttgagtgcccgagttctgagccgtagcaccccagccgtataagcctgtgactagtgctgcaagggaaggatatagagacagggggattgctggggctcactagcctgccagcctagctgaaaaacagtgaggtctgtagagcctgtctggagggactgtgatagagcaggactctcatcttcctctgggctccatctcccacaaattgtactctgacacacaaaataaatttaaaacaaaaatccagtacttggtacctaccttaaaactgttgaatactggccagtggctattttatggttattgctttttagttctgcttacaaccctggtaaaggactattgggtcaaaatggaaagctcaaaagaagttcctttgttgcaagaatcctcctaggcatgggatggggagactgagaggtcggcagggcctgaaatcctagcatttgggaagttgaggcagacaggatggagaattcaatccagccttggctacatagtgaaccttatttccagaagagcctgagggagaaggtgggagaatcgacagactactagttggggagataactaatttttggatatcataagagttagaaagataattacatatcaaagtcctgggggaactgcagtgttgctgtgatctttctcctctttcctttccttccctcctccctccccctctgtatgtatgtacggatgtatgtatcctccccctctgtatgtatgtactgatgtatgtatccattcatccacctatttacccagtgactgaactcaggaccaccgagttaatctccagcactttttaattttattatgagacaaagttttattgggtcaagtctaggctgctgttgacctagcaaacgttatagtttagcttcctgtgttgctataattacagacatgtgttgccacacccatattcagctatgctttttatgtagctcttttctcagtgctgcattctttgtgtgtgtgtgtgtgtgagagagagagacagagacacacagagagagatagtactgaacgaatgactatagcatatgcaacattaattgggaaagttcataactctgggctttcatttgataaatgtggccacgaaggtatttagtatattaagatctttccagttactataaaataaaagataaacagactagaaaaaacactgcagtgtatgtgtattaaattaagtaagattaatatcaaaacattgtaataacttgaaacaaaaccaaaaatcactgaacctagcaaggatgtaaacaggttattttcccaatcagggaaatgaatgaagctcattaattgattcctttaatagattctgagctctcagccagactctgttctatgtactaatacacatggcagatatctgagcagtctggactggtgaaaaagacagaagacatttccccaaaagaaaaatttcacataatgatgatgatattaagaaaataagaggggccaggtgtggtggcatgcacttttaatactagcatgtttgaggcagggacaagtagatctctgtgagtttgaagccagccttgtctatatgagtttcagggcacccaggctacacagtgaaaccctgtctcaaaaaaaaaaaaaaaaaaggcgggggtgggatgggctggagagagagtgcaggaaagtgctgaggaactcaaaactgagtttaaaaccaaccaactaaaccaatctgagtgccatgtgtttgtaatcccagggctgggaaggtggaagcagggcatctctgggactcacagggtttaaggcctgcctagctagaaggctgttttcggtagtccaggcttttaatcccaccactcagaagacagatgcagcagatctctgtgagttccaggacagccagggctacatagagagaccttgtctcaacaaaacaaaaacaacaagaaaaaagatactgtgccagaaacccagtcagccctcccccaggttagtcaggtcatagatcttgcaggagaacctacaactgccactttactaaaccagtacaatccttaattatgttctaaatatttatcctttacccacagattagtgtagttctcacccctcaccaaggaaacgtctctttgcaacagatggagaccacagtggatcaaaatgcagagctctgtggagtccaggccaagtggctcctgtccaccacagccccgcctttaaagctcaggagtcactgcggaggggaggggagtggaggtgggcagagaggctgtaagagtcagatggacaggatgtttgctgtgagagtttgtctcctatcctgaagtctcaacaacatagcttccttaacacaaactgaagagggatgacaccagcagacacgctaacgtgaactgtgggcaactaaggaaggctgagaggaagttttcttcagggagaagcatctctcttgattatctactactaggtagtagccctggaaaacctcctgctcacagaagtaacattatacagagaagactgcatttatatagttaagactatagaggggctggtgagatggctcagcgggtaagagcactgactgctcttctgaaggtcctgagttcaaatccagaaaccacatggtggctcacaaccacctgaatgagatctgacgccttcttctgaaacatctggagacagctacagtgtacttatatatttgggctggagcaagcagggactgagcgagcagagttgactagagcgaacagaggtcctaaaattcaattcccaacaaccacatgaaggctcacaaccatctgtacagctataatgtactcatatacataaaactaaataaataaatctttaaaaatgtatacacacatatgcagtaacaaagaacaaggctaagaatttgaaagcggtagaggcatgggaggagttggagagagacaagagaaggggtaaatgatataattatattataatctcaaacatttaaaaatatatttaccgagctgggtgtggtggcgcatgcctttaatcccagcactcgggaggcagaggcaggcggatttctgagttcgaggccagcctggtctatggagtgagttccaggatcgccagggctacatagagaaaccctgtctcaaaaacaacaacaacaacaacaacaaaaaacccatttaccatatacatcttgaaagataatttctcagtggtttaaaatttattataatttcaaaaaaagtaaaaagatgtgattcagttctaatgtgggaactgtattttttttttttttttttttttggtttttcaagtatagaaaagttcaccaagtttccttaaagtaatatatttttttaagggtggtggtggcataagcctttagtcccagcacttgggaggcaaagacaaggtgggattacccagatctctctgagttctaggccagcctcgtctacaaagtgtcctagcaccaccagagctacacagagaaacctgtcttgaaaacaaacaaacaaacaaacaaaacaaaaaacaaaaaaaaaaaaccaaccaaccagaaaaggggcaataaatggttcagatggaaacttacaattttaagaaattcttcaatgaacagataggttttttttttttatctcttcctggagattgacctgaagacacacagagaaagactggtgcctgttactttgcaggctacttttaattaattagttagagactttttagggtttgagaaagagataatagggtaggaaaatggcttccatctttactgtttgataaatggctgttgggaatataagattgtagttgaaataataggcaggcttttagaaatagacctgaagcagtagctctcatgagtcagcctttgtgtcccttaattttgacaaccttgtgtacaatgcttctcttttaaaggaaccttgaacacaacttcaaaagaagatttgatttttacttctggactgcatatataaggccatcagaatgtcgggagcctctgtgaaggtcgctgttcgagtgaggcccttcaattctcgagagaccagcaaggagtccaagtgcatcattcagatgcaaggcaactcgaccagtgagtacaagttgttttccatacgagcatggcttccttcccttcccttcccttgccgtctcctcctcgctgtgatcagagtatgtgaacatctgtgtcctcaccctttgccaattcagggtgatctgctgagtgtgtcccctcaggactgctgtagcacttaagcatggactgcttatttcattctttgtaatcgagggaccctgaatagctcaggtgttgatccttacttatcaagtttagattctatgagagtgaagctctaagcagtgggcttgactaaattctgaaggaaaatataactttaaagccccaagattgctttctttattttgttaaatataatttgaccttggtaagatgttcttaaaacttattctcttgggctggagagatagctcagaggttaagagcactggctgctcttccagaggtcctgagttcaattcccagcaaccacatggtggctcacaatcatctgtaatggaatcctatgtccttgaggacagtgacagagtactcataaaataaataaataaatctaaattaaaagaaaaacttaacactaccatcttttagtgtgtgctttgtaataaagtagagttactgattttttcagagtggttactgctgcagtctcacagtggacttctgcaagtctctgatcgggataatgggacgtgctgcagcctgtccactgcaacctcacaaagcaggctaaggaaggaagtatgggcttccagtccgggcgtgggatcccagtgtggcaggagaggcttagctgctgaggatgaggtggctggttccagttcgtcaactgtcaggaaacagaaagacatacagacagagattgctccctctctccctcccctccacttctctttctgagtcagggtttctctgtgtagccctggctgttctggaactcactctgtaaatcaggctggcctcaaactcagaggacctgcctgcctctgctccccagcgccaccaccgcccagctcactttctcctttttaaaaaaaagaggagccagtgttcatcagctgtccaagtaccaaaattttttgcttctaaaaactctttaaagtgttgattccccatatagaataattaagttgtcagtcacaactcccaccccttaaattctttcttttagaaaaacttttttttttttttttttttaaagatagggtctgtcttccttctatattccaggttgggctcaacatgttatttagtttaggatgaccttgaacttctgagcctcctgcctcttgtcttctgaatactgagttataggcatgtactgtcgaccatacctggctttgtgcctgtgagcaaggaactctaccagtgagctatatctccagtcctgaaaaggattatgatacaaaataaaaaggatcaaagtgatacttgttataaaatacggttttagaaaaatgcaaggggctgcctggcatcgtggtgtgaacctgtaacctcagcacaagagctcaaggcaagaggctggcaggacagttttggtgctgttgcatgttttttttttttttttttttttgggttctcgagacagggtttctctgtgtagccctggctgtcctggaactcactttgtagaccaagctggcctcgaactccgaaattcgcctgcctctgccgtccaagtgctgagattaaagccatgcgccaccaccgcccagcactgttgcatgtcttaaaacaaagataaaaattagagcttaggtattagctcagtgagtgaagcgtttactgtgaaagcgtaaggacctgagttcgatccccagagccctcatttaaggagctgaatgtgaaggcacattgctggggaggggctgacaagcacgactcagcaagtgtcaggccagctgagagaccctgccttagaacatgaggtgcatggctgcctgagagtaacatctggtagtgacctctgctcctgacatgccttcacacacatgtgcatgtgcacccactcacacacacacacacacacacacacacacacacacacacacaaacacacacacatgtacataagataaagatgaaagctacaaatttaggtttgggaaagggcaaatgaaatagctctgtaatgagacaggtgctgaaatatttaatctcaactaggagcttctaatctgcctttgatcattcagttcccggataaaagacacacacaacctttatatttataataagcctttattagcagtaaggctggatagatatctaccctttatactattaaaatatattcctattgataaccccgtgttttgggctgctcttaattccaatcgactaacccttatggccatgctttcttgacttctaactcatggcgtcttctctcttcctctttctccccttccttgtggtctcctcagacaccaagacctcctacctcagttctgcccagttgtaggctgtaggcatctttattcataatcagaagtaatttgggggcaagtcacatagcgtcacttgggtcatcgagcttagcattacagtatctgctaacagaacaaacctcaacaggccggataaatagataaaggctatttcttaaaaagatttgttttatttgtatgactatgagcacacactgctctccctggggaccttagtttgattccccgtatccatatcagacgacttccaacagcctgtaaattcagtaagagggatctgacacattcatatgcacatatgcccaccccacttgcacgcgagcgcgcgcacacacacacacacacacacacacacaattaaaataataaaaatagaaaataacactgtataaacaaacatataaataaataaaagaaagaaaaggatgtcatagccatatatgttagcagctaaagaaggctgttatgtgctgggcagtggtgttgcacaccttaaatcccagcatttgagaggcagaggcaggtggatttctgagttcgaggccagcctggtctacagagtgagttccaggacagccagggctacacagagaaaccctgtctcgaaaaaccaaaaaaaaaaagaaagaaagaaagaaacaaaacaaaacaaaaaaaggaaggctgttatgttggcaaactggcctgcttgttgatcataggattgcagctccttgcagatggagtgcaacagaggatgccccttccataataatttttacacagtagaaaagcataaagaacactttgaggaatatgtaaaatttgaaagtttagtggtaggtaaccttttttattttagtgacctgtggtcttaagaatcattttccggcacagacaagtattactgccttaaatattttagagtccggaacacaggcaaatggctttgttcagtaatatccatttagctccactttttttttttttttggtctacttagtaaaaaaggaagatgggtcaaaagtaatgatttaacgtttgacattcatgcttaagttatgtgtgtaagtttggagacactgaatgcatacacattccctcagacaaagaggtgggtagagctggttttctcatagggttgaattgtaatgttttgctttgtcttttatagaattctgtcttgctgttgggtaaatctgcttgtttatctgtctcttttgactagaatcttaaaatttttattctttaatgtgtaagctcagtagaatagaagtagttttgtgcatttatttatttatttattttgattgcctacattgcattttagaagactttcccattcatacatatgcatttctaaaccaaatgatggtatctcgacagacacagagaatgttccaagttgactgaaaatctgggcatgaccactgtggggatttgagaatggctgatgtagaaagtaatgcttttgtttgatcagtttgcttttttgagactggccttactctatagcctaggctcgtctcatacccatggttattttacttcagtctctcgagtgttgggtttacaattgggagccactacacactagtaggcaggaatgcactcacatctgtgtgatttttctgttatgaactaatcagtcacgcagaggaagaggttgggtactctgtgcctgtgcacgcagaagccaggctctgtgtgtccacggcacagtcttgctccacagcctcctcctgaaatcttcctgccatggtagtaagagaatgtccaggtcctatcctgcactgtcagggccttctctttcctcagtactgtcaagggggtgggggtgggggtgggggggagactgggatcttgaaggccacctttcttgtgcacaagcttatgtgttggcgactggctttgtggtggacctttcccctctggtccctcttcagctcttccagtttccttatttactgatctgcctgcctgcctgcctgcctgcctgcctgcctgcctatcactgtgtgtaacagacgtgtatcacactgtgggtgtggggtcagagagcaactctgtggatgcttttttccttccactcttgtgggttctggagcttgagcggaggccatcaggcttccatggacaagaactgttactcactgggccattttgctggccctgtacccctatatttatgtnnnnnnnnnnnnnnnnnnnnnnnnnnnnnnnnnnnnnnnnnnnnnnnnnnnnnnnnnnnnnnnnnnnnnnnnnnnnnnnnnnnnnnnnnnnnnnnnnnnnnnnnnnnnnnnnnnnnnnnnnnnncagcgtctcttgtagcccaggctgacctctaaccccttctgttgcacctcctgaaggctgatggtagaggcatgcattagtctgtttggtatatgaggtgatgtgctttaggcaagagctttgctaactgagggacatccttgacccctggtatttttttgttttgttatattttcattttgcctaaaaattcttcagcatatcatgttgagacatatttatatgtgataaaaataatactagtttttggtaaattagaagtatttcttctgtcttctgtttctatttatctaattgtttccaagagttttatgaacacaatttgatagaatattagtgttggaacctgttgttttggtgtgtgtgtgtgtggtctatcttgtgtttatttagaagtgcctgctgtggagttctatttatagccctgcattgaggaagagagagatgatgtatttttttggctgcttctacaaacaaaagaggagtctttggatttaactgtcactttgcagcagtaattgttgtcagtgttgtaattattttctatattaggaaataatgggtagtgttagaatagttagccgatagatactattgttacagatatattcctctctaggtgttataggtatttatatatattaattatttatgtgtgtagacagcttagggaggtgattctttctcccttgtgggtcccaaggatcaatcttgggtcattaggcttcgtagcaaacacttttaccactgagcatctttcggccttattcacccatttctcagcagatcagagcgagtagatgcatagcttactctttcaggtttctttagtctgcctgtgatgatcctcctcatgtctctgctgtaggcctcgcctgtaggacacagtgctgacgtacaggtttttactttgcacagtgctctcgtaaagttggacacgttctgaggttgtgtttcttatctgttgtaccttcaataagaaggattcactaaatagaatttgtcttatctttctctttagtcataattgataaggagagagagagggagagggagagagagagagagaaccttttttgttttgttttgttttgtttttctagaccatgctggtctagaactcatagatatctggctgccttttttttttttttttttcccttcctatttctgttcttaaaggtgatatctacagccatatgactgggctgtagtggtgcacacctttgatccagcaccagaggcaggcatatgtgcatgagtttgaggccagcctggcctacagagctagttatagcacagtccaagctacacaaagaaaccctgtctctaaaataccaagacaaaaaaacaagaatagaaatagggctcttttattttctccattttcagtaacaataacatagtttgtacaatggttttcctttatctaatgaaactgttgaagtggtctgtcatttaatagtctgttggatacctttcctgtttcttgaatattcttcaagaccatgatttcatccaggcttagacctgtaaggttgaggcaagagatctggattttcaggtcaggctgggctacttaataagtgtgaggccagtcccagctttgcaatgagacactgtcagaaaacaaaacagtgggattccaaagctagtaggatagctcaggggtagaccatgtgctttgcctgcaccaagtcactcccgtccaaacccgggtgcctcatggtttcagtagctcgtgttctttgtgcttatgatcagtgtttcagttgtcactgtttatttcagacttttgagtctcagggttctcctttgttaaatgggaatcctgaggttgaggtagctcaccgatatagccactgcataccatgtgagacagaggcttcagtttccagaatcagtaagtggggcaaagctgttgctttccaaccatctaacccaggaccatttataaggatcaaatacaatgatatatacttgtagaaggatatttgaaaaataattttgagtcgggcgtggtggcgcacgcctttaatcccagcactcggggaggcagaggcaggtggatttctgagttcgagaccagcctggtctacaaagtgagttccaggacagccagggctacacagagaaatcctgtcgaaaaaacaaaaaaaaaatgttgtggttattcttagtaccaaagttatttttagtcagaggtttggtttttggggggtttttttttgcatttattttattttttgtgtgtatgtctgtgcgtttgtgcacttgtgtggcggtcagagacaccttgtgggtcatttctctttttactttgtggattccaggggttgaactcataaggctcagcaggaagcctacttactggtcgagccattgtgctagctaggaatgttaagtttaaagtcagaaataattgtgtataagttagatgagactttttctgtgtatatttggaactgcttttcatccatccacttattcaaatatattttaccctgtgtgtgcgcacacgcgcgcgagagggacaaaaagacagagacaaagagagacagagactgtgtgtgtgtgtgtgtgtgtgtgtgtgtgtgtgtgtgtgtgtgtgtgtgtgtgtggtggtggtggctgggggcacatgtctgctgtgccatggtgcacatgtggagaacgaccatggagtgtcagctttatcttcttgtggctcatggtcctggagatccagctcaggtagtcaggcttacacaggaggtgctcatatctgctgagctttcttgctggcctaagaactgcattaaaaaatttaaattgcattaattatttattgtgtgtgttggggagggcagtatttgtgccacagtgcacatgtggagatcagagcacaacttttggaagttgattctcttctttctccatgtgcgttctgggaatcaagaatgggtcatcaggcttggtggtaaatgcctgtgcttcttactggcccgaaaactgattttattatatataagcttttaaactgcttacattgttttcataccaaaacagctatgcaagagacagctgggggctggagaggtagctcagcagttaagggcacttgttgctcttgcagaggactgggttcatttcctatcattcactgcggtgggtgactcataaccatccaatactctggatctagggagatccctcaccctcttctggcctccatgggaaatctctttttgccttggctctcctggaaaacctatgtaaagtagggtgggctgagacttaacctgcctgcctctgccttcggagtgctgggattaaaagtgtgtgtccctatgccctcccaacaataagatctgctaggaaacctgaccttggttttctgctgtccattttaaagttaatttttaaatattcatgccagtagcaaggtgctgtgattgcgtttggtaacccagtgagatctgaaatggagggtgagctagcaagctggtctgctgcttctgtttgttagggagggcaggccttcagtggttgctctgtcaaggattgtgcgttacagtaggctaaatactgttgttcacagatgtattgttcagtaatgtgtatgatgtgggtataagcaggaaatattcagcaagcagaaccttttagagtttttggtttattttagagataaaagtaattgaagtagtatgatgcccattggaaagcaccggggaggggcatctttataagggagggaggagacgggaaaggttgggggtttctcagaagccctttgttttggcagagcagagaatgcagtaaggcaatgattctggggttggttctccgccttctgctttgttctcttgactctgctgtcatcttgtttgccaggctccttggcctttgtggtttgtttatgtgtgtgcacatgcttatgtttgtggtgcctgttgaggccacggggtgtcagatccctggggtaagagttacaagtgttattgaactgcccgacgtgggtgctgggatctgaactctaggccttagaattgagcagcaagtgttccttactgctgagctgtctgctgacccacactacacctttttatgttgattctggtgagtaactctgtatgtggctagcactttcacctctcagccatctccctggccccagctttatctcctaaaattgttcaatatttgcttaggaagatcagctgtttgttttggtgggggagtgtaagatctcactgtgtcgttgagtctggcttcacctttttatcttcctaccttgatcccctgagccaccatatctagcttttagaattaaaaaaaaattgtataaagcaagtgtgttctaaattttgtcctgttttatttgtttgcctgcatgtctggtctcctgatgcctgtggaggccagaagagaggtcagatctcccagaactggattcacaggaggttgtgagctgccctgtgggcgactgcaatgaaccagagtcctttggaaaagcagtctctctagtcgcaaggggttggttggtttgtgtgtttgtttgtttgtttttcaagacagggtttctctgtgtagccctggctgtcctggaactcactctgtagaccaggctggcctcgaattcagaaatcggcctgcttctgcctcccgagggctgggattaaaggtgtgcaccaccatgcctgtctagtctcatgttttgttgttttaaagaatgaccatatggtgacattggagagttgtggcttgttttcttttcttttcatatcccccctttgatagagtctttttatatagccctggctgtcctgctgttctagaactcactaggtaaacaaagctcaccttgaactcttcctttagaatgctggggttgagatgttgccaccactcattcattcatatatatatatatatacatatacacacacacacacacacacacacacacacactgtttgggtttgttttttttaaatcacattagggatgtagtttgttatatttaaatggttaaagcactttttggttataagtattttattcaaatctactttatgttttctgcccttttactgtattggcagaagactctaaaaggttatggctgtaggttttgatttcatggttttgaaatataaatggtggatataatattttattttgtgcccttttcccttaatttttgacgtaggattctttcagcagatgaaggctactctggtatcactgggctttttgctttgtgtttttgaggcagagtcatactgtgcagccttagaagtccacaaataatcatcctcctgcctcagcctcgtgagtgggatgattacaggcacgagccaccatgcctagtccgtcacgaggattgtaacaaacccagacatcctgcttttgagagaagttaatataaagttgcagagctcccacgctgatatgttgattatagctgcaggcagagccttggtagtttgtcgacagcagtgtaattactgcattagtgactttgagatattagataaacaaatttattctgcagaataaaaagggctttaaatacaaatcttcttttaacagccttgttttctagggttctgtaatgaaaacattttgtatatttatgctccccacagttgtggggaggagtaaagtatttagcagactttggaaggctaagacttttacattacttagtttttgtgtgagtgtaaacattgcacacacacacacacaccatggtgtttcatggaggtcagggagtaagggagtcagctctcttcttccatcgtggaggacacagggaccaaaccaaggggttttgtttgtttgttttgtttgatttacttattcagacacaccagaagggggcatcagattctattacagatggttgtgagccaccctgtggttgctgggaattgcactaaagacctttggaattgctcttaaccactgagccatctcttcagcacccttcccccacaaccccaggttgtctcttgatggcaagcatctttccctactgagccatcttgtcagtcctctaagttttagcttttaaaagaatatatatatatatatatatatttttttttttttaatttatgtgtatgtgtgtgtacctgtgtaagtttatttgtgtaggagcccagagaatccagcagttgtcagactctggggaatgggaattagaggtggttgtggtcctttgcaagagtggtaagcacctaactgctgagccatctctccagccccttctgaaggtaatctttactggaagtgattgcaaggagagcaggattaactctggctcattactaaactacagtcaggcctttgagacacgtgtgatgactgctttaacgatgttcatctatagtgtagataatgacaccatcctgctcttttctggccttcttaaggtagacagtgttgacagtggcatgagaattaggagtttgaacacaaggcaaagtgaagaatttctggatgaagggtcattgattcgggaagaaagatacattgagacctcgggagttgtagctgctgttcagatgtctaaaggaggacttagagagcagcctgcgaataagacttaacttggtggtgactgcaagtgtgcaggagggggaggcagaaggaacacaacttttaggtcagcctgggctatgagagcttggccctacagttccccaagtgtgtagtacatacatatgtgcatattacatgcttttaattaggaaatgttttaatattcaagataatacacatataaatacaaagaataaaatataaaaaaaaataaactaaatctaaaaagaagggtgggaaggcaggctcgttggttttgagtatgcactgctctagcagaaggtttgagtttggttcttagtatctacactgggtgcctcacagctgcctgcttgtaactccacttgcaagggatcagacaccctttactggactcaggtccccgaactcacattccacatacccctatagacagacagacagacagacacgcgcgcgcgcacacacacctgaaagacaatccaaaaaaaaatatggtggctcagtggttaagaggacttccagaggacctgggtttgatttccagtacccagagggcggttcaccccatctgtaacttcagctctaaggcacctaacactcatcttttgccctcggccaccaggcatgtaaatggtgcataaacataaatacaggcaaaactcccatacaagtttaaacattttttataaattgtatagatagatacagaacttaagaagtagaacataggggccagagacgctgcccaatggttaagagcactggctgcttttccacaggaccggcactcaattcccagcccccattctgtggtgaacaggcatctgtaactgtggttccaggggatctgatgcccttccagccttttaggcatgaggcatatgcaaagtgcatcgtcacacatgcaagcaaaacacccagacacataaagttacattatttgtaaaaagaagtaggaattaccatgtcttctgtattttctgataactcttgcaatgatgttgacttttgtactattttattcttgcctgcactgtgcagacaaacaaacaagaaacccagcttggttgtattactctaagaagcttcaaagatggacagaaagcttgttaaggaggaagaaacggattttgtgtgaacttgctgtattctgatatagattgtttttgttgttttccctcagggaaatgacaagtcaaggtgtaggcactaagaattggttcttcatgttctgatagaactgtaactgaacaaatacggcttaagtgtgtgaaacagccaatgtctagttgtcagaggtgtttattaaccgtctttcgagtggtaaaggctgactcgagggccatgcctccatctcatcattcttgctgtttttttagcttggactcttaatttttgttttcttggtagtttgttgtcttattgttaaaacagagaaactttaggcgaataaagagagttttaaacaacacctatggtttaatttagggggtagcaatatgcatatagccatatacatatacaaatatataaaatgccctactgtttcaacttggtaatcttgatatgtgcaaagctaattgtgacagctctgcagagtcaaattctaaatctgccgctagctatttctgtggcctaaagaatattgaattttctgtgatggttttttaaaaaatgggatgagaaaacatttgcctcattgagtgcttaggaggataaaacagttgctaaacacaatactatgggttggagtaattacaccttcaaatgctggctgatatgttgtactcttttgttagactttgattagattaccatttatttgtagggagatgttctttctagaatcatgtcctctggtcacatgattatgtgtaatgtgagccttattaatactctgtcagcatttgaggttggaacataagtatgtggctatacccagaggaatccagcaagagggggagctaagctccatagcaacggttgctatttgtgtccgctacaccagctgcccaaaacacatttactttttaatcctgttttcactgatagtttgagatgtagccttgcctcagcaaagtgagttggttgagttgtccagtcttagagtggattttatgatcacatgtttgggagtgtctgtctcgtgaaatatgagacgataaagctttgtgtatgagaaaggaaggagtaagcttcggcattcagtcagttgcttccatgtggtacggtagcgttagttatgtgaaaagtcattttcaatgtgtagtaagatttatgatctattagtgctctgtggttttgcataaacacctatgcacacatatacatgtaatagattacatgttgtctactgtggattttagaaacccaaacttggctatgctttttttttttttttcattacaaaatgcttttttgaagtagatagcaaacatttcacaaagactttatttctaacatgttgaaatatttcataccttatgacatgctctgaaatagaaactgctaagttttagctgctaacttagcaagggattcagttctggaagatttattgagaagctgttacacactaggctctgtgctgaatactggtaacacccagatgagtgttgtggtgtgattgtgtgtgtgtgtgtgtgtgtgtgtgtgtgtgtgtgcgcgtccagtataaattgccctcttaaacaatgataaccttattattattattttttttggattgccctgttaagattcaatagtataaatgtcctgtttgggatgctttaaacatatagtatattatattgagctaatgaacttgatggacttaacataattaaatatctttattctgtaggtattattaacccaaagaacccaaaggaagcaccaaagtccttcagctttgactactcctactggtcccacacctcggtgagtctactgcctcccttttccttctttggccttttcttacccttaattgttccaagatccaattctaattttctgattgtggtcagggatgagttcaatgtgtgtgtttgagggagaggtgttgggtttttgttgttgttgttgtttggtttttgtttttaaagacagaatctcattgcccacattggcattgaactcactatatatcctaggctaacttcaaccttggggtagtattcctgacttaccatctcaactgctggaattacaggcatgggctacaacacctagctaataaattcccagttcaggagttcatttaaaaaattatttgttcattcatttatttgtgtgtgtgtgtgtgtgtgaggggtgcatgtgttcacatatggaagctaagaggttggtatctggtgccctcctctgtcactttccaccatagtgagccaggatttctctgaacctgcagctcaccgactggctagcctgtctggtcagtgatgcttaggatcccgctgactgcttcctagcgctagggttaaagcacacgctactgtagctttatgtggttgctggggttctaaacttaggcttttgtgtttgcacagaaccactttaccaactgagccacatccccaaccccttaatctatcttaattgtaatttttaaagacagttgttttgaagccctggtgtggtggcatatacctttagacccagcagtcaggaggcagaggcaggtggatttctgagttcaagggttgcctggtctacagatcgagttccaggccagcgggagctacacagtgaaactgtctcaaaaaacaaaaactaaaactaaaaagaaaaaatgagacagggtctcacttggccttgaattcctcaccttccttgcctcctccttcacagtgatgaaattacaactgcacccagccatgaatttagttttgatatagagaatactacctaaagaagaaagtatttactttaatcaagtattttgattcttccctgacacctttagtcaatgaagaaccaacacatcttgctgactttaaagactgcttcttctcttctcttctcttctcttctcttctcttctcttctcttctcttctcttctcttctcttctcttctcttctcttctctttttgttttttctagacagggtttctctgtgtagccctggctgtcctggaactcactctgtagaccaggctggccttgaactcagaaatccgcctgcctctgcctcccaagtgctgggattaaaggcgtgtgccaccaccacccagctaaagactgcttcttcacttgagcttacttccatttctgtgcttctgtgtcttaggcattttaactttttcctgttctttgaggagagatgttccaactgtccagagcctaattatcaaggaaagggttgagggaggaattggaaatgctctcccccaaagttgtatttattaaaaacagccacactctttagagtgagtttatatgtgagtgagcctgacctctgggctgctgttctggttttctactggagagagtcgtggagctctaacctctacagtgtcttctgtatgtctgtataaaatggaggggggggaaagaaggttcttaaaaatgtgtaacatagcttaaatgactagtctgattccaaacaatttttaaaatatggaagcagtcaaatgtaggacagaatattagtaacatgccataacttttttccctaatctttacagcctgaagatccctgttttgcatcgcagaatcgtgtgtacaatgacattggaaaggaaatgctcttacatgcctttgaaggttataatgtctgtatctttgcctatgggcagactggtgctgggaaatcctacacgatgatggggaaacaagaagagagccaagctggaatcatcccacaggtaaagaaccgagtgttagcatctgtgcccatcagtactttccatctcagattgctttttacttagtaaaaacatattcagagcctctgatatgcaaggccctaaggtggatgacccgtctgcttccctcaaagtgctcactaccaagagggaagattaacaggtacacacatagactttaagatggggaagttaatgttttctaagacattgttgtttttgcactgccctatatcctatcttttagtgttctcaggttttttcttaaagctttttttctgaatgttggacactcaggagagtgttggtctaaagaatgtgcttttatttccttttgttgttgttgtcctgaggatagaatccaagctacaacccagttctgttcctttattatttatttgtgtttgtgtgctttcacatccagtttatggggttgtgggatttctgcccagggctttgaacatggtaggcaagcactttaccaactgagctccacaccttatattctctttagactgtaagttttgatagtgataaataatgttggagctaagtctttggtttttgcttgcttttcttgccctttgaaacagttttactatttagctctggctgtcctagaactcactaagtaaagcaggctggcctagaactcacagagaaccccctgcttctgtctccaaagtactaggattgaaggtatgcaccaccacatgttggcgttgcagttaagtctttaaccataagactcattttggtgctcattttgagtcactgttattgctgtagtgatattagttacgtgagtacagtatgaaaaatcagatttggataaatgggggtttcttcctaaggaaattatcagttttctatcgttggaggagaataacaattaggagcctagcagagtatataacatttttatttaaaatattgtttgaagtgaatgacatatccatttagagagaaaaaagaaagaatatcttattaactaacccacctaaccctgtggataatgcattgtgtctgatctgggctgttcacagtttgtttctttctgctttcttagttgtgtgaagaactctttgagaagatcaatgacaattgtaatgaagaaatgtcttactctgtagaggtgagtatagctgttactgaaaccaaagacttttgtattcctcttcctctattcccaccccctcccccttgtgtacagggtctcttaactcagtcctggtctcagtgtatcaatgtaggtgaaattcactatgtagaaccagctggcctcaaactcacaaagatctgcctgcctctgcctactgagtgctaagattgtaaatatgtgctaccatgtccagccttcctctattatttctttaaaatgtcattaattttttatctatctatctatctatctatctatctatctatctatctatctatctatctatcgtgtgtattcatgtaggtgcatgtatatacaataaagtaccatgatataggaatggaagttggttgccagagttgattctctcctttcactaagggacctcatgccatctgctggcctcttcgagcaattgcactctgagggatatatacaagcagatatacaaacatacatagagtaaaaatctgaaaatcccattttaaaaacttccatgataaaacaaaaacaaaaacaaaaacttccatgatgtgtatgtacattttacactgttattttattagaatacaataaaatatataatgtgtttcattatattttcatattcttatataatgcatcttgatcatattcttatcaccctttcttttctttcttccactttcactgaacctctattttttaattagtccttccttcatgggggagggtgtgacccaatgagtacaggaacctgggtaagggattatttacagaggcacgggcaatttaccagcaacctcattgctgaagaaaatgtctcttttccctcagcaacccttgagcatatcctcagggagggatggagcctcacgggccctaccctctagcagctcaactgcctgtgagttctcagagagggatggagatttgtgaactccttcccttccatttcagatgctgacagtacagtcttgtgcaggtcatcacagaccttgtgagtgcatgagtgcaggggccaggccatgcccagaagccagagttgtacagcattgtgccccttcctccagttcttccgtccttctgacctctctcccactgtgttcccccagccttggatggggtgatgcggatgctcacttggggctgagcattcagcagctgcttagatttgcacaaagttcatttggctgatcttatataaccaacaatttgcctttctacttatgaggaataactactcacacttgcagccagcgtactgttttttgtggaaatcctgatgatttgatgagcaagggattagaggaaagggaagtgactggacgagtccctgcttcagattaggaaattacagcatggttccttcaccaccaccatagccgtgtcctattggtgggacaggaatgcatggagtgtatcttctgagccttcctaagtcttccttaagccattgtcctggtggatccattatccatagttaatagcactgtggtcaatcttaaaagatcagttactgggcaggggagacagctcagttcaaagtgtttgttgtaaagaagccaggctggtggtgtgaacgtggaatcccagctccaagcaggcaggcatgcccacttccctgctgctctcttacccgatgctctatgccagtgagagaccctattaaaaaaataaaaaagaaagaggtgtatggtatctgaggaaggacactcaagatgagatttaccgttagcatgcacaagcatgtccacatgtgtgcccatttaaacacatgcaaagcaaaagaattagttgttgttttctctgcaaacagagaaaacaatttaattttaattaaattggttttaattctgataaaaataattaatttccggggctggctcagcagttaagggcactggctgctcttctagaggacccaggttcaactcgaagcacccacatggcagctcacaactgtctgtatctctggttccaggggatctgacaccctcacagacatacatacaggcaaaacaccaatgcatataaaataagtaaatttaaaaaaagagaaagagagatagaaattaattaattaattaatttccaggctcttggaataacctcactttaagccttaatactgatggtaatatggatttttaaaatgccaataaagctgggtgagatggtacattcctgtaatcttagcacctgaacagtaaggcaggaggattgcaagtttgaggcctggtttagctataaagaccctgcttcaaaagagaggggtactaataaagttctactaaaaatatattttctgcctaagaaaaatagccatatgtatacctgtttgcctctttcttcttgagaaagactatttctaacccatgcgacatgatatttgcacacattgccagtagaataaaggacccggggctatggtgttgtgacctagaattgtacagcgtttgagaatttgctttaaaaaaaaagatttatttatttattatatgtaagtacactgtagctgttttcagacacaccagaagagggcatcagatctcattatggatggctgtgagccaccatgtggtagctgagatttgaactcaggacctccggaagagcagtcagtgctgttaattgctgagccaactttccagccctgagaatttgcttttaaatgagacagaatctcctcttttagtttaggctggctttgaaggcatgttttttctgtctctgcctcctcaatactgggttttcaaggtctatatcactatgtttaactttgaaaaagtgtttaatgtgtatgtatcttttctagatcctttgatttactttaataaaatgttcctaggtgagctacatggaaatttactgtgagagagtacgagatttactgaatcccaaaaacaagggtaacttgcgtgtgcgtgaacacccgcttcttggaccctatgtggaggatctgtccaagctggcggtcacctcctacactgacatcgctgacctgatggatgctgggaacaaagccaggtatggtggaaacagactagaggctgatctaataaactaataaatacacagactagagctaagcctttggcacattttgagattctttcattttcaggtgaggattgaagtaacatttgtagccatgaaagttgccttagctgtagagccttgagtctgggtatgctggggaggtagaggctgcagtatattaagtagctctcttcattaaaatgctgccttgtggaaacaggtcagagctttggttaactcttaggtattgattaagttatggtaaaatgttagctgtaatatctagatgaggtaactgattctagaataaacgagccagttaagaataaaaattaagccgggtgtggtggcgcacgcctttaatcccagcacttgggaggcagaggcaggcggatttgtgagttcaaggccagcctggtctataaagtgagttccaagacagccagggctatacagagaaaccctgtctcgaaaacccaaaaaaaaaaaaaaaaaaagaataaaaactaaatgctctggtgattactcactcaagggatagctggggtatgagaagtgattctgatgcgcgttgccttttgagttgtggggaaacgtggtgggcacacaacgaagacaacagttagagcagttctgtaagtgacagtccttcagtcgcagtaagggtaaggtgactgtcctgcatggttgtatagagcctgctgtccattgtaactctgatggaagaattctcttgtcaaatggtcaccttcggtttgtttaggactgtggcagctaccaacatgaatgagacaagcagccgttctcacgctgtgttcaccattgtctttacccagaagaaacaggatcctgagacgaacctttctactgagaaggtgggagactgcggattgctgaggttgtgaagggattctgtggagagcgtccttttattcgttgcagtttggacaggatcagtgttgttctctcccttaaagggagtggcttttcattctactcaccatttatctcatgccagttgctactgtgctgggtctgctgtgcagctgaaagatagaaaacacagttaagaaaatgtaaaactttgggaaaatagtgtattttatgcaaatcagttaagtgggtctgttggggaaaaataccttttcttcttgactagaccacagtaatgttctttgataaagctgctgcaatgatgtctgcaggtgaataggcaggcagagtattcattcctgggaaataactctggacccactctaatttgtttaagtacctttctttgcttgcttgtttgtttttgttactgagacctgaacttgagcctattgcagggtgggcaggcactgctactaagccattcctagcccctgatttccctggtcgctgccgggctttctgatatcagggacagaggcacatcaggcatgctaggcaaactctctccggccatgttgattgttaatttctcacttcattagtggttaaatattatggagcttggaatgaaattgcatgctctgagtcatggctttgctactttttagttacataacctttagcaaattaccttactcctcgtgcctctaatccctcccttctgtgacaactggagagagttgttaaagggattaaatactaatgtaggttaagtgcatataacagtgtctggcaccaaggagccaatcagttaattttgttgttgaaactaataaaaataattatgatgctgaaacttaaaatgtgaggtttctttcagctggggtagggtgggttggggtgcttggaattgaatataaggtctcactcctgttagataagtgctgtaccactatgctgtgaatctagacttactgtactagtagttagacaggattctctgccttttgccttgtaaggtgagtgctttctgatagtgttgtcacgaaaagctaggatcattttatgcttagaaactatgttttgtttcagctaattgaacctagggtatcccttctagatatttttgtctaaactgtcctgaaatttttttaacaatttcattgaggaattataaaggtgtataataacctacacatattcacagtataaaatttgaccatttttgatgaatgcttacatatgcaaaataataagcatactgagaatttctgttactccaaaaagttgccctgtgattttgtagtatttctacaaattttgtagtattttttcttctacatcatccatacagttcttaatatgcttttgtcactatagattagtttagatctagtatagttttatgtacattaatgtatgtatgtatgtatgtatgttgtatgtattgctcgattccttttgctcataatgattttgatatcagccgggcgtggtggtgcacgcctttgatcccagcactcaggaggcagaggcaggtggatttctgagttcgaggccagcctggtctacaaagtgagttcgaggacagccagggctacacagagaaaccctgtctcaaaaaaaaaaaaatgattttggtatcgtttgtgttatgtcactagttggttccttttcattgcttgcaaatactccattatttaattttgccttgtaatttggccctatgagatttgtgtacatacatgtgtgtggagatttgttttgtttcttgtttttctgagtacgtgtttcattctttagtccaggttgaccttgaactcactcagcttcatgattctcttgccccccaagtattggggttacaggttatacacaccatgcccagctggcaagtggatttttatttatattggtgaatacttaagaatagagttgaatcttgtggcagatgtgtgtttagattctggtttgggggtttgttttaagttagtttcgttttgtctttagagtcagggtctattatgtagccctggccgtcctggaactcattgtgtnnnnnnnnnnnnnnnnnnnntgtcagttagtaggcttcatgtgtgtgtctgtggatgtgttgtgtgtggatgcacatgcatatacacacagaggtcaatgtgcagtaagacacagactcaccacgtacccttggctggcctgaaacgtgctgtggagacagcctaacctaggattcacagacacccatctgtctatgtttcctgggtataaggactactgttggtttgttttttgttaggtcttggactcctctgagctcagggatggtcctcttgcctctgcctcctgaggtgcattagtatcacagtcatgtgctaccacacccagctatcttgtttactttttaatcttcatgttcttactctttacctaggtcagtaaaatcagcttggtggatctagcaggaagtgaacgggctgattcaactggtgccaaaggaactcgattaaaggtacttattttagtaagatggtctagtcagtcagtgtttgtatcatgaggctaaactatggctaggggctgagtctacatattgtctagttttacaaataaaattctatcaagagatagctgtgtcttttaatttatatattgcttatagtggcatttactatattatttactttgatacaggttctcaggcagtcctgtctggaccttaacatgtagctagaatgagtttgaactctgtacctcctgcctccctctgctaccatgtctcgtctgtggtcctggtgctttgtgtgggctggtcaagcacactacctaccaactgagctgtatccctagcccccaagactgtttttatgctgcagtggcagaattgcaccagagactatgtgacatacaaacctaatttttaaatttaatttttaatggaaaaaaatcccaactattgatctataatttcaataaatgattagttagataataaaatacaaaaggctttatggtcaagagtgagggttatattatatgtggagaaatgggcagaatctggccagatgggagagacagtaaggagaataggatctacaagctacagacgtaagagcaagtctgaactggagatgctgtttaacaagagcaggccttttgtgttggtagctgtgggaggaaggcttgcttctgtgaggtcctgcagcataagcatcttgaaggcagagaggtttggggagatgggtgagtgtcaccaagcgagggagagnnnnnnnnnnnnnnnnnnnnatttttatttatattggtgaatacttaagaatagaattgaatcttgtggcagatgtgtgtttagattctggtttgggggtttgttttaagttagtttcgttttgtcttttgagtcagggtctattatgtagccctggctgtcctggaactcattgtgtagaccaggctggccttgaactcacagagatcttcctgcatctgtctcctgagtgctgatattaaaggcatacttagcttcttaagaaaccactaaacaattttcagaataataagttgcccccagaagtagataagagctccatgttcagtgcttcatgtttcatatgtcagttagtaggcttcatgtgtgtgtctgtggatgtgttgtgtgtggatgcacatgcatatacacacagaagtcaatgtggagtaagacagactcaccacgtacccttggctggcctgaaacgtgctgtggagacagcctgacctaggattcacagacacccatctgtctatgcttcctgggtataaggactactgttggtttgttttttattaggtcttggactcctctgagctcagggatggtcctcttgcctctgcctcctgaggtgcattagtatcacagccatgtgctaccacacccaactatcttgtttactttttaatcttcatgttcttgctctttacctaggtcagtaaaatcagcttggtggatctagcaggaagtgaacgggctgattcaactggtgccaaaggaactcgattaaaggtacttattttagtaagatggtctagtcagtcagtgtttgtatcatgaggctaaactatggctaggggctgagtctacatattgtctagttttacaaataaaattctatcaagagatagctgtgtcttttaatttatatattgcttatagtggcatttactatattatttactttgatacaggttctcaggcaggcctgtctggaccttaacatgtagctagaatgagtttgaactctgaacctcttgcctccctctgctaccatgtctcgtatgtggtcctccttctgctaccatgtctcgtatgtggtcctccctctgctaccatgtctcgtatgtggtcctccctctgctaccatgtctcgtatgtggtcctccctctgctaccatgtctcgtatgtggtcctccctctgctaccatgtctcatatgtggtcctccctctgctaccatgtctcgtatgtggtcctccctctgctaccatgtctcgtctgtggtcctggtgctttgtgtgggctggtcaagcacactacctaccaactgagctgtatccctagcccccaagactgtttttatgctgcagtggcagaattgcaccagagactatgtgacatacaaatctaatttttaaatttaatttttagtggaaaaaaaatcccaattattgatctataatttcaataaatgattagttagataataaaatacaaaaggctttatggtcaagagtgagggttatattatatgtggagaaatgggcagaatctggccagatgggagagacagtaaggagaataggatctacaagctacagacgtaagagcaagtctgaactggagatgctgtttagcaagggcaggccttttgtgttggtagctgtgggaggaaggcttgcttctgtgaggtcctgcagcataagcatcttgaaggcagagaggtttgggagatgggtgagtgtcaccaagcgaggagaggaaagaccgaaggctgcaggcgtcgttagaacttatgttgtagaaagcagagacgctcagcttgtagcattatgagtggtgtgcagtagtagaaattctttgttgtaactcttccgtgtttctgtttatcttaggaaggtgcaaatatcaataagtcccttacaactttgggcaaagtcatttcggccttggcagaggtggtaagtttcctgtttcccgttaagaggaggtgtgggctcggcaggtgagcttgttgatcccgtgcttctctgcgaagggcgcacaggttttggccttgttatgtgatttagattttttccaggtaggactagagtatgacgtaatttgtactgaaaggagaatgatagcaactgtagctgtctgacttcacacctcataataaccaaacgtgtctttgtaggttttccctcagagtctccagttagagacgtagttctggagggttttgaacaatgtggctttggggaatgatgttggtttagaaaccaggaatacacatccttaaagcacagtcaggtgtcacttaatgagacgagtgcattcttagaaacgcgccattcactgactctgtccttgtagtaagtaaacagaatacactaaaacagtaggggaaatagcgatacgtcggtgagtctcaatcaccagttgcggttgattgagtgcggtgtgtcccatatgactggcaggataggtttgtgtccacctgcatttctacaaccagtgcattgtgttacagtgccactgccagaaggcaacaccagcactgtaagtcttcagtgccatcataatcttaacataccatcattgtttctgcagtgcatgtgtacataaaatggtctttttttttttttgcagtactgacacattaaaactaaaccaaaatttgctggtcttcattatttaaatttaagacccaaggtagtttttgtatgctctaatttaattggtcctttgaatcactaaaaagaactaaacctcttcttgtccctagaaagtgttctgatttccatttattctcgaggcttatcccatgttccttttctctcctttaaatgctttcgtttgcaggataactgcacaagcaaggtacggtggggatggtcacgctgaactagcttagtgataagctctatggctttaatactttcagaggataaatagggcatgagttagaatagaaccttccaaaaggtttttctttttctttttcttttttttttttttggctttggaatttagaatgattatttagggtggctgtgaatcatgaggcttcacaccagaattaattaaggaacacaaagtactttggagaagggataaaaataaaggaacaagagagaaatttaaggaagcgtttacatggtgtcgggatgtttatcccactgatctgtgtcagtgtctccatagctctgtaagccacccaagagtagtaagtaacatttctttagagccctgttctaaagcatagctgatttgttgaaattattggaaacaagtaagataaaacaagtttatatattattaatatatgtaaattgttttacatatttcccaccatagacgtttatgagtaatttaaaacattttttcctactatttggttatactaagataaagtaaaggctatagaattaatttagggctggtgagatggctcagcagttaagagcactgattgctcttccaaaggtcctgagttcaaatcccagcaaccacatggtggctcacaaccatccgtaatgggatctgatggcctcttctggtgtgtctaaagacagctacagtgtactcatgtaaattaaataagtcttttaaaaaaattagaattaatttaaatttttaactgaagctagaaaagattgattttattttcttttacccaatggtatatgtttttcttttccttatatttatatacaaattctattttttaaaaaaagtgtttgttattcttctgcacaaaaaaaaattcagatcacgtagtagttaagtattatatgcaagaaactcaggtagaggcagtatttacatcaaagcatttagtgttcacgtgttcaattggtttgttttctccactttggggtgtttgttttcaaagggtttttttactggtgtatgctatgctatggcactgtgcaggcacttgaggacagtacttgaggacagtacctggtgcttggctctctcgttttgggaaccaaacttggtgctgccaggtgcatcactgctgcttttggtgatgctggttttaactgctcatcaaagataacgtgcctgagtgtttacaagttaaatactgggttttctttaaaaatcgacgttttaaagacatggcctgaagacatggatggaacattagataatcgtattacattgttagatttactaaatttgttccttatattcaatatatctgcgaagtcgggacctgtgcctgcggttactcaagggtttgggtagtgacaaaatattgataatggttaaagctacatggttagtctgccatggacactgcattactactctcttgattgttttgtgtcataaagatttaaaaatgaaatgctaaaagaaattgttttgcatgcgctttttgaggaattggcctgtaagtagaacatttgagtcatggtagaataccagcacagttaggtttacttcagggttttagactggtgtgctttccatgtgaatttccacccatagtgtgctaacattgctcccttcccttttgtagagtaaaaagaagaagaaaactgattttattccttatagggattctgtacttacttggctccttcgagaaaatctcggtatgttgaccactagtacccgttacctctgtagttgtctttttaaagctgtgtcatgaggtagctcatttccccgcttcttgtctttttctgctcttgctgttgcttttcccgggctgattcacttaccttaggacatgcgctgagctgcagctactgtcgtctgtgctccatacagctgcttatggtgttgttccttaagagcccctgcccccaccaaggtctatctagttcatgtgcatgagtgtgtgtgcgccacgtggatgtagctgagtggaccctgcacagtcttacccctcctcaccactgagggtttctgacctttcagcctttcgctttgttttttgctcctcattaaaaaaaagtaatcagccacctttcccatccctggggacagttgtggtagagtggttaaggtcttgattagagtaggtgtttgtgtttgtgtgtttgtttgtttaagacgggtcatatacaacccaggctgcactgaagtcctgacactacctcctggactggaattgtaggcctgtgctacatttacctggctggggttgtttaagggagcctaggagaggagctgaagtcaggagagctggagagcaggatatgagtggaacagcacagcagggaacactgaagaacgttattgggttaaacccatgacttaggaaatgaaccagctcaaaccagcatggctacgtgagaccttgtcagaaaagaaaagaaattgttggcttttgattacattttaggatctgttgtcagctttaacacagtaaataaaattcttcttgtaaaaagcttgagtgagagcctcatcattcgttttctcaggtggcaactcccgaactgcaatggttgctgctctgagcccagccgacatcaactacgatgaaactttgagcacactgaggtactctcctttgatctcaggagctgagtagttttgtatgccatagattttctaacactgtgaggggtgtcgtgtgtgtcataataaggggaaaatggtttctgctttaatggaatttacttatgtggctttcagtttcattgggataaatgagagggtatttttttgtttttgtaataggctgacaaactgggtttgaacctctctctggtatttatttctattgtgatcttagccaatcacttaagttcttagtctttgtcacctctgtaggatgctgtaaagcttcatacaaataatgtatttgtcaaggatcttgaaatgtataagtcctcagaatgtttggtgtagagctcatggcatgtatgagaagcagaacctctgagaaatggcaagaatgcattttctctctgtatctagatacgcagatcgtgcaaaacaaattaaatgcaatgctgttatcaatgaggacccgaatgccaagctggttcgggagttgaaggaggaagtgacccgactgaaggaccttcttcgtgctcagggactgggagatattattgatagtaagtgaactgggatcatatagaattttactctcctctctagactcttattttttaaatgagcttaaggttgggtgtggtgggcacttgggaagcacgggcaggctgatcttactgagttcaaggccagccagagctacacagatattatctcaaataagtaaataaataagcttagagtttagagacttgatgaaactaagtggtagtaaaaatggttttatgaggtggtgccagtgaaacagtctcagattttctttgtgtagaatgtacacagatatttaaatttattctgaaaaaataaccacttcctaaaagtattacttggaagctgctgtttccctgggctagtgtagtagtgagagcacctgtgtaagaactcaccattgaagatctgcttctagaggacatttaccttgcagtgagccttgttctctgtgggaaagtgaagacaaaagtctaattcctgtcaagttcaagaactagacgtgcagaaagtactgttgtacagtgttcttttataatgcctgctttaacatctacatagtgtgtaagccaacctctcgtatgttgtggttggcagtgcagctcattatggcttagcatgacaaggctcgggttttaacctcagttctttagaaagaagttcttgccataaaattgattattcagatagaatatgggttatttaataaagcatatttttatttttaatgtaaaatattatactttgaaatacttacagatttcaaaccctcttccaacttagctcttactgattagaacctggattttaacgaatataatttgtgaaaatgataacctatactactgaattttcattttttttatcttcccaaatgccaaatgctactctcactctattgctactgattctgaactttgacccttcttgtatttccctcctgcttacctttagttgacccattgatcgatgattactctggaagtggaggcaaatgtgtgtatatcatggtcatttccagtgcactgacttgctaacctgcctttgctgggtcagccttacagcgagctttgcatgccagcattgctaacagggaaatcccagacagagtcgggtggaaagtccagttctcttgtttttaccctcctccttctagcaaagtaacttagtgaactttagtttatgccttcactgaagatgaccttctactccatcttcagtgttcctgaccatataattaaagcaagttcagaattacacttgaaaaggctagtcacacttgataagctcatatttactgaaaatctataatataattggccctgttctagggaccttaaacatattatctcttttttgattctgctattgataagcttattttatcctttttttacaatacccaggagtggatttcctgtggtgccatggttccccatgtttaggttaggcagtttacctcagagcttttaatcatttctactcctacacttttttccctcttgagttgctttcttttatgatccaattatttaataggaaatatcctttttaattagcattataaatgtgagtctttgtataattacaaaattcatttctagttagccaaactgtctgtaattaaagagctctgtgcgtgttggattagcactcacctgtgctgagctccgttgatttttcttcgtatcttaggccttatcttacttgatcactagatagatattttctcctcttttcataaattactatttaaaaattttaaatagctgggcagtggtggcgcatgcctttaatcccagcacttggaaggcagaggcaggtggatttctgagttcgaggccagcctggtctacaaagtgagttccaggacagccagggctacacagagaaaccctgtctcaaaaaactcaaaaaaaaaattttttttaaatagatatctaaagtatataacttaaatgaagatgtctttatataagtgttaagttgacaagaaaatagttgtttatgcttttaagataactcatcaagccatgtcaaatctcagtttggggacaagggaatgcacagaagaacctaacggtgctaccagttactgtgctgactttagcccagaggactgggatgcccagacacacatggctcttggcctggaacagctctgtctgagatctccaaggctgaagggtattggtgtggcgagggtgccgccttcttgcttttgtgttcaaggtgctactgatggcctgttgcctatcttttctgagctgctgtggcatttcctgaaaaccgtgcatgactaagttttaatctcgtatcctcaaaggagggcagtcctggctacttctcagtttccttttggatctacttttaattcattttatggcttgcatgtgaccacaggaccatctaacctccgcctgtccctctttcccaccttctgccatcatctgatggatgatttttgctccagttcctgtttgctttttaaacatgcctctttgcttggttccccatgtttcccttttatctgtagatggtagttttcaaactgtcttgaagcagctaccacaggcaggcttcaagaactggtttccattcagtagtagagatgagatgagtcacccagcgagtgactgtgtcccagccacttccattgccctatcctttgagggaaactgagttctgataggaattcaaggaacgtaaattttctcaaatttaaaaatgagagccaggaagatggctccgtggataaaggtgcttgctaccaagcctaaggacttgatttagatccctggttcccacatagtggaaggagagaactgactctcacaagttgtcctctgaccacacaggaacacacacaaaagaaatcaatgtaatttaaacaaacaaacaaacacttaatgagctaattttaccatagaaatgtaagtagacatgttagcacacatctgtaatcccacagtgtgagcactcaggagtaggaggtcagaaagttaagagttcaaggtcattcttggccacaatgcaaatatgaggttaggctgagctgcatgagaccctgtcttcaaagaacaagatagatggaccgcaccagtggtttctttgcagttcatttgagaaggatgattaatgaataaaattacaaaaaaagcaaatgagtcagttttgttattggtggacgttttaccgggaccaaatttaagactattattttcagttgtattccagactttagttactgcaaatatgtcttaaacacttgcctatcatactagggagaaagcttaccagtgttccagtcattaagccattagacacagggcttttacttaaattatcaaatggtttgtagtttttgtttactgtgacttaaaaatggaaaatatactaaaattaatttatttatttattaatttatattaaaattaattaatatacttgttaattcactagttgttctttcctattgaaacaagcattcacaatgactatcataccatatttcctcaaaattattctcatttcttcagttcttttaatttagagtatatttttggcatgttaaagtgcttctatgcaaagactactaaatgctcagggttggaactaacatttcttaatttcactgaacactaaactaggccagtatgtggtattaattgctatttttccctttctgttaaaaacaagtggagtttaaaaatagagtaaaactgtagatactgaagacttggaataactggaagaatttaagggcttagtttactttagtttgccagtagttttacctgcttaggaagaacatctttaaagctctggctatgccttcccatgctggaaatgtctcagttctaaatttagaaggggctgactgcttagggtcaatattgaagaaggacatgttttagaactgccatctagtacagttccatagcttgtctgtgttagagcgtgtgttcatcttgggctttgatgctgtcctttctcacactgctgttccttcctgtctttttccctcctctgctccttctttccttttttctaccttttctttctgtctcccagatctgaaagattttcagaacaataagcataggtacttgctagcctctgagaatcaacgccctggcaatttttccacagcatccatggggtccctcacttcatctccatcttcatgctcacttaatagtcaggtgggcttaacatctgtgaccagtattcaggagaggatcatgtctacacctggaggggaggaagccattgaacgtctgaaggtaagtctgaaggttgaatgcagcgcattctctgtcgttctagaagacagaactaggactgaatgagcatcacagaaatgttggcttagcacagggagatgttaactgttagaggtgtcctgaaaatgaaattatttgtttaattcctttttatcagaatgtttgagtttggcttggcccaagatgaaaaggtcctaagttagccatacaaagatttacattaatttgaaggtcatttataagtcacagtcacgttgcttgttagatgtttagttttaaagctagatatggtggcctgaacctgataagccagtagtattcaagagatggagaacaggggtgaggtgtttggcatcatcctggttgcatagtgagttcgaggccagcctaggtaatacgaaaccctttctaaagtgataataatttacatagaataactagttggaaaatttggttttactgaagatagaattctccatagagcagtcttccattagtaacattaatatataattaactgtaagtttgaacatttaagtagaaatagctggtttattaggttacatgaaattagaccttttagaactcacaaagcccttagttatgggagaagagggctttctcctcctgtctggtacagctgagctccttgggccatggtgctactcaactgtaaattgcccactgtattggttccttgctggaaccaaatacctgagaagaagcaacataagggagcgtttgtttttacgtcatggtttgcggttagtctgaagagaaggcgtggctgctggagtttccatgaggctgcctgctcgcatctttgcagatcaggaagcagagaaagagtactcacctggctttctcattgcccctctttatttcggtctcgaaccccacttcacaggatagttctgccacattcgtggtgggtttcctctctctctagcttctctggcagtgctctcgctgacagtcagacacggatctagttttaagttgtgttaagttgattattgtcacattattcctggctcccagctctgcagacgggggttctttcagtctgttgctggctatggccatttgtgttttggctctgcatgaatgtgaaaatcaggagtagtccttgtccttccttcagcgactgcagtgagagcagacaggtgtcacctgtggtgctgaggccatactgccagcactcctgccagcatcgggccacagcgggagcatcatgttctcttgcctgctgcctgctgcctgctgcctccattctcttggcctgtgtgttcaagagtactagggtaggggaaactcactgagaatgtagaagtcacggccatgctcccagtcagggaccctcttcaccatcactcagtatcccccactaacaactgtgcccatctgaagacagttgagaacagcggctctctaataggtaaagtcatgagagaggaaggtagccaggctggcttgttgaacacttcactacagaggtcagtgaatctgtgtcaggtgctgtcactgtggctttcaggtgaactgtaacagacttcctgtgagtcctttcttatcatcccatcttttcctttgatttcttccttcaaaaggaaggtgattccaaaataaaaacaatgcttttgtgtcttgattcagaaagtaagtgaagttctaaaatgcctggcaaaaggagaggagggagacatctttttattcaaggtgcaaggtgcagggtgatctctgctgttgtgaaaccgacttggaagctttcctatggattctgtgggagtcctgtgtgggaaggagtgttcattcacaatttcctcattaggaggggtcagtgaccatgttgccagcaggactctggcagtagggaaaagtgaaacttccctctaattgtttacatcaaatgttcacctcctttagagatggtgaatcttacctatttttatattgtaccttcctgaagaagtgagattacccttttctttctctgatgtaaaggagaaattgctttctgcttgctagctagaaccagctgacagcaatgccgcgtgttaggagtcaggacggcaagtaggctttttaagaatgaggtcacccagtagccgttcccagtggctttcagggaataatgctttccttattggaggaattctctcccaactgcctaaatccgatgaaaacaaagctgtaatactttaatcagcacataaactgctctcttaacttcccttgaagcaacgtaagtaaaatctttctctagctttattctagagtgcaaatagcttctttacagctttgtgatcagtcacgccgtagctcactgaagcagaagcctggttctgctctgacgttgtgaatggtgagaattccttttggacaggcctgcattttaatgatgcaggcagagaacatctttcatccagcgtgtgggacagcagttgtacaatagaaacgcttgagaatgtcctaggagctgcattcctaaggcatgacactgcaagagaaaaatactgtaatggagaacagcaacaatgggggctaatccatcttcctaacggtttctttgcctttctttgctcctctgtatttttagcttaaggtcagcgttcgcacattacttttcaataggtgctgctccctccttcctcattgactagcctatttccatacataatattagtatcccgattcctttctaaacttctctggcaaaaaaaaaaaaaaaaaagaaacaagatagtggtatgtaatttttctttaaagccaggacttgaactgagttgaagtctcgcatacatgacttggtctttgtactcagtactaagctgtaagcatgtagctatagccactggctctgatgtttatagactggcatcaaagtcagtactgagaatgccatcgcccagatttagcctataaatatctataaacatccatcatagaagtgagcaggacaaatgctgtcccaagcagtgttttgaccccacgcttggactcactcaggaagcttgggtacagtgaaccttagctacctggtggcttcaagcagtgctccatggagtaaacatccaatcttccaaatgttaaaacataacctacaatgttttttcgaagtatgtctgatttgccttaccaaatttcctaccttcttactgcctcatcaagaagaaataaagagctgagctgaacatagtagcacatcctgtagtagtctcgggactgaggccgcaggatcagcgattcagcatcatctgtgaccagtgagtgtgaggttaggcagggccatgtgagatcctgtctgtcagtcaatcagtcaatcaattaatcaatcaatcaagtaaagatcagtaatagttaggaagaccaggtcaaggagtaagataagcttaggtaaattgcctagatttttgatctttagttttcttatgtatagagtgattgtagaattagtgttagtcagtctttgctggcactaaaggtttgctagtgtgccactcagttaacgctttctctaagccgctggagtgtttgcttgtcttttgtttttcagtttttgagacagggtttctctgtgcagccctggctgtcctggaactcactctgtagaccaggctggcctcgaactcacagagatccacctacttctgcctcccaagtgctgggatcaaaggcgtgtgccaccactgcctggctttccttggagccttttgaaaataatagattttcaaacaatataaatattataacttaataccatgattttaaaaaaagaaagaaaaaaataccttgcttgtttgatgttagtatcacccttcctctatctggtgcaaatgtacacatggattcactacttatctatttttattaggacttggaagacttgtgtgtctgatgtgcacttaattttaggcttaattttgagtttgagttgttttgtaataagaaaaaatgaaatagagtttaaaacatttatgattcttaccttctaaaaaaggaaaagagcccattactttagagtctgccatcgtcttcagaggtataatctgtttcgtgctttcctttggtatattaaactctggcccttctgcttcaatctgtgcatccttccataggagtcagagaagatcattgctgagttgaatgaaacctgggaagagaaacttcgtaaaacagaggccatcagaatggagaggtcaggagataaaagtctttgatgctactaagttttctggggagtttgagtggcttttgtaggttttgtttgtttgttctgttttggggtgtgtgtgtgtgtgtgtgtgtgtgtgtgtgtgtgtgtgtgtaaatagaattaaaaacaaagaaccctcttccccctcctgaaatgcttcacaagtaaatctgctttgggaaggtgtatccagtcacatttatactttgaagtgaaatctacatatttaaagattctctagggcagaagttctcaacccgtgaacatggggttgcatatcacatatcctgcatatcaaatacttatgttactattcataacagtatcaagattacagttataaagtagtaacacaaataattttatggttggggtcaccacaacatgaggaattatgttaaagggtcacagtgttgggatggctgagagccactgctctggggagtcgtgtgcgtcaccaccctgccctgcgcggcttcggattgggaagagtcatgctaagtaaagggggttttcatttgtaacaagtggacttcgcttggtcacggcccacatctaaagaactgttcccactctgttgtgttactttgtctagaaccttttgggtagtttatgttgcaaagttttaaaattcttattctgtttatactgtttggataaatacacacttaaaaaaagtcagtttctatcttctcttatgaaaatgagggagaagcaaactccgatgtactgatcagtaaatgtaacgaagaattttcttacttacctcagacattttaaactagaattattggaacaggcaagatgtctcagcacataaaggttgcttgttcctcaagcttcattacctgagttagagccctcagccccacatgaaaatggaagaagaaaatgaaattcacaaagttggtaccacaacatcaggcacaatgcacaataaacacacatatacccccacacaacaaacaacaaacccaaactttcctagaattactgtagtaaatggtggggacgaatgggaagatgacatttgagaaaagccacacttacaggctgtacttcatactcccaagccacgcacccctgtagtaattctgtgtcgtttgtttgtttgtttttcaagacagggtttctctgtgtagccctggctgtcctggaactcactctgtagaccaggctggcctcaaactcagaaatccgcctgcctctgcctcccaagtgctgggattaaaggcatgcgccaccactgcccgtctatctgtgtcttcactaacattaacacagagtgctggcccccgagtcattttaattccagtcttagactcgagggaaattgtttcttcgtgttggatgcacagccttaaggaggataacgtttcaaaactcttacctagatgaacagaactttagtatggaagtattctttgatttattttgagtactgtttctcttttttttaaaaagatttatttatttattatatgtaagtacactgtagctgtcttcagacactccagaagagggcaccagatctcattacggatggttgtgagccaccatgtggttgctgggatttgaactcaggaccttcagaagagctgtcagtgctcttaacccctgagccatctctccaaccccgggtactgtttctcttaaaaaataggttctcatcagtgataagcatatcacttcattccctgtctccctcgccagcggtagacatagccaactgtttttgctttgccagttgtattttccaactcttttaaaattaatgtaattgacgtcttggttttagtattctgatttacttgggtttttgttttgtttttcaagagaagccttgttggctgagatgggagttgccatacgggaagatggggggacacttggagttttctctcctaaaaaggtaagaaaatatgttgtaaaacagaaacaaaacagtttgtctgagtaagccacttcatgtctgtcatcgagatccttagcttactgtcgggtacttctgatttcgtcttacatacaaggacagccatgttgtaaagtgattatagtggttaccaagataaaacccagggtagtgggactttgggtatatttaagcatctttttgttgctcctcgcattttcctgacctagctgtagcaccagttgctttagtgaggctcctttttcatgtccagtgcttgcttagcatgcaattagccctgggtttgatctctggcaccatatattttgagaaggatgtcacatgtccgaaatcagcatttaagagtttgcagagccgggtgtggtggcgcacgcctttagtcccagcactcaggaggcagaggcaggcggatttctgagttcaaggccagcctggtctacagagtgagttccaggacagccaaaactacacagagaaaccctgtctcgaaaaaaaaacaagaaaagcaaaaacaaaaagaacaaaagaagagtttgcagttggtagtcatcagctctgctgtataacttctgggaaccatttccagctgttgatggaaatagctcatgatttctttggttacaaccatttcttttaataaagtatctctaatctttaccttctagatgtttctgttcctttagcatatttttcctttaaaggtttactgatttatatgactgcaccatccgcatgtacacctgaaagctgttagagggcatcaggtcccattacagatggttgtcagccgccgtgtggctgctgggaattgaattcacaacctctgggagaggagccagtgctcttaaccactgagccatctcttaggctcccaaacaagttatttgtgtgtgtgtgtttatgtgtgtgattagtcactttcctacttgtgtaatcatagttgtagaatagttagggaccttattagttaggttgatatcatgtcttatgtgttctttttgacttgagttgcttcctaatgttggatactaaaataccattattaagttattgttttgtgctcttatttatagcaagcatatgtgtcatagcactgataactcccttcaaggttctggctctactcagtggtaccctacagtatatatggccccagactcactgtcctattattgtactcttaagagcaaatatctagctaagtgcttagattctgttctgggctagagaacaccggcagagagttttgagttgacactttttgcttgatgtgaactagtcttagaatatttgtgaagattcttttggttacttttaaaaaaatcatcataaaactgttgtacaaattctaatatgtcattttcaacagaaaagatcgacttagctgggtatacatacctacagtcatagcacttaggaggtgaatgcagaaagatcagagtccagtaactgcttcataataaacccaaaaccaacctggatcataaacaagaagaaagggtctggagagatgtctcagctgttaaacacaattactatttttccagtggaccctgctttggttcctggcacccaagttgggtggctaaaaactgcctatatctgggcgtagtggcacatgcctttaatcccagcactcgtgaggcagaggcagttgcatttatgagttcgaggccagcctggtccacagagtgagttccaggacagccagggctacacagagaaaccctgtctcataaaacaaaacaaacaaacaaacaaaaactgcttttaactctgcctctaaggaatctaaagttgagtcattttaccctaatggtctattttttcatacatagtacctacatggtagaggttctagcagttatggttagatagaggttagattttgctcttgcatacctctaaaagtctcccttcttttgagacagggcctcctatatcttgggtggtttaagcctcactctgtagcagagaatgacttggaacttctgattctcctgcccccagctcttaaacagagggattataggcatgtgggacccttcccatatatgtggtagtagaggcaagctcagaactaattgtgtgagagacaagccctctaccacccggtctacctctgcagcccttaagttttcatgacattgttgtatatgtgttaagaactgtgactcaccagttaaatttttctactatttttaagtacctggattgaaggtgcttggggaaaagcaaacaaaagcagcttgaaaaaggaatttggtagttagccaggcatgctggccaatgcccttaatcacagcacttgggaggcagtgtcaggtggatctctgagttcaagactagcttggtctacagagagagttccaggacagccaggagtacacaaagaaactgtcttaaaaaacagcaacaacaacaacaattaaagaaacaacatcacatttaggaagaatttgaagtaacccaaagaattgttgtaaacaacataaaattataagttgaactctcaacttgcaaaggttttagacttaatagaggttgttgctgaagctcctttttttagtcccctaatgagattaaaaagaatcctgcccgtttgctgggtggtggttgtggtggctgtggcacacgcctttaatccctgcactccagaagcagagataggcagatctctgagtttgaggccagcctagtatattgaaaaagttccaagacaaccagggctacaccaataaaccttgtctaaacacacacacacacacacacacacacacacacacacactcactctcactcactcactcacagagttctacctgcctctgcctccttagtgctaggactaaaggtgtgagctgtcttaaaacctggctgttttaagattgttattgttatctttgttttaaagatttatttatttattgtatgtatataagtgctgtatctggatgtacatctgcatgcctgaagagagcatcagatcccataacagatggttaggagccaccatgtggctgctgggaattgaactcaggtcctctggaagaaaaggcagtgctcttaaccgctgagccatctcaccagcccctgttttaggatttttaatctacgtatttacaaaaattgtatttaccttgtccaagacttggtctgttttaacttttcctttgtgttcacgatgttttcaccttctgagaggatctggtcttgactcgtgtcagagcggtgcttgccacactaaacagataacctgagcttgaactccaggctccaaaaggctgaaggaaagctcaccttcctcaagttgtcctttgattcccacatgcctcttacctactgagccccgttattttatatatattatatattaataatgtaatatacaatatactaatactatactataataatatatatatataatatgtttttgagacagggtctcactatttagttcttactggcctgaaactgtgtgcctcaggttggtcataagatccacctgtctcttcctccagagtgcccccatacccagccaaactcaggttcttacacggggtgtaatagtaatctgaagaggccgatagagtgtgctgcggcctctgggacttttactgaccctttcccttcaggcattctggggaatctgagaagcctttaggccttcagcaggtcctggctgctgcagctctctcagcaggtccctgtcctgctgctgcagctctctcagcaggtcctggctgctgcagctctctcagcaggtccccggagctgcagctctctctcatggtatcttgccccaagtgataatctatgatctttttcagaccccacatcttgttaacctcaatgaagacccattaatgtcggagtgtttgctctattacatcaaggatggaattacaaggtatgtttgcttttgtttgagctgttttatattttcttctagataattgataactaaaggaaaatctctaaaaacattaataattttctatctctcctttctggaatgattataaattatcttctttcctccttttggttgttagcacttagtttcctctgagtgaacttgggtgagaattgctctgttgtcagcacacatgagctcactagagaagctggcttgccgttgctcatgctgtgtaggtgacatcagtctgtagctctccccgtgcattgcgcatgcagggaggctcctcagacttgagaacagagtttgtagttgaaggcctccgatataaaaaaaaaaaaacgctgcatttttttttttttaatatatcaaagaatgttcttagggagaaagcagttcattgtctatgagtgctttttgtgtctgaatttccctgggaaacacttttgcttgtgttcagggttggccaggcagatgctgagcggcgccaggacatagtgctgagtggggcccacattaaagaggagcattgtctctttcggagtgagaggagcaacactggtgaaggtgagggtttgtgtgttaatttctccagcaactttttcctaagtgtgagaccttctcttcagatctggaattccccatctctgttagtggaaatttttggtcaatcaatattgaaaactggagaaacttgggatgtttataaatgcgaggacacacatagctacttagcatgaaaatagcaggaacaaagggagcctttcttcctgccaagaacgcaggatgtaggcaactaggtttgctcttgaatgttaactatttaataggaaagtaagagaaaaataactgttctagatgacgggagatttgaaaatctttaatactagcccaatagaatttatttttatcttaaagggaagaaaagtcaattttgtatgagtctccgccgcagcagagctcattaacatgacagcagctgacggatggcatccccctgaactatctatcattcttcctcaaacacaatgttagctttgatttgtgtatcatacttgaagatccgtgctgtatctgattttaccaaaattagtgttttctatcttctggggcttgtgaaatctagttaagtatttttagcatagcaatagctcccaataccttcctatactgattttagttgtagaatcttgaaacaaacaagtatagcaaaattccacaaaaagaaacttaacagaaagcccctgtctcgtagacacttagtctcctgcttgcaaggatccactctgtttcttgtgagtcctgatagtgacccacttctccttgtttggttgcactggtttatgatactaacatcatttgtgttcttcctagttattgtgaccttggagccctgtgagcgctcagaaacatacgtgaatggcaagagggtggctcatcctgttcagctgcgctcaggtgaggctcagaggaaaggtctgaggtcgtcagcactgtacacatggcttctgtgagcagcacacactttgactattttaaggctaaacttaacctaggattcatggtcttgtaaaactataggactgtctttttaatcttgcttttgttattgcttacttggttatttttattgtttttgagacagagtcccactaagtagtactggttgacctagaattcactatatagaccatgtaggccccttcttatctctgcttcctgagtgctgggattaaaagcatgggccatcacacccagcctagtagagagcataaaatttaagagaataaaattattttcctattttgagataggtttttcctgtgtagcccaggatggcctcaaagttgtaagcctcttgccttggcctcctgagtgctaggattacaggcatatgccaccttgtctggcaagattaacatttcaaaaactagatactgtttattaaaaggaactccttagaactgggactatagctgattggtaagacacatagtgtatactgggctctggatttgattcacaccactgtaaaacaaataaattcttatccctatttctgttttgtttagggaaccgtatcatcatgggtaaaaaccatgtttttcgttttaaccaccctgaacaagcgcgagcagaaagggaaaagactccctcagctgagaccccctctgagcctgtggactggacctttgctcagagagagcttctcgaaaaacaaggaattgatatgaaacaggagatggaaaagaggtaatgaatgcctaagtgctctgcatcctgtccgatgcctcgaaacattcagtagtgctcacagcagcctcgggatttcataactcactcttagtttgatattttgtttctgtcatttattttacttctaggcttcaggaaatggagatcctttacaaaaaggagaaggaggaagccgatcttctcctggagcagcagagactggtaggaacctgacctgagtctgcagctattgggaagggcggttgctctcacacctctagcaggctctcagtgggaatgtcacatagcttctggcaatcttagtccgagaaaacatccagaaaggtacagtgtagtgccttttatttcttaaaattagatctttcttctctcaccttcacgatccttttgaagaaatagtgagagctttctgacacctttgcccttcagtggtgccttttcaatgtgcaccaggagtgattcctttaaatgacagtaaccgaaccttgaacttggtgggcgtttgccttggttttgtttctggccacctgatagtactaattctttgctcttaggctgacatgggattgttcttgtgctgagcaggttgtttttctttcattttttgtttttgtttttctttaaagttgaattgtgtctaaaagtgttgctgcacagttgcatgtgttaatccttcctgttgccctgcatggagtctgaattctcagtaaggttctcagtggtagaggggctgcatagccgtctcaggcgagggacgctgctggctctgggttgagaaaggctttgggtaagcagttggaaagtcagttcaccatctcagctgtaatgaattagcactttctgatgataatcgatttccaaggttttataaagacgtcttaggaataaatcaattgctcttagcagattttaatattaaggccagccacacagccctggtagtaagaagctcatggtgctggctgtggtggcatgcacctttcatcccaacactaaggaggaagaggctggaggatctccgtgagttctgcctggtctacagagtgaggtccaggacttccagggctacacagagagattaaatacaattgatacagcttaggaagttactttttaaaaaatatttatttatttattatatgtaattatactgtagctgttttcagacactccagaatagggaatcagatctcattacagatggttgtgagccaccatgtggttgctgggatttgaactcagggccttcggaagagcagtcagtactcttaactgctgagccatctctccagcccactttttttctttttttaaaggaggtattaatgagaaattggggggaggatgctggcttcttcctgtaacatgaaataccacatgcaagttttaaccttatgccatgctctgttctatcggagaactattgctttgtggaccatgaaagctaagacataagtaaaagcagccttagttggagcacttggttcttgatagtgggttaaaccacttaatttattatctttaaaattatagtgaagtcctcaaaaatatggattggaaaaataaactaagcacttggaacaagatgctctcagtgtcagctataaggagagtatctctagaagaacaagatgctctcagtgtcagctataaggagagtatctctagaaggctccctgggctttgactttaatggttaggacttgaaagatttgtgacacatgaagtagtcttttatcataattatgtagtataatttaataacatgcctctgatggcctgtgagacatcaagaaggaaaggtgtaattaagcactatttattaacataatgtctcctatttaaacatggagtactttgtaatttacaaagagctctaacatctatcatcttacttgatccttgcaataactctgtttgacagatagacgtataagtgaaatatacatcattgcctttagtttatagttgagattaaggctgaaaaacaatgttactatgcaagcatgcattttaaaaatttgctttcgtagtggccttacatacctgctgaatcatggatctcagccttaaacttgagtcttgtagcttatctcagtgcctctcaatctctgggaatcttttaaaaacagaggtagtgattgagcccgcggtggaatctgggcttctgagttcctcagaagttccctgtcatgatggtgctagtggccgtgggaacacactgtaaataagtaggcattaaagagtgataatgtctggtgctcttcattactaaacgttgataatcattatatgccttgacataaagacactgatggagcctgatatggtgtcacacaattgaaatccagctacctacaaggctgagacaagaggatcataggttcatagcaagatgctgtctacaaatctaaaacaaacaaaaaagggcatgagttatagttacagggactgagattatatagcttacagaggctctgggttcaatcccgagggaaggaaggaatactaataaagagaagaaagtaagttgtctttaagatacacttcgtgttggtttttagggggacattgatgttctggttgtcgtttgttctgtgtatctgaaggtaagctaggacagtgagggcagctccctcataacaaggaagttgctttctatccagaagtctagctgtctgtctactgatagaaatgtgtttttatgattctgtgttagtcaaccaatatgtaccctatgaagattgagagaatatgaagaaattgctgtcttcactaagtattttattaaaacattcacaagttattttagatattattacatatcaaatactatcatttttaacataatgacgacattaaaaattggaattcagagcccagtggatggctcagctgataaaggtgtttgccaccagacctgaatttcatctatggaaccgacatggtggaaggcgagaactgactcctgcaattgttctctgatctccacacatgtgccatgaaatgagcagactctcaaatacacacatatgcatgcacatgcatatgtatagacattccataattttttaaagctgtagttaatgaattttctgtaatgacagcacaaatgcaccccctcttctgtgtctgagcgtctcctacagtcagtgctcttgtatccctgtgtctgccagccttgcattttcaatgtttcctgtctcttctttttctcagttgcatgtattcatttgtaggactttccatcaggccgatcgtgcatttgttatacagtaaacatcgatggaacttttagtggcaggtgaagtcgcaaggcccaagtagtatttccaagtctgtaatcagcaagttcaaatagcatcaaatcttctttaattgaaatggacttaaaacttgtgtttgtatcatgatcagaacaagatatggtggtaaatttgaactgtaaagagttagtttaatagtagggttttgttgttggttttttttttttttggtttttcgagacagggtttctctgtatggccctggctgtcctggaactcactctgtagaccaggctggcctcgaactcagatatctgcctgcctctgcctccaagtgctgggattaaaggcatgagccaccacgcccagctcaatagtagtttttaaaaggaagaaaattatgaccgtttgatttaatttgagtttttaaatttatatagatttttgtttcgttttagaatttaaatatatctttgatatctcaagtctagcacttaggtaatgactagaatacttgccattttctagattcaaaaatattcactttatccctaagcaattataaaagaaaaatagccaagaaataaaataacatttatgtggaagaatgtaagataatttgtattgtaggaaactaagtttatatggttgaaaaaagcaaaaacccactcaagtcagacagacatgccttttcttctactgatgttgtcttgagaacaggagaaggcacagtcggtaaattagctgctgtacaagcataaagacctggagaaagaaccaggcatggcaacttcctaggctggagaagtggtgggaacaagcttattggctggcctgcctagctgacctcccgagaaccttgaccttcatataacaaagcacacacagaggattagccttccactattttctctgtggtgctgggattgagcctagggccttgcccatgctagggcaaaccctttgtcgctaagctatacttaaagctcccattctgcttttttaaacaaaaaaggacaacaggggacaagtagatgtcatagtgagtacaatatttgctgtgcaagcctgagaacttgggtttggattccccagtgcccttgtgaaaccaggcgaggaggcatgcattcatccaacctggggggaggagagccaggtggattctggggtctgatagccaaccagtttagtgcaaaaggcaagatctaggtttaccaagagatcctgtctcaaaacacaaggtttagagagagagaggaccaacatagacctctggcctacacacatgtatgtacatgtatataccacaaaagtattcgaaagtatagaatctataagcttgccttgatctgcttttccttgttaaattttcaagtagtgtttatacttatagtgttcagtacctgtttattcggaagaagtgcatatcaatagcaagtgtctttaaattaaaaagaatactaatcattatcgttattgcagatactattttttaattccctcctaagaggaccatacgtacagatgtacattgaaaataagatatgttatttgtttttgatgtttactgggtggtggtggcacatgtctttaatttcagcaatcaggaggcagaggcaggcagatctctaagcttggtctacagagtgagttcactgatagtcagagctacaccgagaaacagttttgataatcgcaggcaagaataatgtgcattaagaacagttggttaggagagctggagacatagcatagctgctaagagtagcggctgctcttccagaggagcatttcatctcacagtcatctgtcactctagggggatccaacatcctcttttgacctccttgggcactaggcatgcatatggcacactgacatatatgcaggcaaaatacccaaacccataaaattaaagtaaaaaaaataataaactataaaaataaaaagaacagctgggatggattgatagttaagagcactggttgctcttccagaagacctagtttcaattcaagtacccatatgaaagctcaaaaatgtctgtaactccagtcccaggggatccagtgtccacttctggcctctgcaggcactaggcatgcacatgatgcacataggaacacgtaagcaaagcacagacacatagacacacacagagggggctggggagaaataagtaaaaatccttaagaaagagagagagagagagagaaaaaaaaaaagaaggaaaaaggaaaaaagaaggaaaaggagaagaacctgaaactgttgtgaagccgtaacattttaagcctagctttgattttttttttttttcttcttggtttttgaaaagaagcaatgctgcagctcagataactggaagacagcccaagcggagctgttgtatatacactttattttttgtttttattggcagcatttgccacttaagagtagtagtccttgggctggagagatggctcagcggttaagagcactgactgctcttccaaaggtcctgagttcaaatcccagcaaccacatggtggctcacaaccacctttaatgagatctgatgcctgcttctggtgcatctaaagacagttacagtgtacttagatataataatagataaatcttaaaaaaagagtagtagtccccaaggaactggaaaccacctgaggtttctaaatagaaaacatgattgtttcctctgtaggcattgttttggttgattgttgttgttgtttggggacaatctcattctaagcccagattgtcctggaacttgtggcaatcctccagtctcaggctcacctgtgctgaggctttggtgtaagccccatgcctagcttctgaaatactctattatactagagttgccgagtgcctgcctagcgtgtacaaggcccaagcaccctctcccatgaatgcaggtttaaaatgtagaaacttttaattatatttaatgacaggcttaatttttgttctagtaatttcttaaaattttagaaggtggtattattggcttcattgtgttaaaaaaaaaagtaaaaaataagctgtgatctttttttattactttcttgtactcagagtaacaacccttaatataaatcgcaaatccagcatctgcttccagttttgaatcccatccaataggaaagcgagtctgcctgattagaaccttacatggtctgcaaagaggggttcttacactttaacatcatctgtttgcttctttctctacttcctatctaacttttttcctagggttgctcattttagtaaagctaaacagaacttggcatctgcagccttactaacctcttgttaatctgcctgctcgtcacatctctgtatgcatccgtgctcactcttggggaaggaggttctggacaaagcaacagcaataaccaaggcaaatgtgggagaggggctgcgagggctgttggcgtgtgtgggacttggggcggggcggcctcacactaagttcttatgacccgaatgagaggctgttcagccctccaagaatgtgtttcatttatcccagaaagtgggaatctggattagcaatagaaataaatctttgtattaattaatccacatatacataggtcttaatagatttcctcatctagattttgttttgttttttgggttttttaaatttcattttagatttttgttttgttttaaatttgtttaaagcattttgcttgctttttcatcaatttgattttcctttttacattttaattttggttatttgggggccattttttttattttgttttcccaaaggacgcggattctgatagcggggacgattctgacaagcgatcctgtgaagagagctggaaactgataacttctctgagagaaaagctgcctcccagcaagttacaaaccattgttaaaaagtgtggcctccccagcagtgggaagaagcgagagccaatcaaaatgtatcagatcccgcaaagaaggcgcctgagcaaagattccaagtgggtcaccatctcagatcttaagatccaggctgtcaaagagatttgctatgaggttgccctcaatgactttaggcacagtcggcaggagatcgaagccttggccattgttaagatgaaagagctttgtgccatgtatgggaagaaagatcccaatgagcgagactcttggagggctgtggccagggatgtctgggacactgttggggtaggggatgagaagattgaagatatgatggtcactgggaaaggtggaaccgatgtagatgacctcaaggttcacatagacaagctggaagatattttgcaagaagtcaaaaagcaaaataatatgaaagacgaagagatcaaagtcttaagaaataaaatgctcaaaatggagaaagtcttgccattgattggatcacaggaacagaagagtcaaggaagccacaagacaaaagagcccctagttgctggtgctaacagcgtctctgataatggtgtcagtaaaggagagagtggagaacttggcaaagaagagcgcgtttcccagctgatgaacggggatccagcttttagacgtggacgtctacgttggatgaggcaagaacaaattcggtttaagaacctgcaacagcaagagataacaaagcagcttcgtcggcagaacgtaccccacaggttcatccctcctgagaaccggaagccccgctttccctttaagagcaatcctaaacacagaaactcttggagtcctgggacacatattattataacagaagatgaggttattgagctaagaattccaaaagatgaagaaggaagaaaaggaaataaagaagaaagccaagaaaaagtgggcagagcagcttctagagatgtacagtcagcgtggggcacaagaagtcaggatcatatccaagttagcaaacagcacatcagcaaccaacagccaccacctcagctacggtggagaagcaattctctcaataacggccaaccgaaaaccacgcgctgccaggcgactgcctcctcggagtccctaaactcccacagcggtcaccccaccgctgatctacaaactttccaggccaagcgtcacattcaccaacaccggcagccttactgtaattataacactggaggtcaggtagagggtagcacagccagctgctgtcaaaagcagactgacaagcccagccactgtaaccagttcgtgacacctccgaggatgaggagacaattctcagcacccaatctcaaagcaggtcgagaaaccacagtctaggtagattactggacaaacttgaagttgtagcaatggaaccaggcagtgttatgttagctcatggattgagttggtgcctactatatgcatcatgagtttagtgttgtgttcctacagatactaactggtctttattgttaaaatgtaaaacactggtaaatgtttcagtgcctcccgtgtgattgtgcattatcagtgggcaggtgctagaattgggtataaaacatcaaggccctgtatttttctgatactttcctctatggtgcctagattattaatgtacttacactggcttctcttgttttggtgtaagattttttttttaatagtgctttgatatcccaaaagacctgcctcttgttttatggaaatgctcaaaataagaatttgatatatagaagaaatgcctcttattccccaagcaccttagaagttgactgaaaaccaacgtgcaacgatgtggatacagctttaggcttcgccttggtgtctgtacttttcattaaaaattgttggcagttttacaagcataaatccaaggtcttcagacatgttttttctgcacagccttgcatcttacatgtcattatcttagtctacatttttaaggaaccgagtcagtaatttttactatatcagaacatatagaaaatttgtcatatctctaaaatctttaaattgacactttctcagtttcgatttggtttgtattttgaagtttactgactattttactcatagcacgaactatatttgctaaaattatgccaatagaaataccaacaacaatgtgtgctctgagcaatgtgtgtaagtttctaagaagattattcagtgcaagaaggaagagatggggcatggcaagaaggcagccgatagacacctcttcactgcctttttccaaaagtggagataataaaaccgaactttggttgagtctggagccatgtatataataaactgttccttgttcgacagttgtaatgcacacagatcctctagcaaggacagctaagtcctgcaaacagtcactcctctgtcaatacctcacttcaccatgctgtgcttgcagtttgcctcgatggagaagcctctttgaataaaaaaagaaagaagaggaaaaaaggaaaaagaaaaaaaatagaaagacaaggtggattttcatggaagaaaagaatggctttctatagacttcttcctctcttgtacttgtcagaagcttttctagaactagagatgaccagaattgacagtgctgaagattcctaggtcacaccaggtcgtgcaccaaacatctgtgttccagcggtgtgaaaacttgcagccaaggtagcatagcactcacggaggccttcaagagagcatagcactcacggaggccttcaagactctgattatgtacttttttttcctgctttgtgtgtggatactgttttattagacatattaattttaattgtagtgggctttttctcctctctcttttaagaaaatgctgtcttaacgcacagaaaattgcttccaacatgttttttttccttaaaaaattggggggaagatccgtctcctttcctagctagaacagttctagtcttcagtgacagtttatatggcagattcaacttgggcgagtgaggcctgctgtgtgttgacttcatcgagacgacaatctctgtgccatttggtctgaatgtattcttggtaggctcaagtcagtcacttcagtttgtctctgtaactctttcttcttcacacataattatactacctgggtgtttgtcaaaaattcatttttttgaaacttaaagtgttaattacttaggctctaacttgacagaagatatttcaggtccatagaggctcactttgttacagataaatgctttcctttcctattaaacactgaagtaagctcactcctcgatgccaacattacagtgaaaagttttgtactgttttcctgtacacatgtgggtggcattttgcccccagagatattccaaagaatcacctttgttcttctgctaatccaagtgcccttgtatgactgaaataccagacattaaagaaacccttgcttttctaggcaaccagaaaagaaaagaattcactgctagcagtatcttttcttgcatttgagagcacttaccttagaaaactgtgtgtacaaaatagcttgttagactcactgaacaagtataaaccaccatcatgcttttgtggggtcttattcctttattaagacggcgtctcctcgatttgcccacactggcctcgaacttggaatccttttgcatcagcttccacagttgctggagttagaggtgtgtgttagcaggctcagcttgtctttttgtttgtttactttttggttttgttttaatatagtggtatctccccctcagcttaaacaagaccaaagaaaacttgtcttcattaaagcattattttattctgaaaatattcctaggtgttatcattgtgaaatggagagaagtgttcatacgtgggaactggcattaccaggcctgtagtagagtcctactttattggataaggttttccagagcagactgttaattctatggacagttacaaaatctggttaataaattaaaaccaaagggcttttcctctactcttgcttctgatccttctagcatagcacattgtttctcctttcataggtaacacgacaaataggaattgtttattacattgaagtgacttgaactgacctttgtgctttagatgtaagatactaaaaacaaaacactgggtctgttaccgcgatgcctgactttttaaatgctatcagattataagcagttgcgtgggcttcccgtggtcactgctgtagcgggtgccttcctggtcctttgttgacttgccttaatgatttacacagaagccttcgagcagaggaagcttcctggggcctactgcagtgtgatgaagacgttttaggttcagtgtaaagcaagcttgtgttctgtactgttggagacagattcgttacaaatgattttcatacctgtctgattgatatcattttaagctctgctctaggtgtggcccactttaggttgtgaaatgtatcgttttttcctattattactgtaaagagaagttgtgaatcttcttgttgatgaactctgatttttctctcaatttcttaaaaccatgcttgaagattgtctgggtgtgagactgccttctcagaaagggagagttagtttgtaatattaaagaaataaaatcttcctgaaataagccttggcatgatctttaagtgtggtttatcactggggaggaggggtaagtgaaacaggggaattctgatttctcagtctcttcctgctctttcatctgaagatagttgtgtgccaagtatccttttctttgtatttttgtacggattttcttttttttattagatattttctttatttacatttcaaatgctatcctgaaagttccctaaaccctgcccctgccctgctcccctacccacccactcacgcttcttggccctggcgttcccctgtactggggcatataaagtttgcaataccaaggggcctctcttcccagtgatggccgactaggccatcttctgctacatatgcagctagagacacgagctctgggggtactggttagttcatgttcttgttccacctatagggttgcacaccccttcagctccttgggtactttctctagcttctcctttctttagcgcctccatggggggggggggggctgtgttccatccagtagctgactgtgagcatccacttctgtatttgccaagcactggcatagcctcacacgagacaactttaacagggtccttttagcaaaatcttgctggcatatgcaatatagtgtctgggtttggtggctgattatgggatggatggggtggggtagggtagtctctggatggtccatcctttcgacttagctccaaactttgtatctgtaacttattccatgggtattttgttacctattctaaggaggaatgaagtatccacacgttggtctttttgtatggattttcaagcttttacatttaatgtccttttctattttatgaaacccagggccccaggatgtagctaatgggatagtagcacttaacctgccacacagggcctgagctttgtctccagaggcacaggatgataagacagtgcattcagttatactttgtgctgtttctcttaaataacaatctcttaatatatgaataaaaatatttcattttataattaaacttttcaatttttcattacatagtcatgatttgaaattattttaactgacataccttttctctctactttagcctcaggttttctccactcagatgattgttagtctgctaaagatgaaacaggacaaaacagaatttttattcttatttttttaatgactcggtggtcttattaaaattttggacttagctaagatggctcaactgttaaaagcactgactgctgctcttccagaggacctaggtttacttcccagcccccacatggcagctcacaaccatctgtaattcagattcccatgggtccgactccctcacacggacagacatgcaggccaaacaccaatgcacataaaataaaataaaaataaattacttaaaaaaaatttagacctagcatattttttcaagttggaaaattgtgcattgcaaatgagaagacaacacatgaatctcatatgcatggatttttaatatactgtgctttctgagagaggcagagcctacgttgttctgtaccgcatttcacatcctttccctctgggtactttgtatttctccactctgggagaaactagtgcaggtttctaagatccctagtgttctcggacacagaggtagttccagtgcggtgtgataaatggcctgcagtgatggcgttgtaggcagagccatatccagagaggatagtgggaggagtttgtggaggaaggaagccctcagctaagagcaagtcccacagtacaactgagaatttcccaaagtgaaagagcaagagaaggaaggatcagggaggaagacaatttaggatgggggagatgttaattacttgggatggtcagaaagtcacgtctgttgtggtggacaaaagacaaggagactggaggtaacaagaacagacttgtgtgagaaactacaacccagtgtctacagggagattcctttattagaaccaccttgtagaaagcttcctgcggttacagtatagagggtagattgtaggcaggcaagtgcagagccatgtggaccagttggaaagttgctacttgatccaggtgagaaagaatgcttctccaagcagtgccaagagggagatgggaactattttgatcttagaaacaatgcccatgtctggcactcctgtcatcgcagcactgaagaaactgacagggagatctcatgggctagccttagctacatgagagcctgcattttcaaaggggcaggcaagatggttcagtggttaagagcacttgctcttacagagtaactggattcaaaacccacacccacaaggtcgatcacagctccccgtaaccccagtcccagttctggggatccaacagacacacactgcacgtacatgcatgcaggcaaaacaaaatctaaaaaaaaaaaaaaattaaaccattgcttagaacaactgttggacccttggggagcagacatcattctgggattgtctccctggtaatgaggtaatgctaatgttgaccagaagtgaggtgtcacctgggacatggggggacatctccatccctgtgattgcttgctaattatgtcttgtcattacaagccgagtctctctcgttaaaagctgcctatccagaacactaaggatggtgacttctgattttgccaaactgtcattttagcggtcccaagctgtgccgccgtcagctctcacctggcagccgtgcttacttaggcctttgcttctgttcgtgactcgtgtcggttactgtctgtgcagtatccacagccatctttataaaatctcaccctgtcagcggcctcatgggcttccaccgaactttgaaagctgaattgtagctttgttaacaaggctttacatagcgtggctatttgtccacctctgctttcatgtcttactactatcacagaacagctacctctggccttctgtgcctccgttatacttcctcaggactgaagcttgtttcctgtcctgcttatctcttccaaatctctgctcctgtgccattcttcctaccctaccccagcccaccctacatcaacttccacttatttttttagccagtcacggtggcacatacctttaatctcaatacttgggagtcagaagcaggtgtatctctataagttcgaggccagcttgatctacatagtgagttccaggaacagccagagtgagaccatgtctcaaaataaaataaaaaaaatttgttgagatatgtctggggtatcccattctgacgttgaactttctctgtagctgaagatggctttgaacttgtgttccttctgcctccacctctccggtgctagcatgacaggtatgtaccaccacacctggtctacacagtgcggggtattgaatctagggctttgtgcactctagacaagcacttggtaaactcacactctcttaagaattacaacctctggtcatcttgtctatgcacttgcttggctcttccatgaatacgtaagcgtataggccgcagagcagtcactcttgggtgtaatgtgtcacagaatcctagaaatcttgtgagaacatagaccgctgggtccatcccagaataaatgactgactaggtctggcatgagacttgataatttgcatccaaattacccaggtggtgtctgactcttgggcacaactgttgaggtagaactggggttgaaaagcatttttctgaaaagccagatagtaaccaagtttaaaagttggttttggagatggaaccggatggagctttgtgtacatgctaggcaagtattctaccactaaaacatactcctggtccttagtaatgcttcaagccttgctgaccatgtaggtagatccagacacctacgatctggatctagcccacaggccatggtgtgctagtccctgacttaaaagacagtcattgttgagtttgtttctctctgtaagggagaaatgtgacagatgcttgggtggtaaatgacagtatgatccctggactcgtgaaattcaaaattatggagaagctgccaccgggcagataaccacactggtgttttatcaatactgtgtgacaggctaagagaaaaaaatacagggtgctataaagtcctaacaggtgctttaaggaaccagaacacctcagctgtctcttggccgctgtcagtttcatgttagtatctctcactcctccttttctccctggtgaccctcatctgtcttctgctttgctttacactcttcagattgtttctctctaccaaaacctagtgcgtgccatgcttgtcatctctctgcccatgctgacgtgaccttttccttactgagctctgtatctgcagcatcaggttgttagtaggaatacagaatgtatatgactggagattggagagatggcttagactgctactagcacctgtgtgagacagctcacaatcacatgtgatctagccagtgccaaccttctggtctccatgtactcacacacacacacacacacacacacacacacacacataccccttatgatatcctaataatacccttggaagctcagaagcagctaggtttgggaagaggcttcaatttaaaaaaaagtgttgtcatttgaactatcaaattctgatcaaattcagttggaggttgattttcccaccatcccaagggtgatgagagacggtttattcccattgaagcttggccagtgcatgtagagaaagccaccttcacacctttgggctgtggatggtagtttgactaacttatagacgtattcttaaagaaatccccaagataaaagggtttggttttttaaaacattttaagatttatttattttacgtttatgacagctctatctgcatgtacacctgtgtaccagaagagggcatcggatcccattacagatggttgtgagccaccatgtggttgctggaaattgaactcaggacctctggaagagcagtcagtgctaataacctctgagccatctctctagccccaataaaagatttttgtacatggagatttttagatgaaacagcagggatttctctctttggtggaagaatcccatattgtaagcaggttttaaggggaaaatactgaaggactacccagctcacatttcaagactatggagaaactggagaaaaaaagaaagtggtacaatgcattttttaaaagatttattcgtgttttagcttatgtgtatgtggtgtgtctttatgagtctatagcccctgcagtgcctgccaagtccagaaggcactgaatctcctggttctggaagttcagtggctgtgagccatctcatgtggttgctgggaactgagccgaggtcctctggaagacggcaagtgctcttcacacctgagcatctcaccagcctcctggttatttactttttctgattactttgaaaattggagacaccatgatagatagttgactcctaaatgtttctatgtatatatctcctaaagtcaaagtttttattaataggttatgctagttctgcatcatgtaatatacagccatttaaaaagtctcttcttatttatctcaaaaatacagattttatcagaatgtgtgttctactctaatgagactcagtcaacatttatacatcgaagtggttatgacttgtctttttattatgggctggcaaaatggatcggcagttgaagtcgcctgctgccaagcctgctgactgagttccatctcaggaacccacatggttgaaggagaggaccgattctaaaacttgtcatttggcttctgccttactgcagcacacgtgtgcccccaacactcactatcataaacaaacagatgaataaatatagcaatttaaaatttaaaaatggagaaagcaataaagacaccaacaacagccgggaatggtggtacatgcctttaatcccagtactttgggaggcagaggcaggcagatttctgagttcgaggccagcctggtctacaaagtgagttccaggacagccagggctatacagaaaaaccctgtctccaaaaataaaaaaataaataaaaataaataaaaagacaccaacaacgccctccagcttttccttgtatgtgcatacctacatgcacacaaagaaaaaggtatatgcatgtatacatacagcgagtaccatttattagcatgattctatttaagaggacttttatatgtccttagaaggtttgtctgttagctgttctccagctgtttgctaggaagaccatatactaagaattttttttctggtttttcaagacagggtttttctgtgtagccctggctgtcctggaactcactctgtagaccaggctggcctcaaactcagaaatccacctgcctctgcctcccaagtgctgggattaaaggcgtgttgccaccactgcctggccatatactaaaaacttaaaagatgaaaaggttcttgttagaaaatacttgtttttctgaaattgttagactattattagaaccaatactcatatcccccaatttaataataataataataataataataataaaatcctaaactttaaaagaaacaagagtattttccccatcatgcagtaaacattgcccttttcaggtaatacttcttatataggaaatacatgcagcagggctggagagagaacacatggagcctggctcagcagctaagagcatattttgttcttgaagaggactcaagttcagttctcagcccccacatcaggtggctgcttccaacttacaacttaaaacttacaacttacaactctggctctgtgggttccaacaccctgttctggcctcttcaggcttctgcatcacacatgcatagtcttacacatagacacatacttttaaaaattataatgactcctttaaaaagatcaagtggagaagtagaacctgatttgtaagtggcatacacttggggaatctctgagttcaaggctagcctgctctacagagagagttccatgacagccagagttacacagaggaaccctgtctcaaaaaaaaattgactttattatacttattttagttcacatactagtatatttaatagaaaatttctcttaaataaaaaccatttcagattagtggtgctgtgagcttttattttttctgccataaggaacttcagcatctatcatcttgattaccttcccttttgagtagttagaagatggaggccttaggaggttctggtgactttaatcttccctgacattttctttctccggaatccctcatgtgtaagatcctgccctccccgtttccctgtgttggccctttgctgtgtgcacttccccccagagttccttccatttcctgtttccttcttccttcctcccctctctacatgttctctcctttctttccatccaggactacgagagtaaattgcaggccttgcagaggcaggttgagactcgatctctggctgcagagacaacggaagaggaggaagaggaggaggaaggtgagagctaacgcctgaaccttgcattttgtctcccgaatcagcatcatcaacctggtcctttcacctgttgcaaaactgggttcttcagatccgccctgctgtttgctgacactctactgagcctgctgaaagaatgatttaaaagagcccattgctgcaactctagggtattctatagggtggaggaggatcattagaatgtatagaatttctaaggtttccaaggactgtcttcacatagaccatctctcatgactgcacattgggacctcacgggtcagtctcatgttaacacagagcttaatcattgcatacacatttgttcaactctctagttcccatcacagattccctgctcagcctttggattgtattggtgcactcgaatccatggtgggcagatttgtttgattttgacagtcttgccaggtagccaggtagcactgtctggcctgacacagttgtagactggcctttaactaaagttactcttcctgccacagtgtcccaagtcctggactgtaggcatgggccaccatggctggatcattcattgctggttatattgtttagtcatcaataaagatcggggactttgaaaattatacctacacattagaattatattaagaagaaaaaagaagaggaagagggttggcgagatggctcagtaagagtgcttgttgccaagactggggacctaagtttggtatacagaacccacattatcaaaagacacaactggtccttacaggttgtattttgagccactacatgcatgtaatggtgtacatcttcccccggtacataagtgaccactgggaaggttgaggagaatgaggagttcaaggctagccgtgactgcatagcatatccgaagccaaccaggctcaaccaaaccaaacgacccacaagcgtattctgtaggttataggctttctgaagtatatataccgtaggggagacagacaccgtcatggttgctgagtccctgttacctatgcttcttctgccctttcagttccttggacacagcatgaatttgagttggcccagtgggcgttccggaaatggaagtctcaccagtttacttcattaagggacttactctggggcaatgcggtgtacctgaaggaagccaatgccatcagtgtggaactaaagaaaaaggtatgggggggtgggtatgggggacttttggtatagcattggaaatgtaaatgagctaaatacctaataaaaaatggaaaagaaaaaaaaaaagaaaaaggtatggagggtgacgagaaagaacacagtgctagaggcacagtgggtccatttaaattaatggccttgaattaacctttcccttggggaactcagctgttctaggccatgaatcagctttatttcatatatgtgccagcacaacataggtcataattaaatattttataactgctgttttctggctcattttagaagtatgagtatttaaaggggagctggatgatcttattagtagataaatgctttttaaatttctgggaaaagatttttggtttaattttagttctccatttttagctcgcacctctgagaactctaagccccttgtcaaccaatttgctcctcttctagggcctgaaaggtacaagtagggacaagtgtgtctgcactcagacagcgagagcctaatccagagcagttgagttgacctatagttctgtagctcatttggcttgacaacagaacctgccacggagtgagatgagcgacgacagagcatgggcctatacaggctgcacgtgctagacctgctgctggggactgagcacaaggcccgtgcttcctaagaaacactcccctctgagccaaacctccagctccaaacagccttgggaaatctctgtcctgtgtgcctcactgcttctcagctgcggactgaattgtaggctaggagaaaatgcagcccgcctgcctagcaaattcattggctgttcctagggcgtgtatttcacatacctacactgggatagctgttgtcttcactcaccatctcagagacacttttaattactaaccattttcttcattaagtggactaaagtcaggaactgtctcttcttttcttagttctgtacctgttatttaattaatatttgttggtaaaaaatataaggtgacctagcaagaagtaaatgatgtgatgcggtcacaactttgactccatggtaaagtctagaggagtgatagttgtcgtcctctgtgctcaactgcaaagctgcatgtgcagcctctcattagcgagtggactaggtnnnnnnnnnnnnnnnnnnnnnnnnnnnnnnnnnnnnnnnnnnnnnnnnnnnnnnnnnnnnnnnnnnnnnnnnnnnnnnnnnnnnnnnnnnnnnnnnnnnnnnnnnnnnnnnnnnnnnnnnnnnnnnnnnnnnnnnnnnnnnnnnnnnnnnnnnnnnnnnnnnnnnnnnnnnnnnnnnnnnnnnnnnnnnnnnnnnnnnnnnnnnnnnnnnnnnnnnnnnnnnnnnnnnnnnnnnnnnnnnnnnnnnnnnnnnnnnnnnnnnnnnnnnnnnnnnnnnnnnnnnnnnnnnnnnnnnnnnnnnnnnnnnnnnnnnnnnnnnnnnnnnnnnnnnnnnnnnnnnnnnnnnnnnnnnnnnnnnnnnnnnnnnnnnnnnnnnnnnnnnnnnnnnnnnnnnnnnnnnnnnnnnnnnnnnnnnnnnnnnnnnnnnnnnnnnnnnnnnnnnnnnnnnnnnnnnnnnnnnnnnnnnnnnnnnnnnnnnnnnnnnnnnnnnnnnnnnnnnnnnnnnnnnnnnnnnnnnnnnnnnnnnnnnnnnnnnnnnnnnnnnnnnnnnnnnnnnnnnnnnnnnnnnnnnnnnnnnnnnnnnnnnnnnnnnnnnnnnnnnnnnnnnnnnnnnnnnnnnnnnnnnnnnnnnnnnnnnnnnnnnnnnnnnnnnnnnnnnnnnnnnnnnnnnnnnnnnnnnnnnnnnnnnnnnnnnnnnnnnnnnnnnnnnnnnnnnnnnnnnnnnnnnnnnnnnnnnnnnnnnnnnnnnnnnnnnnnnnnnnnnnnnnnnnnnnnnnnnnnnnnnnnnnnnnnnnnnnnnnnnnnnnnnnnnnnnnnnnnnnnnnnnnnnnnnnnnnnnnnnnnnnnnnnnnnnnnnnnnnnnnnnnnnnnnnnnnnnnnnnnnnnnnnnnnnnnnnnnnnnnnnnnnnnnnnnnnnnnnnnnnnnnnnnnnnnnnnnnnnnnnnnnnnnnnnnnnnnnnnnnnnnnnnnnnnnnnnnnnnnnnnnnnnnnnnnnnnnnnnnnnnnnnnnnnnnnnnnnnnnnnnnnnnnnnnnnnnnnnnnnnnnnnnnnnnnnnnnnnnnnnnnnnnnnnnnnnnnnnnnnnnnnnnnnnnnnnnnnnnnnnnnnnnnnnnnnnnnnnnnnnnntgatccctctaactttagtcctgggctcaggtatcatctttgtaataaaccaggcaagtgattgtttctctcgctgtggagctatgtctgagatgtcagccaccattgagctactttcttctgtggctgtaggtttaagcagatagatctcgctcccctctccctcctctcccctctacctctcccccccctttgctctcacgggtgtgcacacacatgttctactctacgttctgctgacttttggtggctttctccactcccgcgttctggatgctgagaattcgggtttctgtgcttctgtttatgcattgtgcattaagtgacacgagcaacctcttaaaatacctggcacgcagatagtttccaaaataaagttatagtgacgtctcatggtgttaactcagtgtaccccatatccgctcaataggcagagactggatctgatgcgagagatgtatgacagggcaggggaggtggcctccagtgcccaagatgacagcgagacgaccatgaccggcagcgacccattctacgatcggttccactggttcaaacttgtgggaaggtatgtcacagttttgttgtttttaaaaaatgaataacaagtacttttaactttttaaatgtcagtagaaagtatacagggggaaggggtgcaaaatgccccttctcaggccaggatggagctcacccctgatgttccaggttcagttcctagtagcattggaaaaaaaagacaaacaaacccagaaacccaccttctctcttaatgttaatcagaaccaatgtgtggtttaaagtatttacctccgttttacacagtctgcatagtttttatgtcatactttgtagccagcgtatttgacagccatcccggactcttaactttctcacaacatgtttcatagttgatcaaggaaaattgagaagaaaagaaactgtttctgactcctgtacactttaagtagacatcacagtgtgtgctaccagactgaagttgtttcccagaacctgactggtcctctgtgatttctcttagaagagtttgtctttctgtagtcattgcccggggcaggttaactacaccccagggtaggcggcctcttcgggtctctgcctccatcacgttcagcgttctgtgaaaacaaaatgcccctgtggagttccagaaacctggccttaagaggttgaacatgtaaaagcaaggaatcgcgaatgcttaagagggtttattttactttatgtggatgggtgctctgcctgcatgctgtctgtgtgccatatgcatgcctgatacccaccaaggccagaagagggaactgaatcccgcaactggacttacagatggttgtgagctactctgtgggtgctgggaaccaaatctgggtccttcctcaagagcacccagtgcctttaaccattcaccttctctcccagtcccaggaaatgtgacctttgagcttcctggtttcagacttttgagttactctttactgtaaatgccctgtgttggtatgtaagaaacccagaaatggtgttgctggtgtcagccttttccactccactctgatagcggactagggtttgcagacgtgggctgtgcagacacagctcactcaagccgcttcagcacacagacaagagaactcagacacttaaggccttattttattatctctgtcctgagtggctcccggaggacagggtgctcatcctctgtgtgaactgagaacataaacatgtgtcgtgtgatatttccctgagatggtctactcacggatgctctttgccttccttattctgagggtctttccttgtagatctcttcagcctgccccgatccctttgcctgaaccgtgcagcctgtgttcctgttgctcttttgctttttaccgtgatgattctgtcagtgcattctgtcctgttggcacctgggcatcctgttaaccgactattcctctctccctgcctgtgttaatcggcgtcttacctggtgtctagctcccctattttccacggctgtgtgaatgagcgccttgccgaccgcacaccctcccccactttttccacggccgattccgacatcactgaactggctgacgagcagcaggatgccatggaggactttgatgatgaggcattcgtggatgacaccggctctgacgcagggacggaagagggatcagagctcttcagtgatgggcatgacccattttacgaccgatccccttggttcattttagtaggaaggttggtgaggtcattgtgagaaaggccaaaagggaccagctcttgttctaaatgcctctgtgcaattttggctagaaagaaagcctaggccttatctatccataaggcacaatctacttagtactctatacagcagcttatgaagaccacctggaggacggcttgacccaaattgcccagtaatttagctaagactcagaggtggttgtttcagttaacgtgactgtggttcagatgtttcatctctaaaagaatgtgcttattgaagcgtaaggaatagcactagcaggggcacagcaagcccgaggccaggctggggagtttagatcagaagctaaaggaatgcagtgggcttggtcatacaaaagaataggagtgcctagctctctcttggcaatgatggctgccgtgctgtgttctgagcctatcttgggcttctgccaggaacaattggttggtttctgtgaatctcaggaagttatcaccagcatcagtatttgttggctgtacacgagactgctttacattgaggtcgttgctcccgctattgctgtgcatatctctctgtcagaggcagaggttcccggtatttctatcatccgcatcccctcttcagattaaagtaattttaaatttgacaataaaatgctcactgccataagctggatgtggtggtgcacacccacagtctccgcacttggctggggtggaggcaggaatattaggagttcagggttgtacttggcttcaagttatacctggttgcagctagcttgggatacatgataccctgtctcaaaaaaaacaaaacaaaaagatcaggattaacaatgcataagaagcacagaatgctgagcccttttacaataaaggctctgtcactgctggatgctcagcaccggctgcacaacagcgcagtgagtctcctcacacggcagagacacaggactaaagcctggttgtcacgtggtatccgacacctagggggactcactgtaggagataatggaagagtggaaaggaaagctttcagagaagtgagcacctaagttaataaggcagtctgcagtttacgcacagtcctccatgagcaaatgtgctgagattacatgagcacaagtgttgtttgcttgtgggattgccagtattaggatttagagaagtcaatttatttatattaaaattaagaaaagtatgtacaaatggtgcttcattttctagatttctgtgtccctcaatgtatttccattctattctattctttttttttttttttttttttggtttttcaagacatggtttctctttgtagccttggctgtcctggaacttactctgtagaccatgctggccttgaactcagaaatctgcctgcctctgcctcccaagtgctgggattaaaggcatgtgccgccactgcccggctttccattctattctaaggtggcagttagtcatgtctgtctgccgtcttctacagcaccacagtgtgaggagtagatgatgtcatcttatgtggcctggtcaggagaatcttgacacagtgggtcctgacatctctgttgctaactcaggacaagcaactcaaatgagttgggggagggaagaagggtcttaagaaatcctttttcccttcatcatttatattctgttacccatactagcaaaatgaatgtagccattaatacttctgcttaggaccaggcatagtggcacatgacagaggcgggcagattcctattcaaactcctggtctacatagtgagttccagaagagccagagctacatagtgagaaaaaaaaaaaagactccgtcttgggagcatttgcatcttaggtcagctttgtgaaagcgctgaggcagactcctccccaatggggccactcactaggttgaaggacgtgtggacttttgcggagctatggcctcaggagttgacttttctgtttggatttctgggttctagaactaacactgtctttcaaaaaggggcttgaggtttggtgatgtggctggagagaagtcagtgctgatttcctatcaccacacaagatactgggagaaggtgaggtaacagcagtgagtaaagggaagaagagttctccgtttttgccctcagccatatttctccagaagagcagcagcattcagcggtgcagtggtgatggctgtgatgggcggtgctgtgttagcggggtacctcctgttcctgtaattcccgctgtgttagcggggtaacccctggccctgtaattcccgctatcagcgatccatattggcatacaactatgattcacttataaaaatttgcatgtttcctttgaattccatttataggtttgcttcttggccacggctgcctctggtgaatctttgtatcgagagtaaaagagcttgtccctttagccactctctatggcatgctgggatgttatgatccatcatcataacttgggatgaaatgtaaaatgtgtgttagtctctgggccagagggggcagagaatggttagtctgtgaccgtcctcagtacctacattgacctcttttcctcgagtgtcactataatcatgctgactttctttatgttgacaaattagtttttcttactgatgtaacttcacatcattttctgctaatgtatcttttccatcttccctcctctcatcccggttctccttcagtctgctaggtcaaagtataaggatgttccctacagagttaatcatgatgctctcgtgtaaaagctgcacaggagatgctagatacagcgttgggctaaaggctgtattctgttaacacgacaaagaactgtctagtgagtgcgtccatgcatcacaggccgggtgcctctgccttgccatagactcgtccctaaagttggaagtgtccagtaatgccttcagtgctgctgggtatgggaagcctttgccatgggtagcaggcttcctcccctttagtgtgcggtccagcattatttgtatgatgatatgatgatatgcctgtggatgtgtgttcttaaaaactcataatccttgggctgatggcactgcctgacctgtcaaggtcctgcaaaacataggcataacagtgcttttattttccctgataattatacttaacatagtaaaattaaggaatggcagaaatgctaagtgctcggtgtagttaatttccatcataactttactcttgaaaaatcatcctagtgtaaagttagatggcttgctttccgtcccttgcaggacctatttttctgaaaagccttccacttctgtgtaaagataaaggacaagtaacaggtcacattcctggtttctaattgcatacatattcacttaccaaacatttattgagtgtatttactgtaagccacgccctctgcagatgggtaagcaaaaccagagatggttcacgtcctcccagtcttagtctggcgagtgatgaagataccaagaaataatcacacaagtgcacactgcaccactgtggaaacagagctgtgtgagccacagtgttgggaggatctccagtgagatcagagcccgggcagagagagcatcagtgctgagaggactacagggctcttactggtccagtcactgaaagggtggctctgactggatgcccctgaggcaggggagtgccctctgtgtgtgttgactttggaagtgaaatcagccatttggttccatatgcctaattcttagttttttaaactcagtcacagtagtggtgtttgaccctgcttgtaatcctctctagattacatgttcatgcataagtttctgttgaaccgaagtttaaccctctgtgttaccattccctcccttgctttggagcagactgaaagggaattgcacaccatgatactatttcctgttcatttgcagctatttttgttcgcttatcattcatacttcatttgtgttcctaaatgttattactgtgatgcgttttacccattttgtaattgcttttgttgttttgagttgaaatcccaggcttttactccttcattcttctctccttgtaacataaatacatgttaggacaggaatgcagcaaacagctgtgtgtctgggttagatatgttaaatttcctggtgtggtattttctctttgtctttttttttttttaatgtacaaaaatcagcatataccaagtgagaaaccaggggaacagtaggaattaaattccacttttctaccattgaaacaagagcacttaagatctgtgactacttagttctaactgctttaaaacacatgaataaggcagatgagagagctcagttttgacgtcatttcctaccatgtcaaccacctggctttggtgcatgtgactcacatggtagaaagaaagtacagacctttccacggctgttttccatcctccacgctctgtgtgcacattatcccctcacctgcaaaacacacgcgcgtgcatatgcgcgggcacacacacacacacacacacacagaagcagacacatgcacgcacacatgtatatacagttgagtaagagcatattaaattaaaaaaaaaagaatttctacaaattaatgaaccttttaaaagcacaaacatggtaggacttgtctagtttgttagaaatatatcaagtgtcagccaggtctggtatctcaggcctgtaatctcagttagtaggaaagctaagacagaaggattgagaatttaaagcttgcctaagccacggagtgaactcaaagccagcctgagtaatttagtgagaccctgtctcattagaagggctgggtttgtagctgagtgttgaggacttatatagctaagtgtgagactccaagtctctccccctagggccccagagaaggaaataaaaggaggcaggagagacctgtcaattcccttttgtttatgattttggtttgaggatcaaaggccaactctacagggccagctgagtcatcttaggatttatcttaattcccgttcagtctccagcaaactcacttcacagacacatctggccacacaggctttctgccttcgtggctggttctcacctttaatagtcctttaagtcaaacaagactcatagtgctgggatgtaaagtccattttagtgctagtaaccacttcactcacacttccctgccctcacctcctggtttctgttgtgtgtgcgccagatctcttggcgcatcttcacttctgaagagtaagctcttcagtgggctcccctgtcctgggcggtgcccacagcacgcgagccttcactttactcgtcactcttcttccagtggggcagctttttgtagagtgatttggtctttgtcagctgctctgccatgctttttgcactagcttttgtattgattatgtattgaaaacacacctggaagcaattcaagagatcagaattcagaggtgaccttaaaaggcccagaagccagttgagtttggggaggcagaaagccctccgcctcctcctcagatttgctgatgcttgtctctgggttctgtctacagggcatttgtgtacttgagcaacctgctgtatccggtgcccctgattcacagggtggccattgtcagtgagaagggggaagtccggggatttcttcgtgtggctgtgcaggccattgcaggtgagttagaaaaagatgatcaaagccgggcatggtagtgcacgcctttaatcccagcactcgggaggcagaggcaggtggatttctgagttccaggccagcctggtctacagagtgagttccaggacagccagggctacacagagaaaccctgtctcaaacaaaacaaaacaaacaaaaaaaaaaagaaagaaaagaaaaagcaggctaagggttggagtgatgactcagcagttaagagtactggctgctcttacagaagactcaggttcaattcccagcatccacatggcagctcacaactgtgtaactccaattccaggagatctgactccctcacacagacacatatgcaggcaaaacaccaatgcacatttaaaaaaaaaaaaaacaaaagaaagaaaaagaaaaaaggcaagctagcttcttgatgcaggtgacacttcagtcgcatatgtaggtgggggtatgcttgttcagcttggggaggctgccattagcttcctttctgttagctttacccccctccccagcactcaagtgtcacttcagtgggggatattgctgtatcggggaaactggtgggtaacataaataactcttggattgacttggtagaagcgacgagcagtttagacaggcgtagcggattgtgttgtttgacgccaagctgagcgccagagtaagcccctccccccacgcgtacttccattcagtccttgctggctttctttctgtttagcggatgaagaagcccctgattatggctctggaatccggcagtcgggaacagctaaaatatcttttgataatgaatactttaatcaggtaagaagtatttggggaagaaggaatgaacaccttgaggaaacaaaaggaagtaaatggacttttgaggaaagtatccatgcgggcaccaattctctggtctaaaactctagcaactctaaggtgttggttacaccacagttactcagtgaaatatgagatgtgtctaaaagttacaaagataaaagtgcactagcacattgccttttctcagacaactcttagtccatttcattattattttgcaaaaaatagtttgttgtacaaacagaaatcagttaggaactgggagagcgtgtcccttacctagcctgccttactttcagagtgacttctcgtcagctgcaatgactcgttctggtctgtccttggaggagctgaggattgtggaaggtcagggccagagttctgaagtcatcagtcctccagaagaagtcaatcgaatgaacgacctgggtgcgtagaccgatgactgtcactgaggagactctccctgggaaagcactgagtacacagataagcagcatggtggctttggcctactagacacaggtagaacgcccgttccctccctccctcccttttatgttacttgaaccatgtgtcctttaactctttagatttgaagtcaggcactttgctggatgggaagatggtgatggaagggttttctgaagagattggtaaccacctgaagctgggcagtgccttcactttccgagtcactgtgctccaagccagcgggatccttccagagtatgcagacatcttctgtcagttcaagtaagccacccgtgttagttccttctctattgctgtgactggacactctgacaagaagcagcttagagaagaaaggttcaatttaggctgtgggttcagaggggcagagtccatcatgcagagaagatggcatggcagtgtgagcaggaggctggctgatctcattttcactcactcgcaggaagcagaaagaaagaacaagaatggagtggggctataaccctcaaaacctgcccactgggatgaatctccccagcacggctctcctcttccataacccaccaaacagctatcaactgggaccaatgtccatgatggggacatttgtcattcagaacccacactgcctctcacggtgccgagcgagcaaggtgttaacggcagagatgctcttctctctgtagagataaaacatgacaagtccctgaaagaacactttcgtcactcaagatgagaataatagtcaaaccctatgtgggaatgagtcagggccccacatcccactagagcactccgtgttgtccccatattccaggaacagtgtctgatccagagaagcctgctagttttcagtgcttttaatgctgaaatgtcttcttaaaaaacaacagttaaacaaatggtctacccaacagttttacgtatttagcactttgtaagtaaaagcaaccactgtatgagtgtgtggatgttctgaagcgttagaaaggacttatcagtgccactgagagggtggttccggctcactagtgctcagcggggcctctggcagctgtggtgtataaggccaggagaagaaaaaattcagtgggggttgtggaacaagaagggaaggaaaggacaggcctagtgaaaagaaggaaacagacataccacctaagggactggagggaagatacagtgattaagaatactagctgctcttccaaatcgggtccaattaccaggcacttacataggggcacacagctatttgtaacacagttccagagactctgaggccctcttctggcacatgtgggcacaaatgcatatccatgagctacacccgtcttagttacagttttactgctgtgaacagacaccatgaccaagacaactcttatgaggacaatatttaattggggctggcttacaggttcagaggttctgtccattgtcatcaaggcaggaacatgacagcatccaggcaggcatagtgtaggagctgagagttctacatcttcatctgaagactactagcagaatactggtttctagacagctaggttgagggtcttataaccccacacacagtgacacacctactccaacagggccacaccttctaatagtgccgctccctgtgcactatcacaacaccaatcacatagagtaaaataatctatacataaaataaacagtttaaaatgtgtgggtgtttgggttgttttagtttttgttttgttggtttttttcgagacagggtttctctgtgtaaccctggctgtcctggaactcactttgtagaccaggatggcctcaaacttagaaatctgcctgcctctgcctcccaagtgctgggattaaaggtgtgcgccaccaccgcctggcaaatgtgtgtatttttttttaattatttatttattatatgtaagtacactgtagctgtcctcagacactccagaagagggcgccagatattgttacggatggttgtgagccaccatgtggttgctgggatttgaactcaggacctctggaagagcagtcagtgctcttaaccgctgagccatctctccagcccccaaatgtgtgtatttttaaaaagagttcaaagaaagatattgcataagcctgggatgtggagtgtcagtgatctggagcactgggcagaggtactgtctcctcagacctggtgaactgatgtgacagtcaagaccaaactactgatattttcctgctgctcaaaatctgttcaccctttggagactggagtccggctcagtggtgaagagcacttgctgctcttggagaagacccagttcagatctcagcagacacagagttcgtcgcaacgcaaccattctaaactccacctcttctgatcaccgtaggcatcaggcatatatgtggtacacatgcatgcatgtagtacatacacatacacgcaaggaaaacactcatgcacttacatctaaaccattttttttaatgtattctttttgccatttggccgtttagagtgtcatctgtgtgtcaagccccatgggtgaatactgctattttctggagaaacaggcacacagtgcatctctgtcacttttgagaagtaggtctctgctgccatcagaacacaaaaccatggcgtttatgtcaggatacttcctggaagagatggcttttgagcatctcttgtctagacagtagattcctaggccagtttaccatgggcagtcttactgttcttacagaggctcaaatttccaagttttctatatatagtaggatttcattttcagcaaaacaaacaaataaaacctatgaaagaacaagtctttattctttgctaattttttttcaggggatgtgggtgggtttgcttgatttgggggtcttggtggagttggtatgttcatttatttttttaggttttgggggtaggtttgttcatttgggtttgggttgggggtagttggcttgttttaagataggccttgagctctgcagttctccctccctcctctcttcctgagtgctcgtcttccagtcatgcaccaccacgtcctgctacaggagttgacttctttactctcagtatctctgtaaggcttataactccagcttgtatatatgtccacttacatcaataatcagggtgctttaattcctcagccagttttgaatctgaaatactctctgtctggtatggaaaacgctgacacacaaagagataatcatttggctcagtaaaaacaaacaaaaaatgtgctttgttagtatgtttctacctgtagagtgcaaagtgagctcttaaaacagactttgccagacacagtagcacactgtttaccctagcgtttggaggcagaagcagacagatctctgtgagtttggggccagcttgggcttcatggtctgatgaattttgatgcagtatttatctgtctgtctttttattaagctttttgcatcggcatgatgaagcgttctccactgaacccctcaagaacaatggaagaggaagtcccctgggcttctaccatgtacagaacgtgagtaacctgaatattttgccacgtgtctctcaggttttgttagccaagggaggatggtcgtgtaaagtgtgagctgtcctttgtgcttggatgggggagctctgcagagagaatgagcagtagagatggtggccaggacagtgaggcagtcttcagaggaggaacagcaaggtgcttaccaaatcatgggggccactgagtgtgtacgtctagtctcccagtgaaatggtccctcaatttgaatatgattttttaaaagatttatttattttatttatatgagtacactgtagctgtcttcagacacaccagaaaagggtgtcagatcccattacagatggttgtgagccaccatgtggttgctgggaattgaactcagaaactttggaagagcagtcagtgctcttaactgctgagccacctctccatctcctgcctttctttcttccttccttcctttctttctttctttctttctttctttctttctttctttctttctttctttctttttttgtactctataaagtgaaagagagaggctgggactatggctgtagcccagttggtagagtactcacttcacatgcacgaggtcctaggtttgaactccaacactccaacaaaaacaaaaatttgaaatatagaaagtcagagaaaaagggacaattaaaataaagcatgaactttggaggtagagagatggctctgtggttgagtatgtgtccactcttgtagaagacctgaattaggttcccagcccacatctgttggctcacaactgcttataactccagctgcaagggatccaaaaccctcttctggcctctgaggacattcatatactcaacatgcacacatccaaatgtatgcacatacctataactaaaaataaaagatatatttgatgaatactgatcagccatttaacaagcctctgattcataaaaccacagaagtccccaaggagcttagaactaataaggagaactatagatagagtatggagacctgagaatgagtcagtaaattcaaaagggaacagtttttttttttaagatttattttattaatatatgtaagtacactgtagctgtcttcagacactccagaagagggagtcagatcttgttacagatggttgtgagccaccatgtggttgctgggatttgaactctggaccttcggaagagcagtcgggtgctcttacccactgagccatctcaccagcccagggaacagtttctatatgggaaaatgttaagttgctttcctgtgtgagggaaaatggttatgtagaaagagaaggtagagagaaataaagggtgaggaaaaaaaaaagcaggtgtgtcaaacttggccttgcctttgctcataggccacagccaacacgtgtttttcttacctcttttaccaaccacctgggctgtggggggagggccttcccagcagattcctggccattcctgagagaaagcaggtagaaagagcaacaggcaagtcgtgaaacagtgagcatcagtagagtaaggccagttctgctgcactgtggagggtctaaaatgccaaagcttggttgtcttagtagtttagggttttactgctatgaacagacaccatgactaaggtaacttgtaaggacaacatttaattatggctggcttacaggttaagaggttcagtccattatcaaggtggaagcatggcagcatccaggcaggcatagtgtaggtggacctgagagttccacatcttcatctgaaggataatagcagaagctaggatgagggtcttaaagcccatgcccacagtaatatacctactccaacaaggccacaccctctaatagtgccaccccctgggccaagcatgtacaaaccatcacattggcaaagtgacattggagtgaggagcagaggaaagcctgtcctgtgtggtgggacgcccagcatgcccaggatgcttcacagtactgaaggctgctggaagcacacccctgtgcccccctgtcaccatcctaccctaagctcacctcacggtcttcttcctagattgcggtggaggtcacagagtcgtttgtggactacatcaaaaccaagcccattgtattcgaggtctttgggcactaccagcagcacccactccatctgcaaggacaagatcttaacaggtctgagggagacgggcaaaaactttctcctcgctgtttgggttttagttccttgcttcctggaaaagaactctggggggttttttgttggtggtttttttttttttttggtgtttggtttttggagacagggtttctctgtatagcccaggctatcctggaactcactttgtagaccaggctggcctcgaactcaggaatccgcctgcctctgcctcctgagtgctgggattaaaggcatgcgccaccacacccagcttggaaaagaactcttaagggatgcagaagagttgtcactatgattttgtagctaaccaatcactaagttaacttgatgaagagcaagctgaattctgtccagatggctttaggcaccttccttttgttataagaagaaaagtttaatagagtggaaagtcggtccagcagagctagaatacacatgtggttgtttctgacagcctttcttcaaaacgcagagactcacagtggagtcattacagctcatgagatcagtggcataacttttgtttttgtttttgagacagggtctcttaatatagcctttgtttttgagacagggtctctttatgtagcctttgtttttgagacagggtctctttatgtagcctaggctgtcctacaactcactatggaagaccaggatgtcctcaaacttagagatcagtctgcctctacctctgtctctgtctctgccagtgagtgttgggattaaaggtgtgagccaccatacatggcagtgacgtgaccttttattggtggaaatggcagtgccagttgaaatttgcaggaggacttttatcaaaatgtgttggtctctgtgtggggttgtgttgggcatctcttttcttaagaagatttaagcacagaatgcagggggaatgggtgcaagcctttgattccagccctggagggagtcagaggcaggcagatctctgtgagttcaaggctagcatgaaagaaaacaaaagatttaagcatgcatgccattaatcatggacactcaccccattacctcacgatgctctcttcctctctttgcagtccacctcagccatctcggagattcttccccccacccatgccactctccaagccaggtgagcagccactatgctctctcatgcgcacacatctcttctgaagagtttccagacaaggtcacactggagttccttctctgtctccttgtgttcctgtctccttgtatatttctaacaggaacaggagtgcttggctcctgatctgagatgaggtcagaaataattaggctctgtctctctgctcatctcatccagacttgaatattttcccctccttcttaaatctctctgctttatatgtgattacttctgtcagtaaaaacattttttggccaggcgtggtggcacacacctttaatcccagcacttgggaggcagagacaggcggatttctgagtttgaggacagccagggctacacagagaaaccctgtctcaaaaaatcaaaaaaaaaaaaaaatctttgcatattaaatttattctatatgtttaattttgttgttgggacttttatttttgatttatacatagtaattgtatatacttatgatataggatgatgcatttgtaactatatattttgaggaacacatatacactcacacacacacatacacactcatatacatcttagtataactagcatatctgtatcttaagcatgtctcatttgtttgtggtagatatattcaatttcctttcttgtagcactttgtaaatgatgacaggtaccctattatacaatagaatgccagaatttgtttctcttcatttagcttgttttcactttatttttgttcttttccctttctgcccacttaccaaatccccacccctgccctgcactcattctcctccctctacctttcccatccccatcggccttcagagcatgaaagaaagattgagctgatacggtttctcatggctggctatgtgaatgtgcatgtgttggatacattctctgagcacgccagcgtgctagcttcctctgctgttgccaccttccagaatgaggctggttcactgccgccttttctctttccgccagctcccagcttccagaatgagagggtacccaagcaatatggttagtagctaaactagccctgccttagatgtagaaccaacttggacatatgtgaagcactgatgtctctgtttgttccctagctaccgtagagctcttcacattgtcaagatcacatcacagttactccagggaggctgtagggaatacctcttacctcatctctttcacctctccctgaggataagatgccttgattgtcccccagagacaaggtctctagtccaggctggtctgaactgcctctataggtgtggatgatcttgagcttctggcccaccggtctcatccatagagttgcctgcacagtgtgcgcctcctacccagttcagggagtgctagggattaaccctagaacgtcatctgtaccaggcaagcatgcttcctgcttacctacatcttcacccctcctgatacttttgtttgtattattttgcaatagtatttcatattgtgatttttttaaactagtagttgaggggttttttgtttgtttgtttgtttttgttttgttttgtttttgtttgtagtgttaggaatcaaaccctgggcctggagcctgttagtcattttatcactgaactatggcctggagcctgttagacagtcattttattactgagctatgctccgtccctcttcttctcttccatcttccctgcccctcttcctttcctgagtacttgggtttgcttacggagatggctgccagaacagtatccagtttccttattagaagccccagcacatgtgaagcacagctgatgacttccgccaagaggctgttcatttgagaaatgctccatgattgttgaagctccttcatatacgttatgctaatgagtcttcacaatacttttcaaagtagggggctaaatatgacccacgaggcagaatcacacccacccagaggcactatgatttgtttcactggggtgtgaccctcgattttaccatctttaaactcttggtgattgttatataggtggaggtcaggagatgtgggttggcagacgaccccagtgacacgcaggccctccctggtggctcctgagcatcctctccccatgtggctgtgatgggatagataccgtgtgatgggataccatgcccccaaacaggaaactctagaaaacaaaggatttttaatgatttaaagcacatttattttatttaacaacaacaacaaaagagccattttctcatgtttagaaactgttttgagaaggagtcagtgctctggactggagacactaatgacacttagtgtggaactttccctgcatctatcctcacatctatcctcttaaagactgacactaaagatgcttacacttttgttgagttgactaggaacagattttgacatgttataaacactttttttaaagttccagctactaagttaaacaccatgaacaaaaccacccttgggcaaagcatgagcaagtacgaccttctggtttggtttgagatcagtgaactggagcctactggagagtaagtccaattttaaatacatttctcaataaagtatttcagaattagagagatagttttgagcctgtttgggtccctgcatcgttgtcctgtccaattcctctttggattgaaagtgggtgccttgctacttgtctgtgagtgaggcatttgccagaggccgtcgagggggattgtgtagcagcagcaatgtgatgggtaccagatgcacctgcttgtgagggaagacagcagcatggtgcttctactaagactgctgaacagattggaggaacaggctccaggctcagatggaggtttctgggggctggtgagaaggctcagcacatctgggcactcgctgacaagcctgacgatctgagtttgatccctgggacatacacggtggaaggtgagaaccaactactacagattggcctccctccacacatgtgccctggtagtgtcacacacacacacacacacacacacacacacacacacacaaatgaatgaataaataatgcaatcttttaaaattagaataccaatcccaatgaggcctgtggattaagattttattttattaaaatgtaatccctggattaaaattttccacctttccaatattgagaccactatggcattgtaggatgttttgcagtacctttggcctgtacctgtatgaaactcccttcagttgtgttgaccaaagatagcccctaaaaaagagccactcccctaggttaaggggatccacataagctttcttgtctttgtgagctgggttagaataaataattagtgcaactgttgtttatagttgtttctgaaatgccttgggaaaagcacaaaagagaactactcctgaaagactcaagcagctacaaccattagcccagattagggaataactgttagtgtagtgttcctctgggtatcatgcagtgaaccaccgtcagtgatgatcagctccgttaactgctagtgtctgcctgccgggcgtggtggtgtacgcctttaatcccagcacttgggaggcagaggcaagcagatttctgagttcgaggccagcctggtctacagagtgagttccaggacagccagggctatacagagaaaccctgtctcgaaaaagcaaaacaaacaaacaaaggaacgaacaaaaaaaaacctgttagtgtctgctgtgcttatgaccctgtgtcaaatagagttctgttactcctcagttgacagtcgtctgaagactgtggctttccataaccagatgtgcagccttaaaagttgttaagtgatggtttctgctgaagtgattgctttctggagctttatagttagaactggaagttgtctatttccaattttcactcagttctgtaacattcattatttactgaattattatgcaatagacagagatggaagaaaaaatatggagatcttttcacactccagtcaagcagagacgctgagatatagatatgtacacgtgactctgtggtgacatgcctcacggggtcagatgtggagcagagtgtagaacaacagagatttctcttggctacaacccaggaagacttggcaggtgaagtagttctaacttctgtcttttgtgttttatttttacaggtatattccagctgtggttgaccatactgcaggcctgccctgccaggggacatttttgctgcaccaggtactgacatctgagacagaacaacagatttctcagttcttcatctatatttggagaggaaaatgtggaaggacatttttgtttgtcccccccccctttttttttttaaatcagggtaggaaatagctaggaattgaatacaaaacatcaaatactgtttctgtttgtattagtcagagttttgtcgagtaatagaacttatagaatcagttgagagagagacacagatagagacagagacagagagacagagtgagagagacccagagaaaggaggtttattagaataacttgtttttggttttttttttttgtttgttttgttttttgtttttgtttttcaagacagggtttctctgtgcagccctggctgtcctggaactcactctgtagaccaggctggcctcgaactgagaaatccacctgcctctgcctcccgagtgctgggattaaaggtgtccgccaccacgcccggctttattagaataatttgcatgctgtggtccagctagtccaataatccagcagttgctcagtccaccagactggatatctcagccggtcttcagcatactctggagtccacaagaagtagtgtgtaatgcctgtgaaggagtggccttgctaggaagggcaagaacaagcaggcaaaaaacaaggctgccttcttctgtgtctttctagagaagatatggtccagaatacatgcgtgtcttcccaactttaaagatctggaatagctggctagtggtggagcaagcttttaatcccagcatttgggaggcagaggcaggttgctctctgttagttggaggcctgcctcctgatctacagagctagttctaggacagccaaggctacaaaagaaatcctgtctcaaaaacaacaacaaatctgaattaaaggtgttcccacctcaaaggagtagatcctctacttcagattatttaactaagcaaaaatatgtgtaaatatattttagattagccattgtgaaaaagggtccgggggaggcctccctccaaggcctcatctttgacagtcactcttagttggtgattgctactgaagtctctctcctttatggatatgaatacaggtaagtggtcccttccctgcaaaatgaccccgcaccacacagtgttcagcacttattggctggtgagtgttggcaagaaaggaggatgtgaaactgggagggtgacagacaagtggggcgttaggaagagtggagagaggcagtggtagatggctgtggtcagaacacattgtaccaaggtatggggacaatggagttcaatgacatctcaatacttttcatagcttgtgtctcactgtcgtttagttttgtgttcttagtccatttgtgatggattcttatcctgtcctccagctggcttccaactcctagggtgactctcagcctcagccttgatcatggggtagcaggtctgagccaccataacctgacaacattttttgtttttaaaatttatttatatattatgtatacagtactttgcctgcatatatgcctgcaggccagaagagaacactagatctcattatagatggttgtgagccaccatgtggttgctgggaattgagctcaggacctgtgaagagcagtcagtgctcttaaccactgagccatctctccagcccccgccatgggggcttttgatttccttgttttgttttgttttgttttgttttgttttgttttgtttgtttcttctcttgtttggttttgactgtaggccattaaatctgaagcccctttcgcattaggcaagttctctaccactgagctatgtccttgacactgtatttttgtagcagagtcttgctgtgtagcccaggtccttgaatgtaagagatcctcctgcctcggtcttccaagtactcagattacaggcatgtgcccccaagaccagccagaagctccccatgaggtcagtgatgaaagtctgaacagattaaaaacacactttgtaaatgtacactgctcatttggtaaaataatattcaaggcctggtgtgttactacacttataatctcagcattcaggaggcagaggcaggaggattttgaagtcaatgtcagtgttggctccttagtaagtcttggccagtttgagctacatagcaaaatccattctttaaaaaaaagtgggggctggtgagatggctcagtgggtaagagcacccgactgttcttccgaaggtccagagttcaaatcccagcaaccacatggtggctcacaaccatccgtaacaagatctgactccctcttctggagtgtctgaagacagctacagtgtacttacatataataaataaataaatctttaaaaaaaaaaaaaaaaaaaaaaaagttagctgcatatgtatcaaaagatggcctagtcggccatcactggaaagagaggcccattggacacgcaaactttatatgccccagtacaggggaacgccagggccaaaaagggggagtaggtgggtaggggagtgggggtgggtgggtatgggggacttttggtatagcattggaaatgtaaatgagctaaatacctaataaaaaatggaaaaaaataaatattttctccaaaaaaaaaaaaaaaaaagttagccaatgctcaaaagtatttcttatttggctgaagagatggctcagtggttaagaccaacaactgctattccaaaggtcctgagttcaatttccagcaactacatagtggttcacaaccatctgtaatgggatccaatgccctcttctggtgtgtgtgaaggtagctacagtgtactcaagaataaaaataaataaatcttttaacaaacaaacaaacaatttcttgtccaggtatccatgttgcagggagcttcatttccctagagcatattacagggtctcagtcaatctgttagtctatctctgcttccccacctttgcgagtgtatctgcctgtctgtctgtcccagccccacccctgcctctctttctctctctatctctttcccaggatgtatgaattcatctggcctcaagcttcatactgtgattacaggtgtgaagctacaaagggtctcttaaaaccaggtcagcaactggcttgttcattttctaacacattctcctaaattgtaatcttgttccattgcccagggcatccagcgacggatcacagtgactatcatccacgagaagggcagtgagctccactggaaagatgtccgtgagctggtggtaggtgagtgcattccatcagctgagggagcctggcgttttagaaatggcatcattctgtgctcagtgcaggagaggtatggaaaactggagaacacaaagtggaaaaaataaataccttgaatttgaagctctctctctctctcctgatggtggggaggagggtcaagacagggtttctccatgtagtcttgcctgtcatggaactctcttctaggctggcctcgaactcatagatctgcctgtctctgcctcccaagttctgggactaaggtgtgcgtcaccactgccagacatgtcggaagctctcttgagtgctgggtttgtggctcaggaggagaatgattacctggtatatatatatatatatatatatatatagagagagagagagagagagagagagagaggtgtgtgtgtgtgtgtgtgcgtgtgtgtgcgtgcatgcaggtatgctaggcaaatgctcttccactaggatacagtactgatgattgaaccaggggccctgcacatgttctaccaccaagctactccctcgtacgtttttttattttaacgacactatgtaactaagctgcccaggctggccctgaacttgtggtcgttctgctgagttgttaaaatgataggcctgtgccaccagaccttttgatttaacaaaattatgccttattttttaatgtacttatcttctggtttcttttatcccttcttttaggtcggattaggaataaaccggaggtagatgaagctgcagttgatgctgttctttccctgaacatcatctctgctaagtccctgaaggctgcccacagctccagcaggtaggatagacaccctgagcagcagaagtgtcggcccggtgttgtgtgacgggctcacattaaaaccccgtttctagcgactattggtgcaaatggagaaaggactttcctttttacttcagaaactctgctgtggtgctgttcccctttaatcccacgtttgggagacagagactagaggatctctatgagttcaaggccagcctggtctacataggaagctacaggacagccaggactacatagagagatcgtgtctttaagtaaataagcaaacaaattctgttttcagagctggaaaagtgactcagtagtaaaagtgtttattgctctcatagaggacccaaatcccattcccgtcccccatcatgtgactcagggcagcctgtgattccacctccaggtcaggttattgtcttggagaacactgcctttgcattatggaattaattctctgctgctttatgccctggaaaacttgcttatgtgagtgttgggaaaagaggggggtgcgggaataagacaggcagaaacagaatgaatagttttgggccaagattaattttttttcttatatcgcagttttgtataggagaaggaaaaacaaacaaacatgtttttctgcatgtaaggagagctgacagggcctgtgagaagggggccgagtgcgagtgggtgttgtatctggggagagggtgccatcgcctcttcctgggcagaccatacataataccatgtctctgaagtcagcagagacacctcacgcctcacttgccagtgttcagatggcattcatcactgttgccttccgctgctaaggagatggtgttgggttgaaaccctgacggggctggacctgcttactctgagatacccttgaaaagtcctccagcctgagcccagcagcagctcaggtgctatatgaagtgaatttggcttcagataagttggctaaagttgagaataatgaaagatagacaccttgaactttttagatctatatacattttactttgtgtgtatgtgcaaagggtgtgtcagaggccacacaccctgctggagttggttctcttcatcaacaacatgagtcctgggaggcacactggggccctcgtctgctgggttatctctccagcctcaacagtgtttgtattaattgaagctttgagtgtacacattaagttatcaattctttcagtagatcaagtctttcctttaattatggggttatttgttggactactgactatctttcactcctactgtatcgtgtggttttacagttggtggaacaagaactggaaaccaaagggaagagggttagaggattgaaagtcagagctgttgtgggccacagagtgaaagtctgtctcaaattcaagaaaaatctcatctaaattcaacagctattaaacaattccacttttcgtgttaggaaaaatcatttaagttggtcttcacagaaagttctttttacctttatatttgattgatacgcctaatatctaattaaatgtaaattattataatagtaaacacaattgacataaaaagatttaagaaggctagagaaatggctcaacagttaagagcattgactgctcctcaagaggacccaggttcagttcccagacccgcactgcaactcagaacttcagttgcactgccctttctgagctcccctggcaccacacacacatgtggtacacttacttcatgcgggaaaatacttatatacatttaaaacaatgtttaagaacaggtatattctagaactcttaagcaacccagtttttaaaattaattgtctaggtatatgacacacctctctagtttagaattattccagtttggagacagagaactgtttagtcacttgtcttattgctatgaataaggaaggcgaagttgattacagctccagaatataggctgtcatgtaggcagccggagcctgaggcagctggtctcactgcgtctgcagccaaggagccgagatcggtgagcactggtgttgagtgtggactgcagccatggagtggcacaggtctcatgagggaggctctttccacctcagttcacttggcctggacagtctcccacgcgtgcctgcagatttgtctccgaggagattctaggtcctaccaagttaacccagtgttcaccatctcaggctcataggttaatatggtgagttgctgttgaggttatttaagggctagtgttgaaagtaatgtatagatctgcagattggttgtactatatatgtgcctcagagggcttctctaacacattgaaagtagagagtaattgacaaaatcctgattccctttctgtccacacctgcccttgcgttaaccaagccttggctttctcttagctctacagcagttgcttaccatatccagtactaagtcacagcttgtgtgtgtgtgtgtgtgtgtgtgtgtgtgtgtgtgtgtgtgtgtagggggtgtcattaaagatttgatctccatattcctttgtagtccatcttttttcttttttaaaattttgctttttttagacaggatttctctgtataattgtactggctgccctgaaacttgctttgtagactagactggcttagaactcacagagatccacttgcctctgcctcctgagtgctggggttaaaggtgtgtaccaccatgcccagccattttttcttaatgaacctcttgagagaaggattcatgtcactttaagtcccttatcaaattgtgtcctagaattctccgttcattgtttgtcctctgaaattcagttcgcttcttagcattattttgccctttttaaaaaatattttttctctgtgtgtttctatttcttcgtatatatttgtttgtttttctttctgtctgtcttttggttgctggactaacgaaggcattttctgtttctgcaggctcttgcttgataaggatattcctaggtactttctgtttgcttttttttttttttttttttttaatttatttattaattatatgtaagtacactgtagctgacttcagacactccagaagagggtgtcagatctcgttacggatggttgtgagccaccatgtggttgctgggatttgaactccggaccttcggaagaacagtcgggtgctcttacccactgagccatctcaccagccccctgtttgcttttttgctcctagagattctagtttaccagctttatgtcttctgttgctttggttcctgttttaatccagtagtttctttcctgcataaacctaagctttacctagaacagagcacgaccttttttgtagcctaagaatgcccccagagctgtctgtcctgatgtgtgtacagcttcggatgtaacttctccaatgacttagtgctaaattattgtctcattccatttactacattttaaacacctcttcaggttgttcttttttacattctaaaatagaatcttttacatctcccgtgatatctcaggctttgttttctgacattctctcttccttccccctcgctctaccccacctctttcatagcttggaaagtttgctgcagatcacacttacttcattttgctctgtgcctactccacggagagcagattgactctttaggagttgagtctgcaagaaaaaatgttgttagttaaaaaaaaaaaaaaaaaacatagtctcaccggttagaccaggttggccttgaactcccaggattctcctgcctctgtccagagtatcaaggttaaaggcttgtgaaaggcattcagggaggctcatgccacctcagttgacaggagagtagttcccctcccgnnnnnnnnnnnnnnnnnnnnacacacacgagcgcttgcatgccagcataaagtgtaaccatatgtaagaagctggtgccgccatgcatggtatcagggcactgagggggcagcagcaggcagatctctgagtgtgaggccagcctgtgcagtatcgatggcatttcccgttattagaatttctataactaagttgaaatacttagcttttaaccacattctgagcacatgaaggtgttctgctgaatcgctaagccatggagaagctttccttgtccgccatttttgttgtacttagggtcacttgatgacccaaatctcactgattattgctgtgtgccttctgagtctggatagagaattttcttgtcccacactcattgccgcaacaacttgacactgagaaacagtcacattccagaaaagacctgaattaggacatctgcagatgggcatggccacgcctcagctctgggcactggaaatatgagctgtgggcagggggttccctttcagagaggtttctctgcccttgctttctggaggaagatgcatagggtgtgcttagagagaagatatgcccgttagttgcccttgggaatcgagaaagacagaactagggaggtcagcatttggaaaggtggaagggagaatgaggttggcaggcagtaggtacataaacagtctctctatgtgaggtggatgagctctgctcttcctgagagtgaacgttgggaggggatggggttggaagagcagcttccccaggaagtgtccgagttccaagaagaaatgacagaggcctgggaactgatgtgcagccaccagtgcggtgtgtctgtctgtctgtctatcgccaggagaaaaatcctcagactggaagaacttaaagcagtctgctaaatttaacttatgattatttcttaactataaggttgatttttcagatacatttagaaggaatgaatgataaaacctacctttagtgttataaaattcctctctactattaataatagatcaacttgggtttgttcgctgaaataatgtttttcataattcgattctgcctgttcccatggagcatctccggtatttaaagtgtctctaggagtctgcagaggcagccagtgaagtttagatctctgggatatgggacggaagcctacctgctactgagtccttactttttctgtttgtttagttggtttgtttggttttgtttttttgagacagtgtagccctggctgtcttcaaactcactctgtagaccaggctggccttgtactcagagatctgactgcctctgcatgcacacacacacacacacacacacacacacacacacacacacaatctccgggaattaaaggtgtgtgctgccacgcctagcttagtccttcttacctgttattaaaacagacagggcggctcacttggacttctttcagattctgtctacattcttcttactccttttaaatgttctcatagtttatgttgacggtggggctggctttgtttgagaaagagtcttgtgctgtgtccttgccagtctggaacttggtagactaaactggaaattggatcaaactcatctcagacttgcgcagtcctcctgcctctgcttgagtcttggggctgcagccgtgtaccccattcctgccagtgttgccactgtggtcatgttagcagtcaaaagctttatcaaaaagcagggatgaggcgctgcctctgttagggtgtgataaatggagaatggcagtgattggcatgggattccttagaacactgccagtagcaatccctctgctaccattggctacttcgggttgacattgtctttctgacctcaggaccttctaccgtttcgaggcagtatgggacagctccctacataactccctccttctgaaccgagtgacaccctatggagaaaagatctacatgaccttatctgcttatctggaggtaagggacccataacttgagcagaccctgggaagcaggcagtgacaggagcagtcagcaaaaatccagcttgctttttgatcccttcccctgggtattctttgttttgtttttgtttttcgagacagggtttctctgtgtagccctggctgtcctggaaatcactttgtagaccaggctggcctcaaactcagaaatcctcctgcctctgcctcccaagtgctgggattaaaggcgtgcgccaccacgcccagcttcccctccatattcttaaatggtttatttgattttactttgctagctgttctaattgttttagattctattccagggctctatttagtcaaaatagcacagcttttttgatcatttaagcttcaggaaaccaatcaccagttaagacagcttcataccatgttttcctgttcgtaacagagactagttccaggtcttggaacaagcctgagtccttctgttttttatttctttgagtctctgtatccaaggctcgcctcaaacttgctgtgtagctgaaggtgacttgttgctcctgtttctgctttccaggcactgggattacaggcatgcgtcatcatgcctgatctgagccagattctaacttttgccctgtgtcctctcatgagcttctatgtctcactttcgtttatttcttcctcctcctcttcttcctcctcttcttcctcttcctcttcctcctccccttcttttcttcagcttccttcttcttctctccctcttactcttccttccctcaccctcttctttctttctctctttatttctttcttttcctgttttatgttttgtctttcaagacagggtttctttgtgtaggcctggctgtcctggaactctctttgtagaccaggctcgccttgaactcacagagattcacctgcctctgcctcctgagtattgagattcaaagcagttgacatcacgcctggtttcttcatttttaaatagtgtgcaatgataggattttccctcaaaagaaaatatgcatttatcatatatatatgataaatatatatatgatataaatataaatatatatacatataccttatatataccttatattattatatataccttatatataccttatattattatctgttgagtggctttagaaatcattgaagcagaagcctacctctctccacagctggagccagctttcctgatctgctgctgctttccttatcagcctctcaccacagctgctctccttatcattcagcactttatcttgtctgtttgcagttggatcattgcatccagccggccgtcatcactaaggatgtgtgcatggtcttctattcccgagatgccaagatctcaccaccgcgttctctgcgaaacctctttggtagtggctactcaaagtcaccagactcgtaagtttttgaaacaggcttagtttccagttttgtcctagtctaacagaaacaccaggccttaggtaccccagcttctgttgcaagttagtttgtcatctataaacatttaagtcactgacatctgaatagagacgacttgcatggtagcatttcatacagtgttagagatgaaggaagaagaatgttctgtgtaaatcttctaaagcaggttaataaggactccttgtcactatgactcatatttttagtagattgccattgatattttcttctacgtaagagttgttgtagggctggagagatggctcagcagttaagagcacccgactgatcttctgaaggttcttagttcaaatcccagcaaccacatggtggctcacaaccatccataaggagatctgatgccctcttctggagtgtatgaagacagcttcagtgtacttacatataataaataaataaatctttttttaaaaaaaagagttgttgtacatatttaaggcacacaaaaatatacctttgagggctggtgagatggctcagtgggtaagagcacccgactgctcttccgaaggtccggagttcaaatcccagcaaccacatggtagctcacaaccatccgtaacaagatctgactccgtcttctggagtgtctgaagacggctacagtgtacttacatataataagtaaataaatcttaaaaaaaaaattaaaaaaaaatatacctttgagactgtgtggcctggatacttgaatatcaccactcatctttacgaataaataagaatgactataatgtagtaaggttgagtcccttcctgcagtgtccagaatttgttgctaatcatttccttccagtcagacattttcttctcttatgtcaagaaaagttcatagttttctcatttatgttgtagatttttctagtataccctgttctgttcatcatattgagataacagtgatcaaaatcatactgaaaataggcatctcctaagagaaaaaacgtaaataagcaaacaacagttagcgataaaaaaataatcagtgtcctaggaccagaaagatggcccagggtgaaggggcgtgccatcatgtgggcgtgccatccgcctgagccgcggaacccacatgatggcaccagaaactaactccccaagctgaccatcaacctacgcatgcgtacagaggcagacacagacacacacactcacagataaataaaagtgaaaatggtgtgtatctaagtgtggagttgtagccatcaagaagacatgctctttattaagtaagcaaacccagggttttcccagtttgtgttacaagaaactcaccagctgttctactctgtcttcaatagcaaccgagtgactgggatctatgagctgagcttatgcaaaatggcagatactggaagcccaggtaagctcttaccacaccatattcttcaggagtattacttaaaaaaattggagactcattcatgttgggaggaagaaagtcttttagtattttacaagccagttttatagtggtggagtggtaagatacactatttgatttatggcatatgatgtgattataaaaatggtgtccaacaagatacactaggctgtgaaatattaacttgttgagagaattagaataactttggcttagtgggggtgtggtggcacacacctttagtttcagcactcaggaggcagaggcaggtggatctctgcatttgaggccaacctggtctacaaagcaagttccacagacacacagagacgcaaagaaaccctgtctcgaaaaacaaaacaaaacaagaaaatctttggcttagaaagcatttctttttttacatgtttaaagatttgtttattttatgcatatgagtacaccatcattgctctcttcagacacaccagaaaagggcaccagaccccgatacagatggttgtgagtcaccacgtggttgctaggaattgaactcaggacctttggaatagcagtcttggaatagcagtcggtgctcttaacctttgagccatctctccagcccagaaagcatttctttttttttttttttttttttatttatttatttatttattatatgtaagtacactgtagctgtcttcagacacaccagaagagggcgtcagatcttattacagatggttgtgagccaccatgtggttgctgggaattgaactcgggacctttggaagagcagtcagtgctcttaacctctgagccatctctccagccccccagaaagcatttcttgagattggattttgttcaagcctgcagcctacaacagccccttgccttccaagtgttaggatcataggttctgagccacggagcctagctattcagaaaaccttacaactgcttactacactaccttaacaaagatcatttctcagcctcataccattgagcaacaatatcagctttgccagggaaattatcagaaatccatgtttatggctgagatacaggttaataatgataaagcatttgtttacttttcacaaggccctaggtctgaacccagcattttttgagtttttagacagggtttctctgtatagccctggctgtcctggaactcactttgtaatagaccagactggcttcaaactcagagatccacctgcctctgcctttcaagtcctagagttaaagtcatgaaccactacctcctaactttttattttttaatgaattgtgtgactatgtcccccagactagtatggaactcagtgtttagaccatgctagcctcaaactcacagggattacctgcccctggctcttccatgcatggatagaagatgtgtaccaccatacctggcatcaattttattaataaataaaatctcataggccacatttggtttgctattttaaaatgtgtaagagtaatttgttttgacttaaattggagctagatttttctctggggtattaaaaaaacaaaaaaagcacggtttttcttctgttaggcatgcagaggcggaggagaaaagtcttggatacctcagtggcatatgtgcggggagaggagaacctagcgggctggcgacctcgtggagacagcctcattctggaacaccagtgggagctggagaagctggagctgctgcatgaggtaccaagggcagcctgggccacgtcagggactcaggcaggacagcatccacccggtcctaccctgccttccctctgtgacccctgggcgctttgacttcctgtgatgaaagcataactgcatgtggaaacgcttactgggctcaggtaacgatgttcctcttgtcaggtggaaaaaactcgccacttcttgctgcttcgggagagacttggtgacagcgtccctaagtctctgagtgactcactgtcccccagcctgagcagtggaacccttagcacctccaccagcatctcctctcagatctcaaccaccacctttgaaagcgccatcacaccgagcgagagcagtggctacgactcggcagacgttgaaagcctggtcgaccgggagaaagagctggctacaaaggtggagaatcccttctgtttttgcttagagtccctaccagcaggcacggagacattctctctgtcccatcattcgcagcagctgtctttgaagacactgataatactcatactgaacatatgaaataataagggtcagtccttaccttcacagggctgtatcctatagagttggtattgtgagctggcctcggaagcacatgttaggggtattcagtggcttagggaagtcatgggatagagtgacaggaaatggagttgatcctatttgggcatccaacacttcacagaggcccagagggtcccggacatgatgtaaatatttcaaatggtgtttatttgttcctgcatattttaaacaagattacaaattctttagtaggactaatggtctatagctcagtggtagagtactttgcccagcacgtgcaaggccctgagtttgaccgtaagtatgccaaaaatacattaagctaatcaacaataagttttctttagcaggaataaaatggatagctttgtgagactgaggaagggagctccttgttacagtggtccactcggaacgcggggcctcttcagggaggggacggggagaaggcaagggttcaggatggctcctggctgtgcacttgccgtagtcggcgacagaggacagaaaacttagatggctttgtgtgtgtcttgtcttagtagtcaagtgctcttctagtgtgcttaggaaaacatgtccaaccagaagggttcatggttttggttttggttttccagtgtgagaaattgaacttaggtcctcatgtatgcttggcaaatactctaccaccaagctacattcccaactcaggtcttttattgaattgagaattagaaagatgtcaattcttttgtatttctgagacagtcttcctgtgttgccttggctgacctgaaacttgttgtctagatcaagctgaccttgaattggcggcagcctgtgcctggctgtctgatgagtgctggaattagaggtgtatattgccatgtctggttctgctgctatattcctagtgagatagggtttctctattatgttacccttgctgtcctgaaacttgctatatgtagaccaggctagtcttgaactcacagagatctgtctacccctgtttctctaatgctatcatgggccaccatgctctgctcctaagcacttctaagctatgtcagtagtcatttgctttggttgtattaaggatgattgttgaaatccatttgctttttactgccttaactagacacatgctagctttccttagcctattcgtaggtagcataggtataggacttattagttctccttgtatacaggacttcatttaaccattggaagtttatgttcagccctgactgactgactctctaccatctctcatttcagtgcctgcagcttctcacccacactttcaaccgagaattcagccaggtgcacggcagcatcagtgactgtaaggtgagcacgttgaggccattgcgtgtcacgggtgtggtgtggaccgttcccttttcagctgtccaaattgtcacaacttgtgctgcttttagaggctgcgatgggtgtagactgtatctgaaggggtgtgacattatgctctggcgtggcttctgattttgtcagaacactgacttctgaagttgacagatgccttctaggatgagtaggattgctgtcataggaaatatttaggtgtttgtttgtttgtttgtttgctttggttccctttgaagagcttgtgatgttgggcagtactaagcttttgtgtgaaatgaaaacatgagctgttggtggcattggacttaatgcgttgagcaaaaggtgatagctcctgagagaacctgtgtgtcctccatggcttgaccctttggcttttccttcagccttcgcagctcctgcctgcctgggtctctctgcacctcacatgccttcttccagacattcattcccatgcttgcctccctcatcatttctgctttctgctccaccattgccttcttgggagtgggcctctttcagcccccacagcaggccagccaccccctgaaacatttgtttatttttcctctttattattttaattttatatgtatgggtattttgcatgcatgtagctctgtgcatcgtgtttgtacctgatgcctgtggaggtcagaaaaagacgttggatcccatggatctgaagtcccagatagttgtgaactactgtgtggatgctgggactcaaacccaggtcctatgtaagagcagccagttcgctgggcgtggtggtgcacgcctttaatcccagtactcaggaggcagaggcaggtggatttctgagttcgaggccagcctggtctacaaagtgaattccaggacagccagggctacacagagaaatcctgtctcagaaaactaaaaaaaaaaaaaaaaaagcagccagttctcttaaccactgagacatatttctgaccctactatctggtactttttggttttgttctatttacttattcatttgttcattcattcattcgttcgttcgttcatttgggttttttgcgacatggtctaactgtgtatcatgggcctgaccatctggcacgttttgaaagtctgtctcccttcttcactaatgtatgctccgctccatgagtgcaggactttgccatgtgctttgaacaataggtgcttggcgtgtgtgtgcaggctgtgtaatagcagggagaattagagacacatagagcttctcattctttctctcccctccctcatctctctccttcctcctcctcctcttcttcactctggggacagaaacaagggtttggtgcgttgcctatgagcagtaataattgtgttacagaggcttgttttctttaatgactttgaatcagccttaaaaaagatggctatcttagacgacttttgctgctctctgtggcagaggcagacgtaaagtgcttgtcatataagcatgagaacctgcgttcagatccacagcgcccgtgtaaaaagagtcgcctctgatcccagggttgaggcggccgagacggcagatcctgggcttgctgctgcctagtctagctaacgttgagctccgttgtgctgctgctgctgagtctcattggtgctgcctttgttgtagttgtctgacatctctccaattggacgggacccctctgtgtccagtttcagcagttccaccctcacgccctcctccacttgcccctccttggtggactccaggagcagctctatggatcagaagtgagtactcagatttcacagagacaaagtaccagtttttctatagttctggattcagctcaacatcactgtcctattctggacaactctagagtgtgtgggcactttcttcatttaagtttattaactttaggttgttattagatgtatgaaattgttatatgtgctactaagaaagcagaagctagttaaaaacacaaatcaaatgtaagatggatccaaagaaatgataaagcatagaggcccaccgagatggctcagatggtgaagcgcttgctgtgccagcatgagaacctgcgttcagctccccagcatccgcataaaaagcatctgcaggggaacaggactggtctcagtgctgaggaggctgagacaggtggatctaagagctgggggacgggaggagtgtcttctggatgtggtcacctgcctgagacctgcataagaagaagccagcccatggattgggaggggctcagggggcccagttcctagctgaggagctattggcaactgatggctgctgggaaagagtcctttttctttgtggcatggccactggtccgtgctctagtatctggcccacgcctgtgtgagtgtagacagcactaactgaactcactggattactgacatgaagctggaagggctgtgtggtggtggagatgaccaaagtacattgtatagggtataaaactcacagaataaatagatactacataaaaggtaaaaacttagcacaattaagtggagaatgatagaggaaggcatctagtgagagaggaaggcttccacatgcatgagctcatgcatacacacacactcacacacacacacacactcaaacacacacacaaacatacccatgcacacatgtacgcacacacacacaaaaatagtaaagcttgcaaaatgaacctttttttttttaagatttttttattttatgagtacactgtagctgtcttcagacacaccaaagagggcatcagattccattatagatggttgtggttgctgggaattgaactcaggacatctggaagaactataagtgctcttaactgctgagccatctctccagcctcaaaatggacctttagaatcagaaatatacagaatcatcaggctaagctattctaggagacccctaacaaccagaacagaggcctaaagaatgatggcgttcactactctactcctctgctcttaggagccttctcagctaggtccaggttcttcttcatttgtttgctttatctgctatccacaagatgtgaactttttttttctaaaggatttatttatttattaagtacacggtattctgcctgcatttatgcctgcaagccaggagagggcactcgtcctcgttacagatggttgtgagccaccatgtggttgctgggaattgaactaatgagagtctggaagagcagacagtgctcttaacctctgagccatctctccagcccaagatgtgaactttttaaaaccccttagaaacttgctatagcacagtggccaagcatcttcctgtgtctctgactgggcagtctaccagtcccagagagagctgctgctgtcagtcaggggccacactttgagacccactgtgtcagttctggccatgagactgataggacactcctgagggaacacagttcctatcagatgcttgtgttctcaggactcagtggccccagtgtcctgttccacggagaagatgctggaatgagggttacctttctgacaccagcttctcttagctgacctctgaaactgatgtttgcctctggcacttgggcaggcgcactgtgtctggtgaggtcatgtccacagtggctctgacctaactgacgtgcttcttactctttgcttcctctgtaaggaccccagaagccaactctcgtgcctccagtccctgccaagaatttgaacagtttcagatcgtcccaactgtggagacaccctatttggcccgagcagggaagaatgaatttctcaatcttgttccagacattgaagaagtcagagcggggtgagtcctgtggcatgcaccctttctagctctgctgtgcaaggctgttccagcctagagcacagggctgtgctgccgtgtgcggtgggcatctgggcctagcacattgtgctgatgtgaccagtgatgatctaggccaactggatcattttcctgtcctggtgcatctgagggctcgcctagtggaagcatgtatcgatgggtcgatctcagcttactactgtttactttaggagaaactgacttcttttacaatgtcctttcagatcagtggtatctaagaaaggatacctgcatttcaaagagccactttccagtaactgggctaaacatttcgttgtggttcgtcgcccttacgtcttcatctataacagtgacaaagacccagtagagcgtggcatcattaacctgtctacagcacaggtggagtacagcgaggaccagcaggccatggtgaaggtcagtctctcctgacttggctgtctgatgctccctgtgttcttcccttttgagtctggcgttctagtctgtggcatggatcctagtttatatctgggttgcatgaactttcggtgtgaagtgctgtgcaccctgtgaatttggcaagatgttcctaactgttcattctctccaataactttcttctacctaatgtctcttcccagacacctaatacttttgctgtatgcacaaagcaccgtggggtccttctgcaagctctcaatgacaaagacatgaatgactggttatatgcctttaacccacttctggctggcacaataaggtcagatactgttcttttgcttcatttcctcatgctgagacagtctcactgtatagcccaagccagattctaagttctccacctcatcccaaggactgggtttacaggtgtgcactaccatgcctggctcgtgaaagctctttctcacatttacatgagtaggaaagatgtgtcgttctaactgggatgaaaatggaaaggaaggcaagggtacgatgatgagttacagggtgagacgagtgccctgcttccagtgcagtgtcgtgcgtcctcagccgtaaggacaccaccggtcctatccttcatctcctttaggtttcagttttcaggaggtctgcagaaggcccagagcaccgagtaaaggagaaacagtgctttaatggactcccatagttcaggctgtgtgagaggagcgcatctcacagagtccccagcgtaggaaagacctcatagctgtccctgggctactgttaggagtcataatgtccatatgtgctctgcaggctatctgctctgcgacccctgtgaaaagggtattcaacccccaaaggggtctcgagttgagaactgctggtccagccatttgtttaggagcgtagaagcctggcctgcagaatcggctgggagagaccagcatccactcttctaacgctgcctcctgtttttctcataggtcaaaactctctcgcagatgcccgagccagccaaagtactgagcgttctcctgagccttgctcaccttcgacagataaagaaagtgttacctctcattctctttgtgattcttgacagttattcttgtatgtaatcctgtggcttaacgacttttccctcctcaccctgcacttctctagctctctgttccctctccatggctctgactcttcttattcttgtgctaagacttgtagcatgtggcctaacaaggggaacaaaaccactacacgtccatacacactcacactcacactcacccacacccgaggggacccagcacatctccaaatgattctcctgtgtgcttcagcttcctttggatgttaggtccccttcacggtcactgtccgactgttgtctccgtagctctggttttcagggtaacttctctgtctctctttttctttcccctttgtttatgataatcttcttttttctgggtggtttagagactaagggaggagacatttggtattgtcagccaggagaagaaaacttgttaacttgtttctctctctctctctctcttcctctctctctctcttctctctctctctctctctctgtctctttttctctcagtgtctgtctctgtctatttgtgtgtgtgtctggtgtctgtctgtctctctctgtgtctgtctctgactctctctctttctctgtatgtgtgtgtgtgtgtgtctgtctgtctctgtctctctttctctttctctttggtggctaatccatgtgtttccattcagggaaagcactgtgggaagctcagaaatgggatttaaattctctgtctaaatcagggctcggagcatggatgtatagagtggaagatgcagaggggccttgtgattggcctgcaacagaggctgctgctagccctttaagactcgggctgctgcagtagattgggcagtgggtcacaagggtgactgtagctccttacagcagggtccagcaggcttgtctcctccctgggaaggagcgtttgtctaggagtttcccaactctagtctcagtgtcactgtttggaattaggtgatgtcatgaacagatttcccacaagagggactggggagtgtttgactttctggtgatatggaccattgttgctttgagagtgctgagtgcagcttgtgattgttgtcgctccctttgatcaaagacttgtagcttcagcataaatcttgaggtctccatctaaatccagtggccatttccagtagttctcgtctccatatgaacaaacatggcattgttttctggatgccagaactgaccagtccttaccaccactccaaacaaatcagaaggcatttagagtcgaaaaagattgtctcccagcagtttgctactggattgtgaaatgcctcctctgtgacatgcccccttcccccactgtcctcatctggtttggaaatactcccttaggaagaatttccctgctaccagtttctgtggcttctaacaaaccaggcctccgggtttaagaggttatagaaaataacgctcttcctccaccggccagtaagtgtcggggactgagtggggcacagaatgcccgctggggctacttgagttgctgtgccagtgacttggggagcattcacactgctgtttcctggccttgccagcctgtttcagcatcactcacgcacacaggaaggcatctgctcacctccagtctgcgaaggctcctggctacctgagggtagagaaggaatggatttccttctggtggagagcccatctccactgcagagcagccactagggaggcgagcatgcagccccttgcttctctctgaagaacaggactcccagcttcctttgttacagttgccttgcaaagaaaggaaaagtggaccatggagaaaaggaaaggaaaggaaagaaagcaaaagaaaagaaaggaaaaggcagaaatcagactgttcttatctaaaagatgctcagctctggtggatttttaaaactttctttctctccttaaagtataggttactaactgtaatgttacttgttttctaaacatatctatgagatttttaatgtagttagaagtctctgttgtctaatggacacagcatgtccttctggtgtatactcaaattcagcagactctgtctatgcctgtagacagtttcctggaccggaactaaatctaatttcagggaaacgaagatcaaaggtcgcttttaaactgaatcactgatgttgctgctgttaggaaggtaggcagaaggatccatgtctgtgccgagaggtgtgacgcctgggggagggtggcagtgtgcggcacactaaaccctgagataacttgttttcttttaactcaaacaaaactggtttagaaagtctttgctttgcaaatatcaaatgttagcatgagccaaactggaccccgccttcatcagaggccccttaaggagacctcattagaaagccagggaaagtaaggttggagcttgggcacctgtgcctctccctgctgtcactgggacccctcctactgtaaagcccaggatcaggtcagaatcggagcatttgggggctttatattctgtttccagacaaggtcacctgctccgaagctctgaaagagaaagggttttatggcaggacctgttcatgagatttttgtgattgccatagtagcaggaaagttaagagaactaatctttaaaataagtatttttaagatttttttttaaattttcaaagcactcctttaaacaaacaaacaaacaaacaaacaaaaaacctacaaggaaaacatacaaattacagaaaagtgagtgctggttaaaatgaattagtctcccccttcctttatgtctttatcctccttcctcccaagcagatatagcctcataactgtcccccgccagtgctcaggcctcgcctgcttctgggagacgaccctgggagtcagtcagctctcagtcccagactgtcagggaccaggcagtccctgcacaaggcgaggtgggagcacaggccagactgcttctgagcaggccctgatctccagtccataaatgagaaacttgatgaggtgagagctgaaggttcttcagctaagaaaccattatttttttttctcttcagctatgtggaatttgtatatctatcaatttttcaggttttttttttttttatcttgtttagatgaaggaatgaatggttgtgaaaggtgtttggggtctaaaacatgatttttcctggcacatatttcaaagcatagactttgttacctgctgcttcttgtctaatttacagggatatttaattttgtaaggtatttgtatatttatacaactgtaatgaattgcacattggactgaaaggggaaggctctgccctgtgtggctcctgctgggactctaggttgctgtgctttgactttcctgaacaataccaggggggtgtggtttgtttagcgtgggtccatcacttttcatttgggttccttttggaaaatgtaatctttaacttgctctgtgagaagaaaagaatgattgtgttgctgctcttggaaggtctgctgaatgcttttgagtgacctctggcactgtgtactgcctgtgatccaccaagagtgagtaagaccacgaccgtggagcaagtcagagatcgtcagccgagagattattgctgttactgttcaaaaggccatttatgaagtagatatttgagctctttaaaaaaaaaaatttaagagagcccctaattacttaaaaaagaaatttaagaaagaaattaagagttgatacagaaccggtgttaaaaactcacagccagaggttaggggtgttggttagtggtagggcacttggcaactatatgtgatgccattggttcagtcccggttctgagatcagacagaaagcctcacggtagatagctgctcagacaaagtccaggcagaggttggtcttgtgccaaaccctggatgttctatgttgtcatgtccttaactgattcttttcatgctgtgtattctgacatcaattcaccgaagggacccaccagcctcctcatgtttaagcattgtcgtagactttgtggctctgacatacttgtctgttgagagtggcgtctcctgtcaccatccccatgctataacagaatccatgaagcataagtggcctttttgaaccaagactttgcaaactgatctctccccagggaaggagttgagcacaagcaacaatgtacattattaattttggatttcattttcatgttttattttgtaaatatctaatgtttggagcttgagtatacaaaatgtaaatacagttcttgtatttgtactaatcctgattcttttgctgtatagccctagatgtgtaatgcagacattatctaactgtgtatggtaaccttgcatcacagaactgctagtgaacgaggtaaaaataataaaggtacaaccagtgcatca

SEQ ID NO: 743 - DNA, 10006 bp, Mus musculus
cgccgcgccccggcctcccgccaatcctcgatgcagagctgggcggccgcgtgatggggctgcggagcggcgccctgcggctcgcggcggccgctgcctgcgctgaggtgcgtcggtgcccggcctcccgcgcccctgcgcgcctcggcgtcttctgactcggccggctcgcccgtctgtccgcagcgcggctgaggaaccttgaacacaacttcaaaagaagatttgatttttacttctggactgcatatataaggccatcagaatgtcgggagcctctgtgaaggtcgctgttcgagtgaggcccttcaattctcgagagaccagcaaggagtccaagtgcatcattcagatgcaaggcaactcgaccagtattattaacccaaagaacccaaaggaagcaccaaagtccttcagctttgactactcctactggtcccacacctcgcctgaagatccctgttttgcatcgcagaatcgtgtgtacaatgacattggaaaggaaatgctcttacatgcctttgaaggttataatgtctgtatctttgcctatgggcagactggtgctgggaaatcctacacgatgatggggaaacaagaagagagccaagctggaatcatcccacagttgtgtgaagaactctttgagaagatcaatgacaattgtaatgaagaaatgtcttactctgtagaggtgagctacatggaaatttactgtgagagagtacgagatttactgaatcccaaaaacaagggtaacttgcgtgtgcgtgaacacccgcttcttggaccctatgtggaggatctgtccaagctggcggtcacctcctacactgacatcgctgacctgatggatgctgggaacaaagccaggactgtggcagctaccaacatgaatgagacaagcagccgttctcacgctgtgttcaccattgtctttacccagaagaaacaggatcctgagacgaacctttctactgagaaggtcagtaaaatcagcttggtggatctagcaggaagtgaacgggctgattcaactggtgccaaaggaactcgattaaaggaaggtgcaaatatcaataagtcccttacaactttgggcaaagtcatttcggccttggcagaggtggtaagtttcctagtaaaaagaagaagaaaactgattttattccttatagggattctgtacttacttggctccttcgagaaaatctcggtggcaactcccgaactgcaatggttgctgctctgagcccagccgacatcaactacgatgaaactttgagcacactgagatacgcagatcgtgcaaaacaaattaaatgcaatgctgttatcaatgaggacccgaatgccaagctggttcgggagttgaaggaggaagtgacccgactgaaggaccttcttcgtgctcagggactgggagatattattgatattgacccattgatcgatgattactctggaagtggaggcaaatatctgaaagattttcagaacaataagcataggtacttgctagcctctgagaatcaacgccctggcaatttttccacagcatccatggggtccctcacttcatctccatcttcatgctcacttaatagtcaggtgggcttaacatctgtgaccagtattcaggagaggatcatgtctacacctggaggggaggaagccattgaacgtctgaaggagtcagagaagatcattgctgagttgaatgaaacctgggaagagaaacttcgtaaaacagaggccatcagaatggagagagaagccttgttggctgagatgggagttgccatacgggaagatggggggacacttggagttttctctcctaaaaagaccccacatcttgttaacctcaatgaagacccattaatgtcggagtgtttgctctattacatcaaggatggaattacaagggttggccaggcagatgctgagcggcgccaggacatagtgctgagtggggcccacattaaagaggagcattgtctctttcggagtgagaggagcaacactggtgaagttattgtgaccttggagccctgtgagcgctcagaaacatacgtgaatggcaagagggtggctcatcctgttcagctgcgctcagggaaccgtatcatcatgggtaaaaaccatgtttttcgttttaaccaccctgaacaagcgcgagcagaaagggaaaagactccctcagctgagaccccctctgagcctgtggactggacctttgctcagagagagcttctcgaaaaacaaggaattgatatgaaacaggagatggaaaagaggcttcaggaaatggagatcctttacaaaaaggagaaggaggaagccgatcttctcctggagcagcagagactggactacgagagtaaattgcaggccttgcagaggcaggttgagactcgatctctggctgcagagacaacggaagaggaggaagaggaggaggaagttccttggacacagcatgaatttgagttggcccagtgggcgttccggaaatggaagtctcaccagtttacttcattaagggacttactctggggcaatgcggtgtacctgaaggaagccaatgccatcagtgtggaactaaagaaaaaggtacatgttctactctacgttctgctgactgcagagactggatctgatgcgagagatgtatgacagggcaggggaggtggcctccagtgcccaagatgacagcgagacgaccatgaccggcagcgacccattctacgatcggttccactggttcaaacttgtgggaagctcccctattttccacggctgtgtgaatgagcgccttgccgaccgcacaccctcccccactttttccacggccgattccgacatcactgaactggctgacgagcagcaggatgccatggaggactttgatgatgaggcattcgtggatgacaccggctctgacgcagggacggaagagggatcagagctcttcagtgatgggcatgacccattttacgaccgatccccttggttcattttagtaggaagggcatttgtgtacttgagcaacctgctgtatccggtgcccctgattcacagggtggccattgtcagtgagaagggggaagtccggggatttcttcgtgtggctgtgcaggccattgcagcggatgaagaagcccctgattatggctctggaatccggcagtcgggaacagctaaaatatcttttgataatgaatactttaatcagagtgacttctcgtcagctgcaatgactcgttctggtctgtccttggaggagctgaggattgtggaaggtcagggccagagttctgaagtcatcagtcctccagaagaagtcaatcgaatgaacgacctggatttgaagtcaggcactttgctggatgggaagatggtgatggaagggttttctgaagagattggtaaccacctgaagctgggcagtgccttcactttccgagtcactgtgctccaagccagcgggatccttccagagtatgcagacatcttctgtcagttcaactttttgcatcggcatgatgaagcgttctccactgaacccctcaagaacaatggaagaggaagtcccctgggcttctaccatgtacagaacattgcggtggaggtcacagagtcgtttgtggactacatcaaaaccaagcccattgtattcgaggtctttgggcactaccagcagcacccactccatctgcaaggacaagatcttaacagtccacctcagccatctcggagattcttccccccacccatgccactctccaagccagttccagctactaagttaaacaccatgaacaaaaccacccttgggcaaagcatgagcaagtacgaccttctggtttggtttgagatcagtgaactggagcctactggagagtatattccagctgtggttgaccatactgcaggcctgccctgccaggggacatttttgctgcaccagggcatccagcgacggatcacagtgactatcatccacgagaagggcagtgagctccactggaaagatgtccgtgagctggtggtaggtcggattaggaataaaccggaggtagatgaagctgcagttgatgctgttctttccctgaacatcatctctgctaagtccctgaaggctgcccacagctccagcaggaccttctaccgtttcgaggcagtatgggacagctccctacataactccctccttctgaaccgagtgacaccctatggagaaaagatctacatgaccttatctgcttatctggagttggatcattgcatccagccggccgtcatcactaaggatgtgtgcatggtcttctattcccgagatgccaagatctcaccaccgcgttctctgcgaaacctctttggtagtggctactcaaagtcaccagactccaaccgagtgactgggatctatgagctgagcttatgcaaaatggcagatactggaagcccaggcatgcagaggcggaggagaaaagtcttggatacctcagtggcatatgtgcggggagaggagaacctagcgggctggcgacctcgtggagacagcctcattctggaacaccagtgggagctggagaagctggagctgctgcatgaggtggaaaaaactcgccacttcttgctgcttcgggagagacttggtgacagcgtccctaagtctctgagtgactcactgtcccccagcctgagcagtggaacccttagcacctccaccagcatctcctctcagatctcaaccaccacctttgaaagcgccatcacaccgagcgagagcagtggctacgactcggcagacgttgaaagcctggtcgaccgggagaaagagctggctacaaagtgcctgcagcttctcacccacactttcaaccgagaattcagccaggtgcacggcagcatcagtgactgtaagttgtctgacatctctccaattggacgggacccctctgtgtccagtttcagcagttccaccctcacgccctcctccacttgcccctccttggtggactccaggagcagctctatggatcagaagaccccagaagccaactctcgtgcctccagtccctgccaagaatttgaacagtttcagatcgtcccaactgtggagacaccctatttggcccgagcagggaagaatgaatttctcaatcttgttccagacattgaagaagtcagagcgggatcagtggtatctaagaaaggatacctgcatttcaaagagccactttccagtaactgggctaaacatttcgttgtggttcgtcgcccttacgtcttcatctataacagtgacaaagacccagtagagcgtggcatcattaacctgtctacagcacaggtggagtacagcgaggaccagcaggccatggtgaagacacctaatacttttgctgtatgcacaaagcaccgtggggtccttctgcaagctctcaatgacaaagacatgaatgactggttatatgcctttaacccacttctggctggcacaataaggtcaaaactctctcgcagatgcccgagccagccaaagtactgagcgttctcctgagccttgctcaccttcgacagataaagaaagtgttacctctcattctctttgtgattcttgacagttattcttgtatgtaatcctgtggcttaacgacttttccctcctcaccctgcacttctctagctctctgttccctctccatggctctgactcttcttattcttgtgctaagacttgtagcatgtggcctaacaaggggaacaaaaccactacacgtccatacacactcacactcacactcacccacacccgaggggacccagcacatctccaaatgattctcctgtgtgcttcagcttcctttggatgttaggtccccttcacggtcactgtccgactgttgtctccgtagctctggttttcagggtaacttctctgtctctctttttctttcccctttgtttatgataatcttcttttttctgggtggtttagagactaagggaggagacatttggtattgtcagccaggagaagaaaacttgttaacttgtttctctctctctctctctcttcctctctctctctcttctctctctctctctctctctgtctctttttctctcagtgtctgtctctgtctatttgtgtgtgtgtctggtgtctgtctgtctctctctgtgtctgtctctgactctctctctttctctgtatgtgtgtgtgtgtgtgtctgtctgtctctgtctctctttctctttctctttggtggctaatccatgtgtttccattcagggaaagcactgtgggaagctcagaaatgggatttaaattctctgtctaaatcagggctcggagcatggatgtatagagtggaagatgcagaggggccttgtgattggcctgcaacagaggctgctgctagccctttaagactcgggctgctgcagtagattgggcagtgggtcacaagggtgactgtagctccttacagcagggtccagcaggcttgtctcctccctgggaaggagcgtttgtctaggagtttcccaactctagtctcagtgtcactgtttggaattaggtgatgtcatgaacagatttcccacaagagggactggggagtgtttgactttctggtgatatggaccattgttgctttgagagtgctgagtgcagcttgtgattgttgtcgctccctttgatcaaagacttgtagcttcagcataaatcttgaggtctccatctaaatccagtggccatttccagtagttctcgtctccatatgaacaaacatggcattgttttctggatgccagaactgaccagtccttaccaccactccaaacaaatcagaaggcatttagagtcgaaaaagattgtctcccagcagtttgctactggattgtgaaatgcctcctctgtgacatgcccccttcccccactgtcctcatctggtttggaaatactcccttaggaagaatttccctgctaccagtttctgtggcttctaacaaaccaggcctccgggtttaagaggttatagaaaataacgctcttcctccaccggccagtaagtgtcggggactgagtggggcacagaatgcccgctggggctacttgagttgctgtgccagtgacttggggagcattcacactgctgtttcctggccttgccagcctgtttcagcatcactcacgcacacaggaaggcatctgctcacctccagtctgcgaaggctcctggctacctgagggtagagaaggaatggatttccttctggtggagagcccatctccactgcagagcagccactagggaggcgagcatgcagccccttgcttctctctgaagaacaggactcccagcttcctttgttacagttgccttgcaaagaaaggaaaagtggaccatggagaaaaggaaaggaaaggaaagaaagcaaaagaaaagaaaggaaaaggcagaaatcagactgttcttatctaaaagatgctcagctctggtggatttttaaaactttctttctctccttaaagtataggttactaactgtaatgttacttgttttctaaacatatctatgagatttttaatgtagttagaagtctctgttgtctaatggacacagcatgtccttctggtgtatactcaaattcagcagactctgtctatgcctgtagacagtttcctggaccggaactaaatctaatttcagggaaacgaagatcaaaggtcgcttttaaactgaatcactgatgttgctgctgttaggaaggtaggcagaaggatccatgtctgtgccgagaggtgtgacgcctgggggagggtggcagtgtgcggcacactaaaccctgagataacttgttttcttttaactcaaacaaaactggtttagaaagtctttgctttgcaaatatcaaatgttagcatgagccaaactggaccccgccttcatcagaggccccttaaggagacctcattagaaagccagggaaagtaaggttggagcttgggcacctgtgcctctccctgctgtcactgggacccctcctactgtaaagcccaggatcaggtcagaatcggagcatttgggggctttatattctgtttccagacaaggtcacctgctccgaagctctgaaagagaaagggttttatggcaggacctgttcatgagatttttgtgattgccatagtagcaggaaagttaagagaactaatctttaaaataagtatttttaagatttttttttaaattttcaaagcactcctttaaacaaacaaacaaacaaacaaacaaaaaacctacaaggaaaacatacaaattacagaaaagtgagtgctggttaaaatgaattagtctcccccttcctttatgtctttatcctccttcctcccaagcagatatagcctcataactgtcccccgccagtgctcaggcctcgcctgcttctgggagacgaccctgggagtcagtcagctctcagtcccagactgtcagggaccaggcagtccctgcacaaggcgaggtgggagcacaggccagactgcttctgagcaggccctgatctccagtccataaatgagaaacttgatgaggtgagagctgaaggttcttcagctaagaaaccattatttttttttctcttcagctatgtggaatttgtatatctatcaatttttcaggttttttttttttttatcttgtttagatgaaggaatgaatggttgtgaaaggtgtttggggtctaaaacatgatttttcctggcacatatttcaaagcatagactttgttacctgctgcttcttgtctaatttacagggatatttaattttgtaaggtatttgtatatttatacaactgtaatgaattgcacattggactgaaaggggaaggctctgccctgtgtggctcctgctgggactctaggttgctgtgctttgactttcctgaacaataccaggggggtgtggtttgtttagcgtgggtccatcacttttcatttgggttccttttggaaaatgtaatctttaacttgctctgtgagaagaaaagaatgattgtgttgctgctcttggaaggtctgctgaatgcttttgagtgacctctggcactgtgtactgcctgtgatccaccaagagtgagtaagaccacgaccgtggagcaagtcagagatcgtcagccgagagattattgctgttactgttcaaaaggccatttatgaagtagatatttgagctctttaaaaaaaaaaatttaagagagcccctaattacttaaaaaagaaatttaagaaagaaattaagagttgatacagaaccggtgttaaaaactcacagccagaggttaggggtgttggttagtggtagggcacttggcaactatatgtgatgccattggttcagtcccggttctgagatcagacagaaagcctcacggtagatagctgctcagacaaagtccaggcagaggttggtcttgtgccaaaccctggatgttctatgttgtcatgtccttaactgattcttttcatgctgtgtattctgacatcaattcaccgaagggacccaccagcctcctcatgtttaagcattgtcgtagactttgtggctctgacatacttgtctgttgagagtggcgtctcctgtcaccatccccatgctataacagaatccatgaagcataagtggcctttttgaaccaagactttgcaaactgatctctccccagggaaggagttgagcacaagcaacaatgtacattattaattttggatttcattttcatgttttattttgtaaatatctaatgtttggagcttgagtatacaaaatgtaaatacagttcttgtatttgtactaatcctgattcttttgctgtatagccctagatgtgtaatgcagacattatctaactgtgtatggtaaccttgcatcacagaactgctagtgaacgaggtaaaaataataaaggtacaaccagtgcatc

SEQ ID NO: 744 - protein, 324 aa, Mus musculus
MSGASVKVAVRVRPFNSRETSKESKCIIQMQGNSTSIINPKNPKEAPKSFSFDYSYWSHTSPEDPCFASQNRVYNDIGKEMLLHAFEGYNVCIFAYGQTGAGKSYTMMGKQEESQAGIIPQLCEELFEKINDNCNEEMSYSVEVSYMEIYCERVRDLLNPKNKGNLRVREHPLLGPYVEDLSKLAVTSYTDIADLMDAGNKARTVAATNMNETSSRSHAVFTIVFTQKKQDPETNLSTEKVSKISLVDLAGSADSTGAKGTRLKEGANINKSLTTLGKVISAEVVSFLVKRRRKLILFLIGILYLLGSFEKISVATPELQWLLL

SEQ ID NO: 745 - DNA, 9960 bp, Mus musculus
gacggcagtggtcccgggaggcgacagctcggatccgggcttctctctgttcctccgccgcatccaccgccgcgccccggcctcccgccaatcctcgatgcagagctgggcggccgcgtgatggggctgcggagcggcgccctgcggctcgcggcggccgctgcctgcgctgaggtgcgtcggtgcccggcctcccgcgcccctgcgcgcctcggcgtcttctgactcggccggctcgcccgtctgtccgcagcgcggctgaggaaccttgaacacaacttcaaaagaagatttgatttttacttctggactgcatatataaggccatcagaatgtcgggagcctctgtgaaggtcgctgttcgagtgaggcccttcaattctcgagagaccagcaaggagtccaagtgcatcattcagatgcaaggcaactcgaccagtattattaacccaaagaacccaaaggaagcaccaaagtccttcagctttgactactcctactggtcccacacctcgcctgaagatccctgttttgcatcgcagaatcgtgtgtacaatgacattggaaaggaaatgctcttacatgcctttgaaggttataatgtctgtatctttgcctatgggcagactggtgctgggaaatcctacacgatgatggggaaacaagaagagagccaagctggaatcatcccacagttgtgtgaagaactctttgagaagatcaatgacaattgtaatgaagaaatgtcttactctgtagaggtgagctacatggaaatttactgtgagagagtacgagatttactgaatcccaaaaacaagggtaacttgcgtgtgcgtgaacacccgcttcttggaccctatgtggaggatctgtccaagctggcggtcacctcctacactgacatcgctgacctgatggatgctgggaacaaagccaggactgtggcagctaccaacatgaatgagacaagcagccgttctcacgctgtgttcaccattgtctttacccagaagaaacaggatcctgagacgaacctttctactgagaaggtcagtaaaatcagcttggtggatctagcaggaagtgaacgggctgattcaactggtgccaaaggaactcgattaaaggaaggtgcaaatatcaataagtcccttacaactttgggcaaagtcatttcggccttggcagaggtgagtaaaaagaagaagaaaactgattttattccttatagggattctgtacttacttggctccttcgagaaaatctcggtggcaactcccgaactgcaatggttgctgctctgagcccagccgacatcaactacgatgaaactttgagcacactgagatacgcagatcgtgcaaaacaaattaaatgcaatgctgttatcaatgaggacccgaatgccaagctggttcgggagttgaaggaggaagtgacccgactgaaggaccttcttcgtgctcagggactgggagatattattgatacatccatggggtccctcacttcatctccatcttcatgctcacttaatagtcaggtgggcttaacatctgtgaccagtattcaggagaggatcatgtctacacctggaggggaggaagccattgaacgtctgaaggagtcagagaagatcattgctgagttgaatgaaacctgggaagagaaacttcgtaaaacagaggccatcagaatggagagagaagccttgttggctgagatgggagttgccatacgggaagatggggggacacttggagttttctctcctaaaaagaccccacatcttgttaacctcaatgaagacccattaatgtcggagtgtttgctctattacatcaaggatggaattacaagggttggccaggcagatgctgagcggcgccaggacatagtgctgagtggggcccacattaaagaggagcattgtctctttcggagtgagaggagcaacactggtgaagttattgtgaccttggagccctgtgagcgctcagaaacatacgtgaatggcaagagggtggctcatcctgttcagctgcgctcagggaaccgtatcatcatgggtaaaaaccatgtttttcgttttaaccaccctgaacaagcgcgagcagaaagggaaaagactccctcagctgagaccccctctgagcctgtggactggacctttgctcagagagagcttctcgaaaaacaaggaattgatatgaaacaggagatggaaaagaggcttcaggaaatggagatcctttacaaaaaggagaaggaggaagccgatcttctcctggagcagcagagactggactacgagagtaaattgcaggccttgcagaggcaggttgagactcgatctctggctgcagagacaacggaagaggaggaagaggaggaggaagttccttggacacagcatgaatttgagttggcccagtgggcgttccggaaatggaagtctcaccagtttacttcattaagggacttactctggggcaatgcggtgtacctgaaggaagccaatgccatcagtgtggaactaaagaaaaaggtacatgttctactctacgttctgctgacttgtaccccatatccgctcaataggcagagactggatctgatgcgagagatgtatgacagggcaggggaggtggcctccagtgcccaagatgacagcgagacgaccatgaccggcagcgacccattctacgatcggttccactggttcaaacttgtgggaagctcccctattttccacggctgtgtgaatgagcgccttgccgaccgcacaccctcccccactttttccacggccgattccgacatcactgaactggctgacgagcagcaggatgccatggaggactttgatgatgaggcattcgtggatgacaccggctctgacgcagggacggaagagggatcagagctcttcagtgatgggcatgacccattttacgaccgatccccttggttcattttagtaggaagggcatttgtgtacttgagcaacctgctgtatccggtgcccctgattcacagggtggccattgtcagtgagaagggggaagtccggggatttcttcgtgtggctgtgcaggccattgcagcggatgaagaagcccctgattatggctctggaatccggcagtcgggaacagctaaaatatcttttgataatgaatactttaatcagagtgacttctcgtcagctgcaatgactcgttctggtctgtccttggaggagctgaggattgtggaaggtcagggccagagttctgaagtcatcagtcctccagaagaagtcaatcgaatgaacgacctggatttgaagtcaggcactttgctggatgggaagatggtgatggaagggttttctgaagagattggtaaccacctgaagctgggcagtgccttcactttccgagtcactgtgctccaagccagcgggatccttccagagtatgcagacatcttctgtcagttcaactttttgcatcggcatgatgaagcgttctccactgaacccctcaagaacaatggaagaggaagtcccctgggcttctaccatgtacagaacattgcggtggaggtcacagagtcgtttgtggactacatcaaaaccaagcccattgtattcgaggtctttgggcactaccagcagcacccactccatctgcaaggacaagatcttaacagtccacctcagccatctcggagattcttccccccacccatgccactctccaagccagctactaagttaaacaccatgaacaaaaccacccttgggcaaagcatgagcaagtacgaccttctggtttggtttgagatcagtgaactggagcctactggagagtatattccagctgtggttgaccatactgcaggcctgccctgccaggggacatttttgctgcaccagggcatccagcgacggatcacagtgactatcatccacgagaagggcagtgagctccactggaaagatgtccgtgagctggtggtaggtcggattaggaataaaccggaggtagatgaagctgcagttgatgctgttctttccctgaacatcatctctgctaagtccctgaaggctgcccacagctccagcaggaccttctaccgtttcgaggcagtatgggacagctccctacataactccctccttctgaaccgagtgacaccctatggagaaaagatctacatgaccttatctgcttatctggagttggatcattgcatccagccggccgtcatcactaaggatgtgtgcatggtcttctattcccgagatgccaagatctcaccaccgcgttctctgcgaaacctctttggtagtggctactcaaagtcaccagactccaaccgagtgactgggatctatgagctgagcttatgcaaaatggcagatactggaagcccaggcatgcagaggcggaggagaaaagtcttggatacctcagtggcatatgtgcggggagaggagaacctagcgggctggcgacctcgtggagacagcctcattctggaacaccagtgggagctggagaagctggagctgctgcatgaggtggaaaaaactcgccacttcttgctgcttcgggagagacttggtgacagcgtccctaagtctctgagtgactcactgtcccccagcctgagcagtggaacccttagcacctccaccagcatctcctctcagatctcaaccaccacctttgaaagcgccatcacaccgagcgagagcagtggctacgactcggcagacgttgaaagcctggtcgaccgggagaaagagctggctacaaagtgcctgcagcttctcacccacactttcaaccgagaattcagccaggtgcacggcagcatcagtgactgtaagttgtctgacatctctccaattggacgggacccctctgtgtccagtttcagcagttccaccctcacgccctcctccacttgcccctccttggtggactccaggagcagctctatggatcagaagaccccagaagccaactctcgtgcctccagtccctgccaagaatttgaacagtttcagatcgtcccaactgtggagacaccctatttggcccgagcagggaagaatgaatttctcaatcttgttccagacattgaagaagtcagagcgggatcagtggtatctaagaaaggatacctgcatttcaaagagccactttccagtaactgggctaaacatttcgttgtggttcgtcgcccttacgtcttcatctataacagtgacaaagacccagtagagcgtggcatcattaacctgtctacagcacaggtggagtacagcgaggaccagcaggccatggtgaagacacctaatacttttgctgtatgcacaaagcaccgtggggtccttctgcaagctctcaatgacaaagacatgaatgactggttatatgcctttaacccacttctggctggcacaataaggtcaaaactctctcgcagatgcccgagccagccaaagtactgagcgttctcctgagccttgctcaccttcgacagataaagaaagtgttacctctcattctctttgtgattcttgacagttattcttgtatgtaatcctgtggcttaacgacttttccctcctcaccctgcacttctctagctctctgttccctctccatggctctgactcttcttattcttgtgctaagacttgtagcatgtggcctaacaaggggaacaaaaccactacacgtccatacacactcacactcacactcacccacacccgaggggacccagcacatctccaaatgattctcctgtgtgcttcagcttcctttggatgttaggtccccttcacggtcactgtccgactgttgtctccgtagctctggttttcagggtaacttctctgtctctctttttctttcccctttgtttatgataatcttcttttttctgggtggtttagagactaagggaggagacatttggtattgtcagccaggagaagaaaacttgttaacttgtttctctctctctctctctcttcctctctctctctcttctctctctctctctctctctgtctctttttctctcagtgtctgtctctgtctatttgtgtgtgtgtctggtgtctgtctgtctctctctgtgtctgtctctgactctctctctttctctgtatgtgtgtgtgtgtgtgtctgtctgtctctgtctctctttctctttctctttggtggctaatccatgtgtttccattcagggaaagcactgtgggaagctcagaaatgggatttaaattctctgtctaaatcagggctcggagcatggatgtatagagtggaagatgcagaggggccttgtgattggcctgcaacagaggctgctgctagccctttaagactcgggctgctgcagtagattgggcagtgggtcacaagggtgactgtagctccttacagcagggtccagcaggcttgtctcctccctgggaaggagcgtttgtctaggagtttcccaactctagtctcagtgtcactgtttggaattaggtgatgtcatgaacagatttcccacaagagggactggggagtgtttgactttctggtgatatggaccattgttgctttgagagtgctgagtgcagcttgtgattgttgtcgctccctttgatcaaagacttgtagcttcagcataaatcttgaggtctccatctaaatccagtggccatttccagtagttctcgtctccatatgaacaaacatggcattgttttctggatgccagaactgaccagtccttaccaccactccaaacaaatcagaaggcatttagagtcgaaaaagattgtctcccagcagtttgctactggattgtgaaatgcctcctctgtgacatgcccccttcccccactgtcctcatctggtttggaaatactcccttaggaagaatttccctgctaccagtttctgtggcttctaacaaaccaggcctccgggtttaagaggttatagaaaataacgctcttcctccaccggccagtaagtgtcggggactgagtggggcacagaatgcccgctggggctacttgagttgctgtgccagtgacttggggagcattcacactgctgtttcctggccttgccagcctgtttcagcatcactcacgcacacaggaaggcatctgctcacctccagtctgcgaaggctcctggctacctgagggtagagaaggaatggatttccttctggtggagagcccatctccactgcagagcagccactagggaggcgagcatgcagccccttgcttctctctgaagaacaggactcccagcttcctttgttacagttgccttgcaaagaaaggaaaagtggaccatggagaaaaggaaaggaaaggaaagaaagcaaaagaaaagaaaggaaaaggcagaaatcagactgttcttatctaaaagatgctcagctctggtggatttttaaaactttctttctctccttaaagtataggttactaactgtaatgttacttgttttctaaacatatctatgagatttttaatgtagttagaagtctctgttgtctaatggacacagcatgtccttctggtgtatactcaaattcagcagactctgtctatgcctgtagacagtttcctggaccggaactaaatctaatttcagggaaacgaagatcaaaggtcgcttttaaactgaatcactgatgttgctgctgttaggaaggtaggcagaaggatccatgtctgtgccgagaggtgtgacgcctgggggagggtggcagtgtgcggcacactaaaccctgagataacttgttttcttttaactcaaacaaaactggtttagaaagtctttgctttgcaaatatcaaatgttagcatgagccaaactggaccccgccttcatcagaggccccttaaggagacctcattagaaagccagggaaagtaaggttggagcttgggcacctgtgcctctccctgctgtcactgggacccctcctactgtaaagcccaggatcaggtcagaatcggagcatttgggggctttatattctgtttccagacaaggtcacctgctccgaagctctgaaagagaaagggttttatggcaggacctgttcatgagatttttgtgattgccatagtagcaggaaagttaagagaactaatctttaaaataagtatttttaagatttttttttaaattttcaaagcactcctttaaacaaacaaacaaacaaacaaacaaaaaacctacaaggaaaacatacaaattacagaaaagtgagtgctggttaaaatgaattagtctcccccttcctttatgtctttatcctccttcctcccaagcagatatagcctcataactgtcccccgccagtgctcaggcctcgcctgcttctgggagacgaccctgggagtcagtcagctctcagtcccagactgtcagggaccaggcagtccctgcacaaggcgaggtgggagcacaggccagactgcttctgagcaggccctgatctccagtccataaatgagaaacttgatgaggtgagagctgaaggttcttcagctaagaaaccattatttttttttctcttcagctatgtggaatttgtatatctatcaatttttcaggttttttttttttttatcttgtttagatgaaggaatgaatggttgtgaaaggtgtttggggtctaaaacatgatttttcctggcacatatttcaaagcatagactttgttacctgctgcttcttgtctaatttacagggatatttaattttgtaaggtatttgtatatttatacaactgtaatgaattgcacattggactgaaaggggaaggctctgccctgtgtggctcctgctgggactctaggttgctgtgctttgactttcctgaacaataccaggggggtgtggtttgtttagcgtgggtccatcacttttcatttgggttccttttggaaaatgtaatctttaacttgctctgtgagaagaaaagaatgattgtgttgctgctcttggaaggtctgctgaatgcttttgagtgacctctggcactgtgtactgcctgtgatccaccaagagtgagtaagaccacgaccgtggagcaagtcagagatcgtcagccgagagattattgctgttactgttcaaaaggccatttatgaagtagatatttgagctctttaaaaaaaaaaatttaagagagcccctaattacttaaaaaagaaatttaagaaagaaattaagagttgatacagaaccggtgttaaaaactcacagccagaggttaggggtgttggttagtggtagggcacttggcaactatatgtgatgccattggttcagtcccggttctgagatcagacagaaagcctcacggtagatagctgctcagacaaagtccaggcagaggttggtcttgtgccaaaccctggatgttctatgttgtcatgtccttaactgattcttttcatgctgtgtattctgacatcaattcaccgaagggacccaccagcctcctcatgtttaagcattgtcgtagactttgtggctctgacatacttgtctgttgagagtggcgtctcctgtcaccatccccatgctataacagaatccatgaagcataagtggcctttttgaaccaagactttgcaaactgatctctccccagggaaggagttgagcacaagcaacaatgtacattattaattttggatttcattttcatgttttattttgtaaatatctaatgtttggagcttgagtatacaaaatgtaaatacagttcttgtatttgtactaatcctgattcttttgctgtatagccctagatgtgtaatgcagacattatctaactgtgtatggtaaccttgcatcacagaactgctagtgaacgaggtaaaaataataaaggtacaaccagtgcatca

SEQ ID NO: 746 - protein, 1718 aa, Mus musculus
MSGASVKVAVRVRPFNSRETSKESKCIIQMQGNSTSIINPKNPKEAPKSFSFDYSYWSHTSPEDPCFASQNRVYNDIGKEMLLHAFEGYNVCIFAYGQTGAGKSYTMMGKQEESQAGIIPQLCEELFEKINDNCNEEMSYSVEVSYMEIYCERVRDLLNPKNKGNLRVREHPLLGPYVEDLSKLAVTSYTDIADLMDAGNKARTVAATNMNETSSRSHAVFTIVFTQKKQDPETNLSTEKVSKISLVDLAGSADSTGAKGTRLKEGANINKSLTTLGKVISAEVSKKKKKTDFIPYRDSVLTWLLRENLGGNSRTAMVAALSPADINYDETLSTLRYADRAKQIKCNAVINEDPNAKLVRELKEEVTRLKDLLRAQGLGDIIDTSMGSLTSSPSSCSLNSQVGLTSVTSIQERIMSTPGGEEAIERLKESEKIIAELNETWEEKLRKTEAIRMEREALLAEMGVAIREDGGTLGVFSPKKTPHLVNLNEDPLMSECLLYYIKDGITRVGQADAERRQDIVLSGAHIKEEHCLFRSSNTGEVIVTLEPCERSETYVNGKRVAHPVQLRSGNRIIMGKNHVFRFNHPEQARAEREKTPSAETPSEPVDWTFAQRELLEKQGIDMKQEMEKRLQEMEILYKKEKEEADLLLEQQRLDYESKLQALQRQVETRSLAAETTEEEEEEEEVPWTQHEFELAQWAFRKWKSHQFTSLRDLLWGNAVYLKEANAISVELKKKVHVLLYVLLTCTPYPLNRQRLDLMREMYDRAGEVASSAQDDSETTMTGSDPFYDRFHWFKLVGSSPIFHGCVNERLADRTPSPTFSTADSDITELADEQQDAMEDFDDEAFVDDTGSDAGTEEGSELFSDGHDPFYDRSPWFILVGRAFVYLSNLLYPVPLIHRVAIVSEKGEVRGFLRVAVQAIAADEEAPDYGSGIRQSGTAKISFDNEYFNQSDFSSAAMTRSGLSLEELRIVEGQGQSSEVISPPEEVNRMNDLDLKSGTLLDGKMVMEGFSEEIGNHLKLGSAFTFRVTVLQASGILPEYADIFCQFNFLHRHDEAFSTEPLKNNGRGSPLGFYHVQNIAVEVTESFVDYIKTKPIVFEVFGHYQQHPLHLQGQDLNSPPQPSRRFFPPPMPLSKPATKLNTMNKTTLGQSMSKYDLLVWFEISELEPTGEYIPAVVDHTAGLPCQGTFLLHQGIQRRITVTIIHEKGSELHWKDVRELVVGRIRNKPEVDEAAVDAVLSLNIISAKSLKAAHSSSRTFYRFEAVWDSSLHNSLLLNRVTPYGEKIYMTLSAYLELDHCIQPAVITKDVCMVFYSRDAKISPPRSLRNLFGSGYSKSPDSNRVTGIYELSLCKMADTGSPGMQRRRRKVLDTSVAYVRGEENLAGWRPRGDSLIHQWELEKLELLHEVEKTRHFLLLRERLGDSVPKSLSDSLSPSLSSGTLSTSTSISSQISTTTFESAITPSESSGYDSADVESLVDREKELATKCLQLLTHTFNREFSQVHGSISDCKLSDISPIGRDPSVSSFSSSTLTPSSTCPSLVDSRSSSMDQKTPEANSRASSPCQEFEQFQIVPTVETPYLARAGKNEFLNLVPDIEEVRAGSVVSKKGYLHFKEPLSSNWAKHFVVVRRPYVFIYNSDKDPVERGIINLSTAQVEYSEDQQAMVKTPNTFAVCTKHRGVLLQALNDKDMNDWLYAFNPLLAGTIRSKLSRRCPSQPKY

SEQ ID NO: 747 - DNA, 4824 bp, Mus musculus
cgccgcgccccggcctcccgccaatcctcgatgcagagctgggcggccgcgtgatggggctgcggagcggcgccctgcggctcgcggcggccgctgcctgcgctgaggtgcgtcggtgcccggcctcccgcgcccctgcgcgcctcggcgtcttctgactcggccggctcgcccgtctgtccgcagcgcggctgaggaaccttgaacacaacttcaaaagaagatttgatttttacttctggactgcatatataaggccatcagaatgtcgggagcctctgtgaaggtcgctgttcgagtgaggcccttcaattctcgagagaccagcaaggagtccaagtgcatcattcagatgcaaggcaactcgaccagtattattaacccaaagaacccaaaggaagcaccaaagtccttcagctttgactactcctactggtcccacacctcgcctgaagatccctgttttgcatcgcagaatcgtgtgtacaatgacattggaaaggaaatgctcttacatgcctttgaaggttataatgtctgtatctttgcctatgggcagactggtgctgggaaatcctacacgatgatggggaaacaagaagagagccaagctggaatcatcccacagttgtgtgaagaactctttgagaagatcaatgacaattgtaatgaagaaatgtcttactctgtagaggtgagctacatggaaatttactgtgagagagtacgagatttactgaatcccaaaaacaagggtaacttgcgtgtgcgtgaacacccgcttcttggaccctatgtggaggatctgtccaagctggcggtcacctcctacactgacatcgctgacctgatggatgctgggaacaaagccaggactgtggcagctaccaacatgaatgagacaagcagccgttctcacgctgtgttcaccattgtctttacccagaagaaacaggatcctgagacgaacctttctactgagaaggtcagtaaaatcagcttggtggatctagcaggaagtgaacgggctgattcaactggtgccaaaggaactcgattaaaggaaggtgcaaatatcaataagtcccttacaactttgggcaaagtcatttcggccttggcagaggtgagtaaaaagaagaagaaaactgattttattccttatagggattctgtacttacttggctccttcgagaaaatctcggtggcaactcccgaactgcaatggttgctgctctgagcccagccgacatcaactacgatgaaactttgagcacactgagatacgcagatcgtgcaaaacaaattaaatgcaatgctgttatcaatgaggacccgaatgccaagctggttcgggagttgaaggaggaagtgacccgactgaaggaccttcttcgtgctcagggactgggagatattattgatacatccatggggtccctcacttcatctccatcttcatgctcacttaatagtcaggtgggcttaacatctgtgaccagtattcaggagaggatcatgtctacacctggaggggaggaagccattgaacgtctgaaggagtcagagaagatcattgctgagttgaatgaaacctgggaagagaaacttcgtaaaacagaggccatcagaatggagagagaagccttgttggctgagatgggagttgccatacgggaagatggggggacacttggagttttctctcctaaaaagaccccacatcttgttaacctcaatgaagacccattaatgtcggagtgtttgctctattacatcaaggatggaattacaagggttggccaggcagatgctgagcggcgccaggacatagtgctgagtggggcccacattaaagaggagcattgtctctttcggagtgagaggagcaacactggtgaagttattgtgaccttggagccctgtgagcgctcagaaacatacgtgaatggcaagagggtggctcatcctgttcagctgcgctcagggaaccgtatcatcatgggtaaaaaccatgtttttcgttttaaccaccctgaacaagcgcgagcagaaagggaaaagactccctcagctgagaccccctctgagcctgtggactggacctttgctcagagagagcttctcgaaaaacaaggaattgatatgaaacaggagatggaaaagaggcttcaggaaatggagatcctttacaaaaaggagaaggaggaagccgatcttctcctggagcagcagagactggacgcggattctgatagcggggacgattctgacaagcgatcctgtgaagagagctggaaactgataacttctctgagagaaaagctgcctcccagcaagttacaaaccattgttaaaaagtgtggcctccccagcagtgggaagaagcgagagccaatcaaaatgtatcagatcccgcaaagaaggcgcctgagcaaagattccaagtgggtcaccatctcagatcttaagatccaggctgtcaaagagatttgctatgaggttgccctcaatgactttaggcacagtcggcaggagatcgaagccttggccattgttaagatgaaagagctttgtgccatgtatgggaagaaagatcccaatgagcgagactcttggagggctgtggccagggatgtctgggacactgttggggtaggggatgagaagattgaagatatgatggtcactgggaaaggtggaaccgatgtagatgacctcaaggttcacatagacaagctggaagatattttgcaagaagtcaaaaagcaaaataatatgaaagacgaagagatcaaagtcttaagaaataaaatgctcaaaatggagaaagtcttgccattgattggatcacaggaacagaagagtcaaggaagccacaagacaaaagagcccctagttgctggtgctaacagcgtctctgataatggtgtcagtaaaggagagagtggagaacttggcaaagaagagcgcgtttcccagctgatgaacggggatccagcttttagacgtggacgtctacgttggatgaggcaagaacaaattcggtttaagaacctgcaacagcaagagataacaaagcagcttcgtcggcagaacgtaccccacaggttcatccctcctgagaaccggaagccccgctttccctttaagagcaatcctaaacacagaaactcttggagtcctgggacacatattattataacagaagatgaggttattgagctaagaattccaaaagatgaagaaggaagaaaaggaaataaagaagaaagccaagaaaaagtgggcagagcagcttctagagatgtacagtcagcgtggggcacaagaagtcaggatcatatccaagttagcaaacagcacatcagcaaccaacagccaccacctcagctacggtggagaagcaattctctcaataacggccaaccgaaaaccacgcgctgccaggcgactgcctcctcggagtccctaaactcccacagcggtcaccccaccgctgatctacaaactttccaggccaagcgtcacattcaccaacaccggcagccttactgtaattataacactggaggtcaggtagagggtagcacagccagctgctgtcaaaagcagactgacaagcccagccactgtaaccagttcgtgacacctccgaggatgaggagacaattctcagcacccaatctcaaagcaggtcgagaaaccacagtctaggtagattactggacaaacttgaagttgtagcaatggaaccaggcagtgttatgttagctcatggattgagttggtgcctactatatgcatcatgagtttagtgttgtgttcctacagatactaactggtctttattgttaaaatgtaaaacactggtaaatgtttcagtgcctcccgtgtgattgtgcattatcagtgggcaggtgctagaattgggtataaaacatcaaggccctgtatttttctgatactttcctctatggtgcctagattattaatgtacttacactggcttctcttgttttggtgtaagattttttttttaatagtgctttgatatcccaaaagacctgcctcttgttttatggaaatgctcaaaataagaatttgatatatagaagaaatgcctcttattccccaagcaccttagaagttgactgaaaaccaacgtgcaacgatgtggatacagctttaggcttcgccttggtgtctgtacttttcattaaaaattgttggcagttttacaagcataaatccaaggtcttcagacatgttttttctgcacagccttgcatcttacatgtcattatcttagtctacatttttaaggaaccgagtcagtaatttttactatatcagaacatatagaaaatttgtcatatctctaaaatctttaaattgacactttctcagtttcgatttggtttgtattttgaagtttactgactattttactcatagcacgaactatatttgctaaaattatgccaatagaaataccaacaacaatgtgtgctctgagcaatgtgtgtaagtttctaagaagattattcagtgcaagaaggaagagatggggcatggcaagaaggcagccgatagacacctcttcactgcctttttccaaaagtggagataataaaaccgaactttggttgagtctggagccatgtatataataaactgttccttgttcgacagttgtaatgcacacagatcctctagcaaggacagctaagtcctgcaaacagtcactcctctgtcaatacctcacttcaccatgctgtgcttgcagtttgcctcgatggagaagcctctttgaataaaaa

SEQ ID NO: 748 - protein, 1138 aa, Mus musculus
MSGASVKVAVRVRPFNSRETSKESKCIIQMQGNSTSIINPKNPKEAPKSFSFDYSYWSHTSPEDPCFASQNRVYNDIGKEMLLHAFEGYNVCIFAYGQTGAGKSYTMMGKQEESQAGIIPQLCEELFEKINDNCNEEMSYSVEVSYMEIYCERVRDLLNPKNKGNLRVREHPLLGPYVEDLSKLAVTSYTDIADLMDAGNKARTVAATNMNETSSRSHAVFTIVFTQKKQDPETNLSTEKVSKISLVDLAGSADSTGAKGTRLKEGANINKSLTTLGKVISAEVSKKKKKTDFIPYRDSVLTWLLRENLGGNSRTAMVAALSPADINYDETLSTLRYADRAKQIKCNAVINEDPNAKLVRELKEEVTRLKDLLRAQGLGDIIDTSMGSLTSSPSSCSLNSQVGLTSVTSIQERIMSTPGGEEAIERLKESEKIIAELNETWEEKLRKTEAIRMEREALLAEMGVAIREDGGTLGVFSPKKTPHLVNLNEDPLMSECLLYYIKDGITRVGQADAERRQDIVLSGAHIKEEHCLFRSSNTGEVIVTLEPCERSETYVNGKRVAHPVQLRSGNRIIMGKNHVFRFNHPEQARAEREKTPSAETPSEPVDWTFAQRELLEKQGIDMKQEMEKRLQEMEILYKKEKEEADLLLEQQRLDADSDSGDDSDKRSCEESWKLITSLREKLPPSKLQTIVKKCGLPSSGKKREPIKMYQIPQRRRLSKDSKWVTISDLKIQAVKEICYEVNDFRHSRQEIEAIVKMKELCAMYGKKDPNERDSWRAVARDVWDTVGVGDEKIEDMMVTGKGGTDVDDLKVHIDKLEDILQEVKKQNNMKDEEIKVLRNKMLKMEKVLPLIGSQEQKSQGSHKTKEPLVAGANSVSDNGVSKGESGELGKEERVSQLMNGDPAFRRGRLRWMRQEQIRFKNLQQQEITKQLRRQNVPHRFIPPENRKPRFPFKSNPKHRNSWSPGTHIIITEDEVIELRIPKDEEGRKGNKEESQEKVGRAASRDVQSAWGTRSQDHIQVSKQHNQQPPPQLRWRSNSLNNGQPKTTRCQATASSESLNSHSGHPTADLQTFQAKRHIHQHRQPYCNYNTGGQVEGSTASCCQKQTDKPSHCNQFVTPPRMRRQFSAPNLKAGRETTV

SEQ ID NO: 749 - DNA, 138075 bp, Homo sapiens
  misc_feature (1)...(138075): n = A,T,C or G
gttcttattgctgagctaccgaaacctagaatctgactcacacaatatgacacttatttccgttttcttggtagagtttgtgtggtcattcatcttttagatcttttagaaactacagtcctcctagttcccacttttatatttatttatttatttatttttgagatggagtcttgctctgttgcccaggctggagtgcagtggtgcaatctcggctcactgcaacctctgcctcccaggttcaagcaattctcccgcctcagcctcccaagtagctgggattacaggtgcgtgccaccatgcctcgctaacttttgtattttttgtagagacggggtttcaccacgttggccaggctggtcgcaaactcctgacctcaagtgatcaacccccctcagcctcccaaagtgctgggattacaggcgtgagtgaccgtgcccagccatcagttcccacttttaaatgagaggttctttgtttttgtggggtttttgttgttgttgttgttgttgttgttgttgctgttgttacttgagacagggtcttagtctgtcatccaggatggagtgcagtggcacaatcttggctaactgcagcctggacctccctgggctcaggtgatcttcctacctaagccccctgagtagctgggagtgcaggcacacaccaccatgcctagctaacttttgtattttttgtggagatgagatttcaccatgttgcccaggctggtctcaaattcctgtactccagcgatcctcctgcctgagcttcccaaagtgctgggattataagtgtgagtcaccgagccaggtcataaagacagtttttttttgttttgagatggagttttgctcttttgtacccaggctggagtacagtggtgtgatcttggctcactgcaacctccacctctcgggttcaagcaattctcctgtcttacttagcctcccgagtagctgggattacaggcgtgccccaccacgctgcactgattttttatatttttaacagagatggggtttcaccatgttggacaggctggtctgcaactcctgacctcaggtgatctgcccacctcagcctcccaaagtactgggattacagatgtgagccactgtgcctggccaataaagagaattttaaacaatgcctacagtgtgattttagtggggtggccacatacatgtaggtgtgcacatgtatttccatgaaaatgccttcctgcctttagccttgacaatgctgcatatagggaataagcatttaaatgatggtgtctgggctaagagtgtgaactctggagccaaaccctccaaaattgcatcctgaatctgccactagctagctctggagccatgaataacttatttaacctctctgtgatggtttatctatctgtaaaatgggggtaatgaaacatctggctcattgagtgcttgggagcatcaaataggttagtaggtctggtgtggtggctcacacctgtaatcccagcactttgggaagctgaggcatgaggatggcttgagcccaggagtttgagaccagcctgggcaacatagtgagactcccatctctacaaaaaagaaaaataattagccgggtgtagtggcatgaacctgtggtcccatctactccagaggctgaggtgggaggatcactggagcccaggaggttgagtctgtagtgaattgtggttgtaccactgtactccagtctgggcctcagagttagatcctgtctcaggaaaaaaaaaggttcgtagacagaaagtacttatggctcagagtaagtgttctgtgaatgttggctgttttttaaatcttgcatttaattcctctttggttagaagtatacttctttgcttggattaccatttgcatgtggagagatgttccttctagaaccatgtctccttgtcacatgattatgtacagtgtgagctttattaatactctgtcagcatttgaggttggaacataaatgcgtggctgtacccagtggaatccagcaagagagagaactaagcaccgtagcaactgttgctatttgtgtactgagcaacagctgtgcgagacagatttattttttaatcctgatctcactgatagcctgggatgtggccttgccacatctcaaaggagtagattggttgagatatccagtctttgaggagatttcatgaccacatgccataaagattctgtttcatttcaaatatgaggagctaaagctttgtgtgtatgagtgagggagaaagattaagctttaaagcattcatagtcagtccctgaaatatagtgtgactggattaatgacatgataaatcacttttaatgtgggtggtgagacttcatgcatttcagtcaaaaaagtaattttgctgtaatgtggttcatttccaaattttggctgctaacttacctaggatggataaacattatcacagagtatttactgagcatctactttataccagggtcttttctgaatactggtaacatgcagttaattacactccaaaatgacttagtctgtgattccactatatactacattacataaatacacacacactaatcatttacatacttgtcaaccttagatttcagaaataacactgtatttgtaatgaatgcttcattaccaaatgcttttctgaagtacatagtaagatctttaaaaagagctttcatggccaggcgcggtggctcacgcttgtaatcccagcactttgggaggccgaggcgggcggatcacaaggtcaggagatcaagaccatcctggctaacacggtgaaaccccgtctctactaaaaatacaaaaaaattagctgggcgtggtggcgggcgcctgtagtcctagctactcaggaggctgaggcaggagaatggcgtgaacctgggaggtggagcttgcagtgagccgagatcgtgccactccccttcagctagggcgacagagggagactctgtctcaaaaaaaaaaaaaaaaaaaaaaaagctgctttcaaatagtggttggattcattcaataactttctaattttcatttctcttttttttcttgagatgaagtcttactctgtcacccaggctggagtgcagtgcattaatatcagctcagtgcaacctctgcctcccgggttcaagtgattctcctgcctcaacctccccagtagctgggattataggcacacaccactatttctggctaatttttgtgtttttggtagagatggggtttcaccatgttcgccaggctagtctcgaattcctgacctcaagtgatacacctgccttggcctcccaaagtgctgggattacaagtgggagccaccgcgcccagctccatttctgatgtgttccaatatttcagggcttaacgggtgccttgaaatagtaatgtgggccaggtgcagtggctcacgcctgtaatcccagcagttagggaggcggagatgcgcagatcacctgaggtcaggagttcgagaccagcctggccaacatggtgaaaccctgtctctactaaaaataaaaaaattagccagttgtagtggtggatgccagtaatcccagctactcaggaggctgaggcgggagaatttcttgaacccgggatgaggtggttgcagtgagccgagatcacaccactgcactccagcttggggaatagagcaagactctgtcttcaaaaagaaaagaaatagaaatgtcgttcatttccaaattttggctggtaacttacctaaggaggataaacattgtcacagaatatttactgagcatctactttataccagggtctgttctgaatactggtaacacgcagttaatgctgttggtctggtttttcatgttccatgtataaattacctcttaaaactatgattgttttcattcattcattcatttttgagatcgggtctcaaaataggctggggtgcagtggctcgataacagctaactacatcctcaaacctccaggctcaagccatcctccgacctcagcttcctaagtagctgggactgcaggcatgtgccaccatgcccagctagttgttgttgttttttttttttttggtatttgttgtagagacagggtttcaccatgttgcccagggtggtcttgaactcctgacctctagtgatccacccagctcggactctcaaaatgctgaaattacaggcatgagccactgagcccagcctattaatttttgattgccctattcagatttagtggtatgaatttactgattgggatgttttgaacacacagaataacatgtttaactaaagaacttgtaattgagtgacttataaaatgaaacatttttatcttctaggtattattaacccaaagaatccaaaggaagctccaaagtccttcagcttcgactattcctactggtctcatacctcagtgagtaccctcatgccacagcactgccagctcctgcctcctttcctctttccttgccgatttgtcttttctcttagctgagcagatccaagttttgcttcttaactgttgtgtagcatgagttcattctttgatacagtgatatagtattttcattcataaagtatttgggttgatggaaagtttatgtacacatatacataaatatatacacatatatacatacagaacatatttagtttacaccaaatttatactgaatgtacactaaatttatactgatttagacatttcttgaggatttatttatcagtatcttaggatcctcattaccaacattattgcccattgatcttaggaaatgccaaataataataattattattattattattatttttcttctgagacggagtctcactctgtcgcccaggctggagtacagtggtgccatcttggctcactgcaacctccgcctccgaggttcaagcgattctcccgcctcagcctcccgagtagctgggattacaggcgcgtggcactatgcccagctaatttttgtatttttagtagagacaggatttgaccatgttggccaggctggtctcgagcttctgaccttaagtgatccacctgtgtttgcctcccaaagtgctgggattacaggtgtgagccactgtgcctggctggaaatgccaaattaaaattgcttagggtactgttaattttaagttgaattttgagggaatggccagcaagattgggaatgaccacagagaaattgttttttttttgtttgtttgtttgtttttggctaggctgatcttgaactcctgacctcctgatccacctgcctcgacctctcaaagtgttgggattaaaggagtgagcccccgtgcctggccaattttttttttttaattgtagtagagcaatgtgggttctgaacattttgaaagatgataccgtgcctctactaaaaattccaaaaaaaaaaaaaattaggtgggcttggtggcgggtgcctgtaatcccagctacttgggaggctgaggcaggtgaactgcttgaacccagggaggtggaggttgcagtgagccgagatcgcaccactgcactccagcctgggtgatggaacatgactgtgtctcaaaaaaaaaaaaaggaaagaggctgcagatccacaagggaaacaaaagattaccagtattacgaaaatgcagagtagggcccttcctggacccttactcagtgtggaaccccaaatgttgctgcttcttagggattgttcatagagtttacttctgcatcattcatctctttgttacatgtttttggttttgtttttcctgttttgtatttttttttaaagactgagtctcgctctgttgcctaggctggagtgcagtggcatgatctcagctcactgcaacctacacctcctgggttcaagcagttctcctgcttcagcctcctgagtatctgagattacaggcaggtgccaccacacccggctgatttttttaatttttagtagagatggggtttcgctgtgttggccaggctggtctcgaattcctatcctcaagtgatctgcccgccttggcctcccagagtgatgggattacaggcatgagccactgtgccctgccctggggaatcgatgttttaaactattgacaaagcctaattgtcaagggaagggactgagaaggggattggaaatgctgtttcctgaaagctgtgtttattgagaaatagtcccagtagctggagtgagttcaaagaagtatttttatatgtggacttgacctttggtcttttattctcattttccacttaagaaaatcttggctgtgtgaatgaaagagtgatacttttaaggttatagaaagtgaaatgtaatcatgccagataattttatatagatatttttatgtatggctgacctggatgactctaacagtgcatgtgtttgtgagtgtgtgtgtgtgcatgtgcgtgtatttaatgagaaaagtaaacttgtgtataggaggcttaaaaaatgtgtagggaattttaggtgactgttctgattccagacacttttattatggaagcaatcaagtaagtataggaagaaatattaataaaaggttatttatttctccttttactctttacagcccgaagatccctgttttgcatctcaaaaccgtgtgtacaatgacattggcaaggaaatgctcttacacgcctttgagggatataatgtctgtatttttgcctatgggcagactggtgctggaaaatcttatacaatgatgggtaaacaagaagaaagccaggctggcatcattccacaggtgaaaaacaaaacaaaacaaaaatcttctcttcattattagtgttagtcttaaattgctttaacagttatttttatttggcgaacatttatgcggggattgttttatgtcaggcacaaagatgaacaacccattattttccctcagaggagctcacaattgaatgggaaggattgacatgtacacatgtctgtcattaaaggtgggaaagtcagtgttttgtaatgattttgccatatatccaatgccatattattttgtcatttgaaaagtgttaccagcttgttaaagctctgttctaagtcctggagatggggggatattgttgatctgattttttttcaaattccatgcatagattacctctgaagaatgtgattatttttggtttttttgatagccttattcggagatactttcattttattttcctaatttaatactatgactttaaacttcaaacactctgagattctccctctttttttttttttttagaacagttagtattattgggtttgatcctttattgtttgggaatgaagaagcgttctgacatagatatttatttatttttattttcattattcgtttcacttaggatttaatggtgaaagacataagtatttaaaaagaacttcattatttacttatttatttgagacagggtctcactctgttgcccatgctggagtgcagtggtgtgatcttggctcactgaggccttgtcctcccaggctcaagtgatcctcctgccttagcctccagagtagctgggactaaagccatgtgccaccacacctagctcatttttaaattaaaaaaaaaaaaaatttttttttttttttgaggtggagtctctctctgttgcccaggctggagtgcaatggcgccatcttggctcactgcaacctccgcctcctgggttcaagtgattctcctgcctcagcctcccaagtagctgggacaataggcacccaccactatgcctggctaatttttgtatttttagtagaggcggggtttcaccatgttggtcctggtctggatctcctgacctcaggcaatccgcccacctccgcctcccaaagtgcagggattgcaggcatgagtcaccatgcccggcctttaaaattttttttttagagacagggtctcaccatgttgtccaggctggtctcgaatggacctgggctccatcctgggcttgggatgatctgcctgcctcgacttccagaagtactgggattacaggcatgagccactgtgcggggcctaaaaacttaagaaaaaaaaaagattaagtgagaagattgtatttaaaattttccttttatagtcatgcatcacttaagggtgggggtacattttgagaaatgcatcattagtcgttaggtgcttttgtcattgtacagatatcatagagtgtacttacacaaaccctggaaggtgtaaactgctccacacctagactgcgttgtatagcctgttgctccaaggctataaacttgtgtagcatgctactgtactgaatactacaggcaattataataggatggtaagtatttgtatatctaaacatagaaaagtacattaaaaatatgatataaaagatttgaaatggcacacctgcatagtgctcttacactggagcttgcagggctggaagttgctctgggtgagtcagtgagcaagtggtgagtaaatgtgaaggcctaggacattgctttgcagtattgtagactttataaatgctgcacacttaggctacactaaatttagttttaaaaacagtttcctttcaataattaaccttagttaaattactataacttttttactttataaactttaaaattttttaaactttctgatccttttataataacctttagtttaaaacacaaacagccccagcatggtggctcatgcctgtaatcccatcactttgggaggccaaggcgggtggatcactggaggtcaggagttcgagaccagcctgaccaacatggtgaaaccccgtgtctactaaaaatacaaaaaaatgagccaggcatggtggcgcatgcctgtaatcccagctacttgggaggctgaggcaggagaattgcttgaacccaggagacggaggttgcagtgagctgagatcgcgccattgcactctagcatgagcaacaagagtgaaactcggtctcaaaaaaaaaaaaaagaaaccacacacacactttgtacagctgtacaaaaatattttctttcttcatatctttattctataagcttttttgtattttttaattttttttttctttcttgagacagagtcttgctttgtcacccaggctggagtacagtggcgccctatcagctcactgcaacctccgcctcctgggttcaattaattcttgtgccttagcctcctgagtagctgggactacaggcacgtaccaccacgtctggctaatttttgtatttttagtagagacggggtttcacaatgttggccaggctggtcttgaactcctggcctcaagtgatctgcctgccttggcctcccaaagtgctgagatttacaggcgtgagccactgcacctggccaaattttttttttttttttttagacagagtttcactcctcttgcccaggctggaatgcagtggcacgatcttggctcactgcaacctccgcctcctgggttcaagcgattctcctgcctcagcctccagaatagctgggactatttttgtatttttagtagagatggggtttcaccatgttggccaagatgttctcgatctcctgaccttgtgatctgcctgcctcgtcctcccaaagtgctgggattacaggcatgagccaccttgcccagcccaaatttttaatttttgaaaaaaaatttaaacttttttgttaaaaacttaggcacacatttattagcctaggcctacacagggtcaggatcatcaagatatcactaggtgacaggaattttccagctttcttataatcttatggggatcactatcatatatgcagtccatcgttgaccgaatcatggttatgcagcgcatgactgactttattcaaagcattaatcgtatcttgatgtttatgacataatatattttgagatggagcaagaaaggacgtctggctaattcattgagcacgcgtggatgacttagtactcctctcatttgtgctcttcatgcctctctcattctacttccctagttatgtgaagaactttttgagaaaatcaatgacaactgtaatgaagaaatgtcttactctgtagaggtgagtacagccgtgagttgacaccgtaagcccttgttttccattctctcaagcatcacttaaatggctccaaattatgactgtggtacacatcacttcaccattccttcatttttgtcctttcaggctatttctgggttttgggtataatgaatagtgtcctgctttaatcttttttttggggggtgcgcggtggggacagggtctcactctgttgcccaggccctggagtgcagtggcgtgatcacagctcactgcagccttgaccttctgggccaaagcgatcttaccccctcagcttctcaagtagctgggacaacaggtgtgtgccaccaccacccctagataattgatttttttgtagagatggagtttccctatgttgcccaggttggtgttgaactcttgggctcaagcaatcttgcctcctccacctctgaaagtgctggggttgcagtgtgaatcactgagcccagccacaattaaatctttgttcataagtctgtgcatttatttgcagttattatcttttgtatgtttcttggtttttaaataatacatttgaattgccaaatgcctttttggaaagtaatgctgggtaacagttttcagtcacactaggagggtgtaagcacccattgtgcccttgccaacatttttctattttttaatctttgctaatttgataatgtaagtattctcttacttaaattttgaatttctttgattactagtatggttgaacgtcttgtaaattatgcatatgcctgtttacattttgggttcacaatgtctttctgattcatttgtgggaactcttctcctttaatattgttaataatggtttttgacaggcattggttttaaatatatataatcaaatctccccctttcccacttttttaattgcttataaaaacttggaaagtaattatccatcctgtgtttaccctggctctttcatgaagtctatagaattactttatacacatttgcttatttgataaacattctctctgttttgtatgtgcttaaagaagctgttttggggctcatacctgtaatcccagcacttcgggaggcgaatggatcacttgaggccaggagtttgagaccagcgtggccaacctggcaaaaccctgtctctactaaaaacacaaaaaattagccggctgtggtggtgcacacctgtaatcccagctactcgggaggctgaggcacgagaatcgcttgaacccaggaggcagaggttacagtgagccgagatcatgccagtgcaccccagcctggagtctgtctcaaaaaaaaaataataataataaataaataaaaagaagaagctgctgtttctttctcttcctccctctctctctcaccgccacccccccaccacacccttttttggtattcactttcatagtaactgaaattattaaagtgttctgttaccatgagtctgttttgaaaaaataggctgccttttaagcgatcttgagattttttttcttttctttttggtatttgttctgattctctgtagccttacagcatttcattcctagttaattcatttaattgctttggagttttttcttcacctagaaggtgttgcataaatatgtaaattctaaggaattctgtcttgtgactgtcatacaccaaaaagagaatgtgctgccctaagcatattttgcgttaaaatgaattttctgaatagcttgtcccatagttattcttttttgaatcaggtgatagaatttttgagcttacaggtaataaaagaagatgcccttttcttttgtattagagtttccaggcttaacttggagtggagcatagattcctagttgacactgtggtttcttgccacatttgcaggacctctctacctgcctcttctacttccttccctgtttactctgctccacccatattgccttttttgctgtttcaagaacataccagaaacattcctgcttcaaggcctctacatttacttctcctcttgcctgaaatgttgttcacttggatgtcattttgactaagtttctcacgttcttcaagtctgcataaatcacacactctcagtgaggcttaccttgaccaccttatttaatattgtatcttgccctttaccccacatcctgagctctcttccccattctattttcttttttccatcatactcatcatgttctaacatgctttctcagttacctattttttatgtttgttgtttattatcagtatcccttgctagaagcataagctcactggggcagggttctttgtctgctttatttagtggtgtataccaattgcctagaacagtgcctgtaagagaacggtcctcagtgagttggatctgccaggtggcatctggagtggttggtgcagaagtaaaagaaatgatgatggctttggatggattcacatatcagagcataaggaatggagcacatgaacttttacctagattatttgggttctctttgtctcacatttgtgtgaaaaggtacgagtgttccaaaagatgtaatatattccggggattcagtattgtatgtacaaatttaagtacacagcaatgattgaagaatcatctcactttctaggatgacttgctgtcagaaagaatatttgttgttctgttactttactctcataatagattaattactttatctttcagagttgtctttttttttggagacagagtctcactctgtcacccaggctggagtgcagcggcgcggtctcggctcacttcaacctccgcctcccaggttcaagcaattctcctgcctcagcctcccgagaggctgggattacaggctcctgctaccacacctggctaattttctgtatttttagtagacacagggtttcaccatgttggccaggctggtctcgaactcctgacctcatgatccacccgccttggcctcccaaagggctgggattataggcgtgagccactgcgcccggcctttttttctttttcttctttttttttaagacaaggtcttgctctgttacccagactggagtgcagtggtgcaaacagggttcgctgcagccttgacctcctgggctcagtgatcgtcctgcctcagcctcctgagtaatttgcaccacaggcatgtgccacagtgtgtggctcccaaagtgctaagattacaggcatgagctactgcatctggccaagttcttaattttttaaaatggattttatttatttatttatttatttatttatttatttatttatttatttatttttagagacaggatctcactgtcacccaggctggagtgcagtggcgtgatctcagctcactgcatccccaacctcctgggcttgagtgatcttcccacctcagcctcccgagtagctgggaacacaggcacacactaccatgcctggctaattctttgtatttttggtagaagtggggttttaccatgttacccaggttggtctcgaattcctgagctcaagcaatctgcccaccttgacctcccaaagagtggggattccaggcatgagccaccatgcccagcctttaactgattttaaaacacaaattaaggccaggtgcggtggctcacacctgtaatccctgcactttgggaggccaagatgggaggattgcttgagcccaggagttcaagaccagcctgggcaacgtggtgagaccctgtctctgcaaaaaaaaattttttttaattagctaggcatggtggcacgtgcctgtagtcccagttactccagaggctgaggcaggaggattgcttaagcccaggaagtcgaggctgcagtgagccatgtttgagccactgcactccagcctgggtgacagagtaagatacagtctcaaaaaatatataaaaataaaatacagtataaaaatacagttagagactgaatgaaagaaaaaggcaatagaaatggaattaagattccattccagatactctgaaaacatgtccatagacatttaaagtttaaaaatgcaggagctgtaatgtaagcttgaatagctccatgatacagaaggatctgtttcctgggtagcatcgtaatgtggcctattgtgatgaatttaccctagttcagagccttgtttgcttagaagtctgattttgtagattcatcaagaaaaggactatccttacaagttaagacttgagtaaagctcatttgactgatgttatgaaaccaacttgttggtttgttactttaccatgagaaataactattactaaggctagaacactcaagccattcgcaagactatttaatatatttctgtggacagacctcgctgttggaagcctgttggttgtttggtgtgcatggaattagaaggagaggagttgcttagatacatgtttaattgccccaggttaagaaatgatagcttaatgcattaatcaccatgatcgaatggtcctgccaatgagacaagaatttatgaagtgtattgtctgaggcttctttctccctcacaaatcttggataggtcctgccaccaccagctttcatgctggtcaaccctcatcccttctggaggatacatcgtccatagttagtaacagtgtggtgagccttaaagaattagcatcacccgtctgttttgtcttctctgctctgtaatattgatattgttccttggttttaactctaatagaaatcttatttccgagttcttggagtaacctcaatgcaaatcccagttactgacaacagtatacattttaaaaaacattgataactgataaattgctactaaaatatcttttagctgtcactacattccagagataatctgtttacctctcccttacagagaaagtctgaaggctggttctaacctattcagtgtaattacctgtgcgtattgttaatagaataaaagggcctagagttacggcatttcactttgtaaaggttgctgatctctaatcttagagcttttaataaaagttaaaaaaaattttttttctgtatgtgatttcttttgttttctttttctttctttctttctttctttttttttattaagacagagcctcactctgtcaccgaggctgaagtgcaggggtgtgatatcggctcactctaacctccacctcccaggtacaggcgatttctcctgccttagcctcctgagtagctgagactacaggcatgtgccaccacgcctggctcctttttgtatttttggtagagacgggatttcaccatgttggccagactggtctcgaactcgtagttcgagtgatctcaagtgatccgccctccttggcctcccaaagtgctgggattacaggcgtgagccaccgcgcccggcttctgtatgtgatttctttttcactctaattcactttactaatttgttcataggtgagctacatggaaatttactgtgaaagagtacgagatttgctgaatccaaaaaacaagggtaatttgcgtgtgcgtgaacacccacttcttggaccctatgtggaggatctgtccaagttggcagttacttcctacacagacattgctgacctcatggatgctgggaacaaagccaggtatggtaggaaatagagtaatgactgaggtctttggcaccttttgaggtccttttttcccagttaagggtttgaggccacatttatagctatgaaagttgctttaattgtggagtcctctgatcctttgactgtgctgtaacagtgagggcttcagagtgttaagtatcttctcatctaaacagtacattgctgaaacatgttagagctctcattgagttttactcttaggttttgatcaagtcatggtaaaatgttagttatcatgtatatatgcggctgtggtagtaattgattctggaataaatgagcaccaataaagaataaaaattaaatgcttcattggtttctaaagggatagctggagtatgaaaaatgattctgatggggtgcctttggaattggagagtaacttgatgggctcacaaataaggcagtattgagagcaattgtgtaagtgacaatcttgcaatctgtgaataagtttaagactattgcttgtgattgttatgcttataatgtggagcctgctgtccatttcaactctcatctaagaattcccttgtcacgtggtcacctttatgtttatttaggacagtggcagctacaaacatgaatgaaacaagtagccgttcccacgctgtgtttacgattgttttcacccagaagaaacacgataatgagaccaacctttccactgagaaggtaggagagtttcagtctctaggcttgagttgtgaaggatggagattttgagaagtcccttttgttgccctctgctttttgtggaaggttgggtgttggggggtgctcttttacttaatggagggtgttttatacctctgcttatcatttttcttccaccctacaccagttttctgtataggttcttaaatgaagttgtaagatagagaatagggttaagaaaaaaacaatccaggactttgggtctcaaaaactactcaatacaagacagttaagcagtcttgcaggagaaagttctttcttttcttcttcttgactgaacctttttattaccttattagctgcctttggtatgtgtattctttttttttttttttttgagctatgataatgttatagtgggattaaatgtttaagcaaatgatatgtttcattcctggaaaataactccacaacagttctggtgttcttcaaatacctttctttgcttattgatttttcattttctatagtggttaaatgtcacagactttagcgttggattgcttgctttgaattctgattctgccactcttcagctatattactttgggcaaactacttaacctctttgttcctcagtttccccatccataacagcctgataggattgttaaaaagattaagcgttaatataggttaagtgcatacaataatgtctggcacagagtagccactcaataatgttaattttattgttattgttagtaataaaaaatttatgttgaatactactctatctgcatccctaagaaggatgcacctggatttttaagcttcaagttaggtttattgtactggcaattataaaagatcctttgccttataaaatgagtactttagacaccactgtcactaattattaaaatcaccttttatttgttgacttatttctagctgaaaatgatttttaaaaatatactcctgctgggccgggtatggtggctcacacctgtaatcccagcactgtgggaggccaaggcagacagatcaagaggtcaggagtttgggaccagcctggccagcatggtgaaacccagtctctactaaaaatataaaaaaattggctgtgcgtggtggcatgcgcctgtggtcccagctgctcaggaggctgaggcaggagaatcgcttgaacccaggaggtggaggttgcagtgagccaagatcgtgccattgcactccagcatgggtgacagagcgagactctgtctcaaaaaaaaaaaaaaacacactcctactgggcatggtggctcacacctgtaatccaagcactttgggaggctgaggcgggtggatcacctgaggtcaggagttcgagaccagcctggtcaacatggtgaaacccagtctctactaaaaatacaaaaaattagccggtcatggtgtgtgccggtaatcctagctactccagaggctgaggcaggagaatcgcttgaacctgggaggcagaggttgcagttggctgaggttgcgccattgcacttcagcctgggtaacaagagcgaaacttcgtctcaaaaaatatatatatatttcttatatagatgatcaaataacttgtttagccagaggttataatattagtgctatttattagttagtgtttatctgaatgccagcaaagaacattgtatgtgaaggtgttttttgcccttctcccatgatgtcgaatctacaaaattaatgttaatcccataatcatagctttcctggtaattcattttggatacttttgtctaaactttcctgaagctttatttttttacagtgttattgaggtattattgaagtatacagtaaatggcacatatttaaagcgtaaaatttggtcagttttgacgtatttgtatacctgtgaaactagcgccacaatccagataatgataatttttattctcaaaagttgcctcatatctctttgtagtctttctctatcccttcttctgtggcaattcccgggcaattccggacctgcccttttgtcactatatattaatttacattttctagaattttatataaatggaatcatagagtatgtactgttttttgtctggagtctttcacttagcatagtgattttgagattcatctatgttgttgtgtttatcaatagttccttttcattgttgatgagtattgcgttatacagatacaccacagtttattaattcaactgttgatggacttttaaactgttgccagtttttgattattacaaacgaagctgatgtgaacatttgtgtacaagtctttgtgtggacatttgtttttgttctgttggtaaatacttaggagtaggatgattgagtcttattgtagctccttaagaaatgtcaaggctgggcacggtggctcacgcctgtactcccagcaccatgggaggctgaggcgggtggatcacaaggtcaggagtttgagaccagcctggtcaacatggtgaaaccccgtctctactaaaaatacaaaaaaaattagctgggcgtggtggtgggcgcctgtaagctcagctactcgggaggctgaggtgggagaatcgtttgaacccaggaggtggaggttgcagtgagccaagattgcaccattgcattccagcctgggtgacagagcgagactctgtctcaaaaaaaaaaaaaaaaggaaagaaaataaatgtcaaattgttttccaaagtgattgtaccattttacattcccaccagaaatatgtgattgttccagttgcttaaagcttcacttttagtaagccatttaatgagttgatgagttttatatatttttataacatactctagtaaattatgtcatgtttatcctaaagttacttttttttgaaccgtgataattgctatgaattttgtgcatgctctttttttttttaattaaaaaaaatttttttttagagacacaagggtgttatatgttgccaggctggagtgcagcagacagctttgaactcctgggctcaaaggagcttcctgagtagctgggactacaggcatgtgccattgcacctgccgtgtgtactgtttaaactaactgatagatgttgtcttgatctttttgtgccatatttaaaagctctaatacttttagttttttccataccttaatcttttaaaaagcattctgcctctaaatatttcctgcttctatcttgcttatttttgaattgcccccgatgttattgttctttatcaggtcagtaaaatcagcttggtggatctagcaggaagtgaacgagctgattcaactggtgccaaagggactcgattaaaggtatttattttagcaaataaatggcctgatcaataaatggccactacctgtttttgtaaataaaattttattgaaccgcagctacatacatttgtttatgtattgtctatggctgcttttgcactacaatggcagtgttgtgacagagaccgtatggcccagaaaacctaaaataatttgtgtctgtccttctacggaaaaattttgctgactcctgatctgtaacttcaatggaaggataagttatctaactaaatagttagggagcacatcatagtcagggtgagagttgaattgcattttaaggaacaggtagaatttggctagatggaattaagagatggcagtgggaataggatatacaagattcagatgtgagaacagaaatttcatgtcgataagttgagggaagaaggctgcacacatctgtaagcttttggagcacaaatatctcgaagatacttcaggactgtgagttaggcatgtggtctcagcatgttattatcaagtggaaaagaggacagatggaggactaaaggttgtttttagaacttgtaataaagaaatatgctagcatatggcaaatcatattttatgttctgtatgatatagcagtagtagaaattcttcatcattctttcatatttggtatttattttaggaaggagcaaatattaataagtctcttacaactttgggcaaagtcatttcagccttggccgaggtggtaagttttatacttcattataaggggagttgtgtctgttcagcaaatatacttgatgatattttattattgtttatgaaggctgtctttttgtggcccttttctgtaatcttgcctttctccttttagagcttttcagataagatactaggtataacacagtttgactttgtactgaaagtaaaagatactaaggagaacaaaagtaaatatagatctgtaaaaactagagcaaacactgaaggtttgactcatttttttgagccttattttatgtttctcacaaaaaccaagtatatttattgtctcttcttttcctgtataatcttttctgagtaagatgcagtatcttttggagtattttgagcagtttggctttggtgaatgctgttgatttgagggccagtagttttttttttttttttcccccaatagttttgttctttcctactcctttatggtagaacagtaaaactaaaactattttttttaaattaggggctttgttgtctacattatttaaattagtcattgtgtgttctagtttagtttaaaacctctttttaattgctaagaagaatgaaatgctttcttgcttgccttggagaaatcataatctatgacatgaaatttaaacaaaatctaattttctacttggaggcttatcctgtgttcttattttctcctttaaatgctttcacctgtaggataactgcactagcaaggtacagtggggattggtagagataaactagaattgacttttatgttttaaatcctcactaggatgtatggaggcataagtaggaatggaaccttcaaaaatcttttcatcatttgttctctggctctggaatttagagtggctgtaaatttagggtgaccacaaatcatgaggtttcacaccaaaattaatttctagaacatgatatgctttggagaaggaattaagaataaaggaacaaggccgagcatggtggctcatgcctgtaatcccagcactttgggaggccaaggcgggcggatcatttgaggtcagaagtttgagaccagtctggccaacatggtgaaactctgtctctactaaaaatacaaaaattagctgggtgtggtagcgcgtgcccatagtgtcccaactattcacgggttttaaactgaagttttaggcctcaaggattacatagtggagtgaaagtttgttccactaatctgaatgactgaaaggcttaattctcccttgaggtctgtgcaatctaaaattgaacctgctattggaaatgactttctgattggtggattgtgtgtctgtgggtagagtggaatgagatgatgatgatgtggacatatttaataagagatggaattaaaatgtttcttgcctactccctttcctcctcctcctcaaaaaaaaaaaaaaaaaaaaaaaaaaaccccaacaaacaccacaagactagccactaagaggccagccatgtagtaccctttttctgaatagaaaaagtgcttgtgcaatagtaggatcatccttagtttaaccttggattataccaggactgaattataaaactgctgatttgctggagtggtgtttagcagtgagaccctggctttctccttagtagcttctttttttttttttttttttggagaccaggtctctcactgctgcccaggctggggtacagtggcacgatctcggctcagtgcaacctccaccttctgggttcaagcgattgtcctgcctcagcctcccaagtagctgagattacaggtgcccgccaccacccccggctaattttttgtatttttagtagagatggggtttcatcacgttggccaggctggtctcgaactcctgacctcaagtgatccacccacctcggcctcccaaagtactgggattacaggcatgagccactgtgcccggcctccccttaatatcttcttaaagtgtcacaacgcagtagtcagccagcatatatttgagtagctgttacctgtaaagcatttgcattaatttttacttttagagaatataattttttttcatttaagcactgccttttcattggtgctttttgctttgtcctgtggtaataagaaggatcatgaagaaagcagaataagtagacttaatagaacattcatctttctaaattaccaaatcatatctctttcttagacctttttacttttagtctttgctttaataattggattatttttggcataatttcctttcaaagagaccaaataaatattattttacaagagttactagatttgcaacaacccaaccaatgacatggtggttggccaagtaaattcactaactagatgacttgctcctacacatccaacctggaatgcacaagattagtattttcccctgtgcaaaaataaaaattgaggatggggtatttgatgatgttagggaattattgtttatttaatgcacaagattagtattttcccctgtgcaaaaataaaaattgaggatggggtatttgatgatgttagggaattattgtttattttggtaagtgtgataatggtcctgtggtgttttgttttgtttttaaaaaacatgaccttttccttcacagtaagaaaaaggataaaaaatgatatggacaggatattaggtaatagtattgtgttgatgtttaattttttgaatttggtcattgttttctgtgtaagagaatgttcttatatgctgaagtgtttaggggtaaatggagatgaggtccgcaactgacttcaaaatgggtcaggaaaataagttgtagaaaagtgtttgggggataattgaaagatgattggcagagtattttggtaatggttgaagctgcacgttgggtatggtagctcattatactgctctctcaactgttgtgtatattacacagttttcaaaataaaatgtaaaatgaaaaaattaccttattgcgtgagtttttggttttgtgaagaattgaaactatgaatgataaacttccacagtgtcggggttgtactgtaatttaatttacttgggaattttagactgatttgcctttcttgggaatttttttccctaacgaaaaatgctaagaccatttcttttcctttaatagagtaaaaagaagaagaaaacagattttattccctacagggattctgtacttacttggctccttcgagaaaatttaggtatgttgaccactagtgaaaagtagttatctttttaactttgattatcttttgtggttaattgtcctgtgtctgttttggagacaaataatctctagatattcatgttactacttgagtgttccttgcctgctttcatttttactcctaatttcagttggttggattcccttggttttaagccagggtatactcccatatctcattttcttcagggcatgaactgtgcagtagttgtcctcccgactccccatacttgcttcagattattgctctttcttcgaagttatttcaaaactccatgcttctctgaggtgcacaaaattagacattgccaacccttaatcctcctcgttgctgatgttttcagaccttcaaatcactgttcttcattcacttctcctactttttttttttttttgagatggagttcgtgctgttgcccaggctggagtgcggtggtgcaatcttggctcactgcagcctccgcctcctgggttcaagcagttctcctgcctcagcctcccgagtagctgggattacagacacacaccaccttgcccagctaatttttttgtacttttagtagagacagggttttgccatgttggccaggctggtctcgaactcctgacctctggtgatccgcccacctgggtgaaagagtgagactccctctcaaaaaaaaaataaaagaaagaaatttgacattacattaaatcttaggatctgagattacaatatcagatttgacacattccataaaatttttcttctaaaatgagtgtgatttgatactcatgattaatctttttaggtggcaattctcggactgcaatggttgctgctctgagccccgcggatatcaactacgatgagactttgagcactctgaggtactttcttttgatctcagtaacaacatagaccacattgccatcagaagccattttgtgataccatggatgtttttatgctatctgggtagttatttatgtaaataatgttcctttcctctcataacagggaaaacttagggaaaaagtgatttgtattataatagaatttacctctttatggttttcagtttcactgggaaagatatgaactttttatttttttatccctcatggatacctagataaggcaggagctttttcataggaaagatttttaaattgctcaagtgagatttttgggtaacttttaggtaatagtgacattttcttattcatttctataaaaagaagtgtcccccttcttgtagtgtttgtcgttatagaaatgctgaagtcggccaggcgcagtggcccccacctgtaatcccagcactttgggtggccgaggtgggcggatcacttgaggtcaggagtttgagaccagcctggccaacatgatgaaaccccatctctactaaaaatacaaaaatgagtcgggcgtggtgccatgcacctgtaatcctagctactcaggaggctgaggcaggagaattgcttgaacctgggaggcggaggttgcagtgagccgagatggcgccactgcactccagcctggagacagagcgagactccatctcaaaaaaaaaaaaaaataaattctgaagtcataataagtaataaaattataggaatatgtagcaatattaaaaaattaccaacatagccaggtgcagtggtgtgcacctgtagtcctagctacttggaaagctgaggcaggaggatcacttgagcacaggagtttgaggccagcccaggcaacgtagtgagactctgtctcttaaaaaaaaaaaaagaaaaaaacaattaccaacagaatgttcataaaaagttttttttgtttgttagtttttgtttttgagtcttgctatgtggcccaagctggagtgcagtggcaagattgtagctcgctgcagcctcagacacctgggctcgtgtgattctcctacttcagcctctcaagtagctaaaactataggtgcatgccactaggcctggctaatttttaaaaatttcttgtagagatggggggtcttgttaggttactcaggctggtttcaaattcctggcctcaagtgatcctccccacttggcctcctaaagtgttgggattacaggtgtgagctgcctcccgaggcctgtatttttttatgtatgagtaggtttcattactttagtctggaactctctacccttcttccatgaaagacacttgatgtaatggaataaacactatacagtctcataagttgggtttaagtcctctcgctgttatttccattgtgatcttgggcaaatcacttaaattcatctgagcctttttcttcatctttaataggtactataaagctttatacaaatgtattattatcaaggctcataaaatgtaaacactcaggatatttgatttagagataatagtatgttacttatgagaagtagaacatatgagaaatgacaagaacaaattttctttttggatctagatatgcagatcgtgcaaaacaaattaaatgcaatgctgttatcaatgaggaccccaatgccaaactggttcgtgaattaaaggaggaggtgacacggctgaaggaccttcttcgtgctcagggcctgggagatattattgatagtaagtgaattaaggatcgttacaaaatctaatcctttcttcttcagggttcttattcagcgttcttatatttaaaataaacttcaagttaaggagcatgatgaagctaaatggtagtgaaaatgttttgttttgttttgttttctttttccttaaaaaacccaatggaaatgatctctagattcctttatgtaatgtgtaccagactatccatttgaactcaggaaattagttttaaatcgcaaatatgtcactagtatttttgttagaattctgttttagatcagcaatgaagtttatttggaacgttaaacctgttatcactgagcaattaattacttcatagaaatgttatttgaaattttgagttttgtttcatgggttgctctggattagtgtcgtggcagtaatataagaaacgcaccattcaagcctaccttcagataagattcacctttgaatggccccctcctcctgtaaaatgctggagtgccccgtgctgcctatgaacatatgaaggggaaaagttcaattcctatgaagttcaagaactacacttccagagagtattgttttacaatgttgtattaaaatttatcttaaaaaatctccgtgatgtgcctatccagtggcttattcagaagttctcttaagtgagtaaaatggattcatataggaatagaatatggtagaatatgggttagtttagtaaagcatttttttttagtgtaaagttaaacttatattccttgaagttctaataagattttcaaggcctcttctagtttaattcttcttattgattagagtccgagtttagatgaataccgtttgtaaaaatgataccgtattctaagtattaacttttccatctccccaaatgccaaaaactgctctgttccctctctgtgtcactgctgaacctgaactttgacccttctcgtattttccctcctgcttaccttcagttgatccattgatcgatgattactctggaagtggaagcaaatgtgtgtatttcacatattggttatttccagtactctgacttgctaatctgcctctgctggatcagccttaaaataagctttgcatgctggcaatccttacagggaaatcccagacagagcatagtatagaatcagaaatgatcctatttttgcccttcttcatttagcaaactaatctttgctgaatttcagtttgtggcttgagtgaagttgaaaggcttaagaatctcttgctgcttctactcttcagtttttcccattgtgattcaattaaatccaaaaatcatagatgatagcaactgacacttactgattttgcataatatgccaggccctattctaggcaccttgaatatattgtcccttttaattctgttaatggctctgaaaatattttattatgttccttttaccaataatcatttttagtcagcaaaactatctatgatttaagagctctgtagatgttgggctaagactcatgagtgcttgtgctaagttgcttttctccataacttgggcctcggaatgattagataaacgttttttccttttttttttttttttttttttttttagacagtctcactcttgtcacccaagctggagtgtaatgacatgatcgtggcccactgtaaccttgaactcttgggctcaagtgatctttccagctcagcctcctgagtatctgagactacagttgttcgctgccacacctggctaattttttaattttttatttgtagaggtgaggggtctcgctgtgtttcccaggctggtctggaacccctgacctcaagcagtcctcctgcctcggccttccaaagtgctaggattatagatgtcagccaccacacccaaccattcctcttttcataagtcacaaattaaaataacttaggtgtctaaaatgactcaaacatttttaaagagtcacatgaacctcattattctctccacatatatcttaagttggtgaggaaattatttcttacccttttaaggtaattcatcaagaaattgttatcttagaagaaaaatgtcttgattttggggctaatttttagatttgtactgagttatttctttttttttcttttttcttttcttttttgagatggagtcttgctttgtcgctaggctggagttcagtggcggaatctcggctcactgcaacttccgctgcctgggttcaagcgatttctcctgcctcagcctcccgagtagctgggactataggtgcgcaccaccacgcccagcttatttttatatttttaatagagatggggtttcatcatgttagccaggatggtctcaatctcttgacctcgtgatcctcctgccttggcctcccaaagtgctggcattacaggtgtgagccatcaagcccagccacctgagttgcttatttctacagtaaggcatgtaatgaggcttggcagacagtgagaaaatgcataggagaaaccaaacatagccctggctgtggttatgaggttagggcttaaaggcactataatgtcctgatacagaagtgactcttggactgcaacagctctgtctgagatttccaaagctcaacgatactggtgtggaaaaggtgccttcttctttttgcttttgtgctcaaggtgttgctgctgccagcttgttgcctacctcttttcttagcagctgcggcatttcctgaaagaccatgcatgactaagttttaattctgtattcctgagggaaagcagccctgactccttctcagtttccattttgatctatttctctttattccttttagggcttgcatgtgaccattggacctaaactctgtccatcctggtcttttctcccaatggctaattttttgctctaatccctatcccccttttaaaagatgcctctttgcttgttgccctatgttctgtatttgcagatggtggttttcaaactgtcttgaagcaaccactggctttaagggagttaaaaaactggctttaattaaatagtagagatgagtaagcccagggagaactaatagtatttttttccagctatgtgtattgactcatctcctttgaggaaaactgacttagttttgatatgaattttagtttctcaggtttaaaaataagctaattttaaagttggattgcaccaatacttaagatttacctttggtatctttttgcaaaggatgactaatgaaagaaagtaatgaaagaaagtacaaacagcaaattaattaattttgttgtttgtggcttaatttttttttcttttaccaatactgagtgtaaaagcaaaattaacagttctattaaagacttagtaaatggaagtatgttcctaaaacttgcattttatactaggaagcaggcttagcagtgacccatggttgtactgttaggctaattaagggccttaaattagcaaataatcagccttattttttgcttgctctgacagaagaatggaacctgcactaaaactcattaatctgctaattgttcttccctgttgaggcaatcaattagtcctgagtttttaaccaggacttatacaaaattcctctcatttctataattaccccttttttatttaagacatattaaaaatccttttagcatgttgaaatgttgccatacaaagcatactactcagtgcacaaattttgttttaactgtaacattttcttggaaatttttgctgaattacacgtaacactgagccagaccaatatggattattattgataaataaatgatcattgttttcccttactgttacaaactactggaaaagtgtaaatctgaagacattgtagactaggaacactagaaagactaaatggaaggtagtttggcttttttagggagagtgcctaagcagtatcctttgaggctctggtttatccccctgcgagatacagcgttaacctacattggaatcttttagtttgtaaatgcagaaatgattctgaacctgtaggataccactattaaagacagacatgttttagaactgccatctagaacagttgtaacctgtgtttgtattatagcgtgtcttggtcttggcgctttaatgctgtcctttcttacaacgatattccttcctgtctttttttcttcctctgcttctttcccttttccctacttttcctgccttctcttctttctatctcccagatctgaaagattttcagaacaataagcatagatacttgctagcctctgagaatcaacgccctggccatttttccacagcatccatggggtccctcacttcatccccatcttcctgctcactcagtagtcaggtgggcttgacgtctgtgaccagtattcaagagaggatcatgtctacacctggaggagaggaagctattgaacgtttaaaggtaagtaatagttcagactgaatacaaggtattctatgtagctccacaaggaagaactaggagtaaaaatcactaagatttcgactcagcatatggagaactctttgactcttagaagtgtcctgaaaattgaattttgtgctttgtaagttaatttcttttcattagaatgcctgagtctgacatggccaggcagagttgggagaagtgcatgggcagttcataggctggcaaggcagagtaacagattaatagatgtgtacgttaattctgggatagtacatcaagttacagtgtaattgttttgttagaaatttatttggaaacgtggtttcattgaaagatggaattctgtgtagagccatgcttctgttaataaagatgaagtttgggccgggtgcagtggctcacgcctgtaatcccagcactttgggaggccgaggcggggtggatcacgaggtcaggagatcaagaccatcctggctaacacggtgagaccctgtctctactaaaaatacaaaaaattagccgggcgtggtggcgggcacctgtagtcccagctactcctgaggctgaggcaggagaatggcatgaacccaggaggcggagcttgcagtgagccgagatcgtgccactgcattccagcctgggggacacagtgagactccgtctcaaaaaaaaaaaaaaaaaaaaaaaaagataaagttagaacatttgagtagctgttccaggtttattcagatagttattaaattatatcttctagaagttcacagaaagccttgatgccctatgattactgtacaggaaggttatctcctcctatgctggtacccatggggtcacagggccatagtgctgcatgtatgcagattactggcctatggctcccagctttgctgttggaggtatttcccagccccttgctggctctgtcaggttcgatcttatctctttgtatgaatatgaaagttaagagcagcagagccttctgactcatagctgcttctcttcctcctcaattaattcagtgcacagacagttgtcacctgcagtgctgaaagctgttcaggaatcctgccacccatcagatgactgtgacagcatcatctgctttgaagcaaatattttttctttccctacttgtcacctccaggaagatagtttgacccataccttttagccattgtgttcaagagtgctagggtaggggacacagggaggacaaaaaacactttttaagagtctgagaagttgcagtcatgctgccagccagcagtcttcttcacagtcacttggtattccccttgactgccattcatgcaaggacgatagagaacagtgacacattgacacatttaataggtaaaaggcttgccgaaaaactctttaacactaaagtgaattaagcttgataattgaatatgtcagatgctttcattttaattttcatgtgaggctgaaaaagattttatatgaagaaagaggttctgctttttctttcttaatcagcctaccttttcccttgacattttacttacttcaaaagtacagtgtgggccgggcatggtggctcacacctgtaaacccagtactttgggaggctgaggcaggaggatcattttagctcaggagtttaaggctgcagtgagctgtgattgtactgctgcactccagcctgagtgacagagcaagactctatctcaaaaaaacatgctttagaaacaaaaataaggccgggcacggtagctcacacctgtaattccagcactttgggaggccaaggtgggcggatcatctgaggtcaggagttcaagacccgcttggccaacagtgaaaccccatctctactaaaaatacaaaaaaattaagccgggcttagtggctcatgcctgtaatcccagcactttgggaggctgaggcaggcagatcacttaaggtcaggagttcaagaccagcctggccaacatggtgaaaccccatctcaactaaaaataagaaaattagccaagcatggtggcacacgcctgtaatcccagctgcttggagggtgaggcacaagaatcacttgaacttgggaggcggaggttgcacagcctggagattgcgccattgcattccagtctgggcggcagagtgagactctgtctcaaaaaataaataaataaaaatagaaaaattagccggccatggtgacgtgcatctatagtcccagccactcgggaagctgaggcaggagaatcccttgaacccaggaggcggaggttacagtgagctaagattgcgccaatgccctccagcctgggcaacagagtgagactccatctcaaaaaaaaaacaaaaacaaaaataatgtgcttgtttcttccttcagaacatgtaagtggaaagtgagtgaagttctgcaacacctagcaaagggagaaggagtgagaaatctttccattaaatgttgtaggctgcagggtaacttttactgttggtaaaattgactttgaaattttactaaagaccttagtgaagaggagtggtaagactccattcacacattttctcacaataggcgtcagtgaccatgttgctttgcagggctcttttcagagccagagtgagaaatagggagctccttgggaatgagaagtaaaactcccacttactgagtccttaatataaaatgttctttttctttggggatcttaagtcttaactatttgcttattaaagccttagctcttacacttgagattaccctttcctttgaccttcctcttgatgtaaaggagaaatttctccctaactgccaagtgggaccaattgaaaataatgtcacatgttaggagtcaagacattaaccagactcttcaagattcaggtaacccagtgtcttccaaataatttctagggaataacactgtcattattcagggaactctccttccgacttccctatgtcccactaaagcaagacaaaactgtattacttcaatcagaaaacaaatttctctgttttaattcttccttacgccaaaataaagaactcttctgttttccctagttttattctagaaagaaaacagcttccttagtgttttgtgttgtcttgagtttttaatgcagtgtggtagttcactgaagcataagcaccttagttctgctcttattttgtgaatggtgagaatttctttcgggcagacctgcattttaatgctgcacgcagataacatctttcatccgtagcgccagggcaatggttgtgcagtagaaatgcttgagaatatctaggaactgggttcctaaggcatggtgctgcaggagaaaaatattataatggaaaacagcaatagaggaggttagtttattttcctaacattttatttccctttgtttctttttgactttaaaaaaggtcagttgattggatactgtttttacacatgatgttgctgtggctttgttcactgaatagcctttttccatatgttaggtactcatgtcacaccattgtaaagatgttttttttttttgagacagagtcttgctctgttgcccaggctggagtgcagtgacgcgatctcggctcactgcaacctccgcctcccaggttcaagcaactctcctgcctcagccttctgagaagctgggattacaggcatgtaccaccacatctggctaatttttgtatttttagtagagacggggtttcgccatgttggccaggctggtctcaaacttctgactacaggtgatctgcctgcctcggcctcccaaagtgctgggattacaagcatgagccaccatgccaggtcttcctgtcaaataaggttttaaacatgcagctgtagccacagctctcgtgtttattagtctggcatcacagtcagtactgtgagtgccgttgcttaggcttagcctataaatatccacaaatatccattacagaagcaggcaagggcaaatgctgtgctaagcagcccaagggccacatttggaacccacttaggaagcatgctatgttcagtacagtaaaaccttggtgattcaatggcttcaacaaatgttctgtgtagtaagtgtttttcatggaaatatttctgacttgtcctggtgatttctgtgtttccttaactgaatcatcatcaagaagagattaaattgtttagctatatgaacataatttattaaccagtgctatacaaataactagagatgcagacagatatgacgtgagaccaaagagtgaatgacacctgagcctggcattcctcggagcttaaagaagagttcctggtgtccctctgttttttggaattttttttttttcaaagaaagggaggaggattaaagatttatctcctcaacccctcatttctgaaccatgaatccacatttcaagttcatcttacattaggcccctagagtggggtatgggaagccctggacaccagcatgcctgcctgccagcagaatgagttgatgctcctgagactgaatgctgttttgcacttggcttccctatttatactaagtttgctactcaggcttgaacagaatatccttcactttttcttaacttagggtgaactgtttcatagaacatttacttgaaagcctattgatcctgttttatttgaagaaagaacagtgagtcagcaaatagctctagacctgtctcagtgagtagtgtgggctcacttagcttctctggtctgttggaacacagtggcaccatcttggctcagtgcaacctctgccttccaggttcaagcgaatctcctgcttcagcctcccaagtaactgggactacaggtgcgtgccactgtgcccggctaattttcgtatttttagtagagatggggtttcaccatgtgagccagctgatcttgaactcttgtctctggtccagttttcttatctcgtgaatggttccagaataaacgattttgcaggcttttttcagccctgaagttgtgctaatgtgactcacagttattattttctctaagtttcccccaaagtttttaaaaatagctttctagacaacctaaaaattgcagctgaaaactgtaataaaaataaaagttgtaccttactcattaaatctcttttctgcaaagagatcatgttctgatttacccttcagttggtaagtaaaattagataagtcatattagagttggctgcaaaatggtaagaggattcctagacagtaattttgctttcttagagtgagttctacagttgccccaaaataggatggctttaatatgactagataatcctctgctctgaaataacctttttctgaaggtaatcaactaggaagaaatatttttaaaatatctcatatgtcagtttgtattccataatcaacagtggtttattgtggttagtactataataagtactagtcaagatgccttgtttaggtcgggtgcatcctgttgtcctgtctgttgaaggttttcactttgagaagattgtatagatttctacccagctatctttaatagaccttaaaattatgtaggttatatcatcagcttgtcttgtatttgcctatttaaaatcatatgcagggtggggctgggaggaaaagaaaaaaaaggaaaaaagcagtcatatgcaaaagcattttctttttttaaagaggggctcactgtgttgctcaggctggagtgtagtggtgcagtcatagctcacttatgcagaagcgtttaacaccactcttagtggttgttgaataacttttgtggtgctttatagataaactattgaaaacttggttcttggccttctcactccttagggaattgtgtggatttgtcttgctcgctggccctctagtatgacacttttgttctccatttgtggggcggcatgtgcactgcatggtaatcatttctgctgaggactgtgtagagatgccattcaggtagctgttttagcctttgagcctctgtgtgtgttctgaagcctaatgagagccatttcaggtggtttttgtcacttgccacccccaactgcagacttgttctagcttcttccaccttgtaagtataactcttttctgaaaaagtacctcctacatggctgccttactgatgcccaggttccttctttaatctgttttgctctttgcctacctttgctggttgttgttgttcttcatctttctcttttttttaaattttattttaaatcataccctcctatttgttccaccaaactcatatactactttgcttttgcagctgctgctttgaatctttactcttgcttttttcacgtgttcccttgccttgcctttggtatgttttttgttttgaggtgacatccagtcatgtaatattctggaagtccaagagatccagaaagtcaaacactagacaacttaaggtttattactcacaagtcctttctgtgtagatatttacgttttggggtcacaggcttcgttagtaacctgttatcatatgaatcatacattgaagtgtttgatgaactataacacttttccttgttaatcactactagcatcattactatatttcattatcatcatctgactttcttacttcatctccatgaccagcattttcacctgttttggcatgtgctcgtcccccttttttgtactccttttccttccattctttgcctaattgctacttgtccttcatttctctgtctgggcctcactcagccttgattcacccatgttacagagacctgtgaatactccagttctagctcttagtacactgttctcttatctcctactgtattcgttctcagtcctcagacatgctgctctagcaacacattattcctagaaaactccaggtactttcccactctcagcatacccacatggcagcttctgctcttctttgatctctgctcacatatcactgagtctgtgaggcctgtcctgacaacctcactttagattgctccctcacctacccttccccatgtgttctttcctcttgttgctttatttttgtctggagcacttgccactatctgacatactgtgtacttattgattaaaatggattatatcatggcggggcacggtggctcacacctgtaatcccagcactttgggaggctgaagcgggccgatcacctgaggtcaggagttcaagaccagcctgaccaatatggtgaaacctcatatctactaaaaatacaaaaacttgccggacatagtggtgtgcacctgcagtgccagctactcaggaggctgggacaggagaatcgcttgaacctgggaggtggaagttgcagtgagccgagatcgcaccactgtacgctagcctggatgacagaatgagactctgtctcaaacagacaaacaaacaaacaaacaaaataaataataggattatatcagtctccttactacaatgtaaatcttatgaaggcagagattttgttctctgacatatccataggtgccttgaagaaggcttgatatgtaatggggttgtatataagtattgaatgaataaatcatcacttacttctctctctctctctctggtatacagtaacctccttgagagcaggaaacatgttttcgttctttttaaattaaattaaatttaatttaattaatttatttttttaattttactttacgttccaggatgcatgtgcagaatgtgtaggcttgttacataggaatacatgtgccatggtggtttgctgcccctatcaacccgttatctgggttttaaaccctgtatgcattaggttcttatatttatataagtgtaaacactcagcaagtgattggtaaattgtcacttcagtgtgtgtcttcagatgcgatttaatagtaaacctttctatgttgactgctgggttgtgttcaggaggttagtgtgttatggcgaaattgtagtgaaacaaaagcagtaaatacgtttgggaactttattcttttttttctttttttgagatggagttttgctctgttgctcaggctgcagtgcagtggcgcgatctcggctcgctgcaagctctgcctcccgggttcatgccattctccttcctcagcctcctgagtagctgggattacaggcgcctgccaccatgcccacgtggatcacgaggtcaagagcttgagaccatcctggccaacatggtgaaaccccgtctctactaaaaatacaaaaattaactgggcgtggtggcacgtgcctgtagtcccagctgctcgggaggctgaggcaggagaatcacttgatccccagaggtgaggttgcagtgatctgagatcgcgccactgcagcctggtgacaaaggaagactccgtctcaaaaaaaaaaaagacttggaggatttatttgtttggggttgatttagttttaggtctaatctttatgattcttatcttatgtattaataaaagaaaaatctctttacatttaattctggcctgtatcctcaaagggcatgatttgcttcttgcttttctagcatggtatgttaaattataagactctttgcctctttaactgtgcgcttccttccttaggaatcagagaagatcattgctgagttgaatgaaacttgggaagagaagcttcgtaaaacagaggccatcagaatggagaggtcaggaggttaaaatctggaaatgtttctaagttttctaggggatgtggattactttatcgtaagaaaagataaaatataaattaaaatcaaagagtctgcccttctaaaacacaaaacgaaaccaaaaaaatggacagggatttatggccagttgaatttatgctttgaaatgacatctacatatttaaatattatctagggagtcacaggtttattagttaccatattacatgttgctagggattcataaaaatggaacatattggccaggcgcggtggctcacgcctgtaatgccagcactttgggaggctgaggtgggcagatcacgaggtcgggagatcgagaccatcctggctagcatggtgaaaccccatctctactaaaaatacaaaacaaattagccgggcatggtggtgggcacctgtagtcccagctactcgggaggctgaggcaggagaatggcgtgaacctgggaggcagagtttgcagtgagccgagatggtgccactgcactgcagcctgggtgacagcaagactctgtctcaaaaaaaaaaaaaaggaatagcctcttcttttcttttttatattaatatgcatatcatttatgaattattgactatcccaaagtcagttgagacaaagttcttatctcagtgaatataactttaacaaagcaagatttcattgattttgaatgtgatgttgcttttagaaataacttctcattaatgatgagataagcacattattttatgtttgcattattggctataaacatggccagttgtttttgctttgcaggctttattttccaattcatattagactgatttaattgacattttggtattagtgttctgatatacctgtttttttcctagagaggctttgttggctgagatgggagttgccattcgggaagatggaggaaccctaggggttttctcacctaaaaaggtaggaaacaatgctgtgaaacctaatcagacagagacactttttgtttgtctttgttactggggcacttcatgtctttcaggacctactctcccccttattatcttgatacttgccttaatttcagatatttctgatttcatcttagagcatggtcttatagtacaaaggcagcctatttctaaaatgcctatcttgtttactgtttacaaaagaaaaaacctaaggcaatatgtaacctttggccatgattcagtttgtttagtcatctttatttgttgctttctcttaaattcccagcctaacctagcgtactttcagttttggctactctttcatgtagattttcccacagaagtcgtctaccctgctttataactttttggaaccaatttcagctgtacaggtttgtggagaataatactgcttccatttgcttctgcaatttgtattatagacagccattgtactaagtaaagcaattcctgtccctatccttctagactcctctgcttccttcttcattttttaaaaagtgtctccaatagttaccttcctttttacataatcatagttatgaagtagttacgtagcttttagctaattagagtagtaagggtttttttgtttttttcttaaactaagttgcaacgtcttgttggatactagaaaatgactatcaaatggttattttgtgtgcttatgtatcagaaaataggagaacatatatcgatgtacaaagcatgtattttatgccactagtaaattgtcctttatttcaagtgacctcacattggctattggagacttaaacatctttattcataggttctgttgatgatctctctaagttaggatacaaggggtggtgagttttgaattggtacttttatgtgatatgaaatattcctgtggttttcgctacaattcttctggtcaggtttttctatcctggccacataactttttttttttttttcttcccaaattccaatgtgttattttcaacagaaaagactgatgtaaagacattttagatgcatattgtagaatagaacagttaagtattttatatgtttatattatgaaaggttagtggttttcacagttttaatagtttttccttcagtaagacatgtattcattcagatatgttacttaggattatatagattttagcagttacagttttggtggaatttaattgtgcctatgcatatgtctaataaaggtattttataacatcttacagtattaaagactgtgaggaaatttttttttttttttttttttgagacagagtctcactctgtcgccaggctggactgcagtggtgtgatcttggctcactgcaacctccgcctcccgggttcaagtgattctcctgcctcagcctcccaagtagctggactgcaggcacatgccaccacgcccagctaagttttgtatttttagtagagacggtttcaccatgttggccaagggtggtcttgatctcttgactttgtgatccacccacttcagcctctcgaagtgctgggattacaggcatgagccactgtgcctggctggaaaatttttattataacaactagtgaaaatattatgcatttaacataaatcataaataacttgaacaaatgttgagatgtacactgcatggaattccaaagtgagatctctgcttccaaagctttttcttactttaattttacccatcttgctttagctttctagacttcttcatgaaaggaagggatataccagtgaccacatccaaactcagtcttaggacctgtttctgagattccatttttcaaattatgatgtgctttaaagaatgctactcacaaagggctttgactttctcaaaccagtcaagttcttcaactacaaagggggatgctagttgagaagatgtggaggtttttcagatttctctttaaccatcttttatagttccttttcctaccccctcatctgactcttctttcattcttccacatttgctggcactctcttgagtagattttggcctcaagaccatgtgacttatttttggattccagtgggttattttcactaaagaaggttggttttttaaaaagattttagaaatattagagttagatgaagaggattgttagaagatgtttatcttatcgaatatcagtaattttacttttttctttaaggtaaagactaataaattaaaatcttttaaggtaaagacaaattaataactgggatcagaagaactgataaaaattatagtgggaagtggtgggggggtatggggacattttaataaaagtaaatatttcttgagatttttacccaggcatttacaaaaattataattattccgttcagagaattggcctgtcattttttccttgtgctttgaccttatcaaaaattaggtcttgtttttttatcccagaactcatgttttaaaatggaatgccaggcacagtggctcactcctatagtcccaacactttgggaggccaaggagggtgggtcagttgaggtcagtagttcgagaccagcctggccaacatggtgaaaccctgcctccactaaaaatagaaaaattagccaggcgtggtggcgaacacctgtaatcccagctacttgagaggctgaggcaggagaatcacttgaacctggaaggcagaggttgcagtgagtcaaaatcatgccgctgtactctagacagagcgagactctgtctcaaattaattaattaattaaaataaaatagaatgcacttggttccgtttggtgaggcctgaagagagtgttttctctttattatggaaccgcaactagggataaaaagaaatccctctctaggctctgtggagagttggagaagcctggcctcttgtaggcccctgttgttaccacagctctctcatggtgccctgctccaaattgatcatctgtaatctttttcagaccccacatcttgttaacctcaatgaagacccactaatgtctgagtgcctactttattacatcaaagatggaattacaaggtatatttatttcctgttttggtcacttcgtgtgttttccccctcttagataattgaataactaaagggaaggggttgaaaaaattaacgtaatgatttgctgtattttttgtctgaaatagttacaaactatgctctctttccaaataatgtgtttttgccactggagccagttactatgtagtttttctctgaagaccctaaataatttttttttcctttaacaaatatacattccttagggattttatttgactcatgtctttataatactgtatgagttacattggtatatcagtgctccttgtttcttattctgatgtagagaggttgatcatatgtgaggatagaattcatagttgaaagcttctgatgcaacaaggcaataccttttttgtacgtaccaaaggatattctttggaataaagaggttcattgtttgtagtgctttctgtgtctgaatttccctgggaaacactttctcttgtgttcagggttggccaagcagatgctgagcggcgccaggacatagtgctgagcggggctcacattaaagaagagcattgtatcttccggagtgagagaagcaacagcggggaaggtgagcattcctggctggagcttcagcaacaacattttcattttatattatgagaaatccttaagactttgtattctctgtctatcagtagtactttcttatacaatctaattctgaaaaatggagagacctgggctgcttatgaatgcagagatggacaaggctgctttacatgaaaatagcttggacaaaagaagcccttttttactgccaagaactgagaaggacataggcaattaggcttggtctggaatgttaattatttaatagaaaagtaagaaaatagcagatatcctgggtaataggagatttgaaggacattaagtcaacccagcagaatttatttttatctaaaagggaagaaaaagtcagtcttgatttttgcctgggttattaacaaaacaacaatttaatggtttttttctgttatataagtcactcattcccttatcaaaatattagcttctcagtctttagtttctggttattacctatatctcatccttacaatttctgatggttctgagttttattgactgaaccgtcagagatccctgaaactaatatttcctatcatcttcttaggtttatcaaatagagttaaatgttcttgtgttagccatggccacagatagcctcttctattggggctagttctggtaccccaaaatgaactactgtatagacaacttcagccacttgattgattgcagggatttattctacttactgcaaatcctgataagcaactgctttccattatttgattccaatagtttgtaatgataacattagtttgtgtttgttcctcttagttatcgtgaccttagagccctgtgagcgctcagaaacctacgtaaatggcaagagggtgtcccagcctgttcagctgcgctcaggtgagactgggagaggtttgccatcttcagcaatgtgcacatggcttctgtgacaactctaatttttggctgtttaaaggctgaagtaatagtcagcattaggatttttgttcttgtaaaaacaacagctctgaaagctgtcttttcacattagggaggggtgaggttgttaaatagatactatatattaaaaaaattatttcttaaccctatttttctgttttgtgctaggaaaccgtatcatcatgggtaaaaaccatgttttccgctttaaccacccggaacaagcacgagctgagcgagagaagactccttctgctgagaccccctctgagcctgtggactggacatttgcccagagggagcttctggaaaaacaaggaattgatatgaaacaagagatggagaaaaggtaatgcacagttacgcagcccatatgactgtttcttcttttaaacatgtaatactaatagcattcttgaatttttttttttttttttacttctaggctacaggaaatggagatcttatacaaaaaggagaaggaagaagcagatcttcttttggagcagcagagactggtaggagtcctgaatctgctaaactgttgggaaaagggcagcttgttcccatactttccctgttccacagagcagtactcacccaaattgcttctgtctcaatgataccaagcactattctttaatttccttaatggagaatgaacttaaatctcccggtagccttagcctgaaaaaatagtccacagaggtactcttttgggctttttatgtcttaaagccaaatcttaacttctgttacaaccaaatactttttaaggaaatagagcttttctggtagcctttgcctcttgatagtggttttggaatttgcttcagtggtggttctttaaatgataattactctgaatattgaatttggtgagagtttgccttggttttgtttctgatcacttgatagtactaattctctgctcttgggctgactttgggattgttcttacgctgggcagactttttttttttaagttaaactgtgtctaaaagtgttgctgcacagttgcatgtgttactcctttccttatcccctgcatggagtctgaattctcaatcaggttctcagtggcatgtgtggtagcggtgggagcaaaggctgcatacccagcccggacaggacagaaggcttgcttcctttgagggaaggaggatttgagtgagcagctggaaagtctgtttaaggtcccagctattgatacaatactaatggcttcagcgttttataatggtaattgatttcccagatttgatagaaactgaatctcatgaataaataagttgatccattagttagattttcatttttaaagccaaccaaacaaccaattttggttaacaaagctgtggttataagaaccttctcagcattcatttgatatgtaagaataaagtataactaacctttggatactgtggatgcagtttaggaagttctcattttttaagattcagttgtatctttcttttaaggtaagggggcattagggagaaagttcaagcactggcttctttccttagtataaaatacagcatgtaaactacagccttctagtcatgctctgtgctttggagaagaaggggcttagtgctaagtgggccagaaacgtgaaggacttgagcacaagcaaccttttccagaatacctcagttctcaggcatgggcatggattaaaccagttagtttgttatcttgtaaattatagtaaagccctaaaaagaatggattgtaagaataaatcaagggtttggggcaagataatagcagtgttaccaacagaggctctttaggaggcctttttagcattaagtttttaatgaaaacggaaagaactagctacaatgtgattagtggcttgaaaggtttgtgacacaagaagatgtcttttatcttaataatgtagtacattctaataacatgcctctgatggtctgtgagagatcaaatgaggacaggtgtaattaagctctattattaacaataatgccttgtatttgtatagtgctttataatttacagagagcgttaacatccatcaatttatttgaccctcaaaacaaccctctttgtttacttatgcatatgtataagtaaaatatgtaatattacctccagttgaggaaaccaaaacttggctgggcgcggtgggtcacgcctgtaatcccagcactttgggaagcctaggcaggtggatcctgggacctcacttagaataactaagcacggtgctcgcttcggcagcacatatactaaaattggaacgatacagagaagattagcatggcccctgcgcaaggatgacacgcaaattcgtgaagcgttccatatttaaaaaaaaaaaaaaagaaacaaaaaccacaaaaacaaaacaaaacaagacaaacaaaaaaaaagaataactaagcacggcagaataaggatgcctggtgctatccataaccaagagttggtgatcattctgtgccctaaaataaagatggccactaaataaagagaaagtgaatgtctaagacgtatttagtttctagggaatgtacataccctgcagataatcagattctggttgttgtttgctctgtgtatctgaaagcaagccaggatttcaagagcagcttcttaaagcaaggaagttgctttcctctcaaaggtctgtctgttccactttcatttcttgacttaagggaggaactgatttctaacacttcagcctgaagaatatctaccagtagtaatactgaatggaaaatgtctttatatattaccctgtattggtcaattaacagatgtatttctaatgcaccctgtgaataaacattgagagaatacaaaggaattattaatcagtaaatatttatttaatatttaccatatgtaatcactttttgcataatgtcagcattaaacaatggaattcaggctcatgagttttctattctgatagttcccaaatgcatcacattgttagggtgctgagtattttcttcagttagtgctctaggataccctggtcctttctgtgcttgctttttacacacagttttgggatcttctctcttcttatttgcataagttccttgcagagtctctttaggaggcctactttgcatttggcatttaatgaaagccgaaggatcattttgtgacatgtgaattgaccagacctcagtagcttttccaactccttaataaatgaatctaaatattttaaaaatctggccaggcgcggtggctcacgcctgtaatcccagcactttgggaggccagggctggcagatcacttgaggtcaggagttcgagaccagcctggccaacatagtgaaaccccatctctactgaaaatacaaaaattagcaggacgtcttggtgggcacctgtaatcccagctgcttgggaggctgaggcaggagaattgcttaaacctagcaggcggaggttgcagtgagccaagatcgcgcaactgcactcaagcctgggtgataaagctagactcagtgtcaaataataataataataataataataataatatagataaatataaaaaattctttttttgacatggagataggatttatatcacataaactttgcatacagtttttagtatcaccatcaatatgtgacagggtgatacatttgaactttaaagaggacatactctacagagtcaaaatggcagtattttaaaaagaaagaaaatgacagctgctagattttacttgagttgagttcttttggatttatatagacttatttatattttattttagagtttaaagataacttttgtctcttaagcatgatattaaaacaattcttagaatacttgtcatttcctgaattaggtaatattcatttcatccttaagcaatttgaagaggaaaagaaaaacagccagaaaaaaagtgatagttgttggttatgtgggaaagaatcaaagataatttgtttatgttctgtaaaattcagtttatacatatttgcaaaaaatcctcttcaggagtcagacatagttttttctctaatatttatgaatgtcatatttatcacttaaaattagccattatgattttaaaaactaaaaatgaaaagaaaaattaatgtagagtctgtgtaaatttagcaaacttttgttggtaagttatcaaataggtgggagttataaatgggcttagtactcatttgtaggtcaatagaaataatacaaatcagtggcaagatttttaaattcagaggccaaattattattattattgtggaaagttacttttttgttccttagaaagtgactatacaggcaaatctttggttttgtcaggtgtgatgatgtgtgcctgtagtcccggctaaggcaggaagatcacttgagcgcaagtgtttgagaccagtttgggtccctgtctcaaaaaacaaagcaaacaaagaaacaaacaaaaacaacaaactttggtctaggaggcaaggtactatttatcagtttcaagcaaacaaactcttctagagatatttttggtaaccacagtgaataaaagattgactgttagtaactattttcatttactagactgccctgaactactcatctgtgagttgagtattttttttttaagtgaaagcatgtttattaagaaaataaaggaataggctgggtgcggtggctcacccctgtaatcccagcactttgggaggccaaggtgggtggatcacctgaagtcaggagttcaagaccagccgggccaacatggtgaaaccccatctctaccaaaaatgcaaaaattaggtaggcgtggtggcaggtgcctgtagtcccagctactcgggaggctgaggcaggagaattacttgaacccaagaggtggaggttgcagtgagccgagatcgggcactccagcctgggcgacagagcaagattctgtctcaaaaaaaaaagaaacaaagaaagaaagtaaagcaataaagaatggctacttcataggcagagcagctgagtattttcttttcccagcaacttttatctcccgaatagaaattctttctaatcccacttactatttggaattctaaatccaacattgctttcccagagatccatgttatcaagatttgcttgtattagttaagagcgattgcttattatctatacagcccttgaaattacattgttgtgaagtcaggctgctgttttagggctaagtaaggttttctgaaaaagaggcaatggtgcaaagacagctggaaagacagagttaaacataccttttaaagtggatcaattttatgtaaccagagtatgatctttctgttttatgtgtttattggaagagttgtcacttaaagtgatattcctcaaatagctaaaaatgtcctgggttttctagatagaaaatatctctaagttgtacttattaaaatgtgacttggggaattttaaattatattcagtggaagtatatttgcccagctttatttttgttcgggtaatttatttctcaaaattttggaggtgaggtctttattgatttgtgtgtgtgaaaaacaagacaaaacacacccactatgaggatcctttaaaaaaaaagctttcttgttatccagataacacactttaatcgtacgacggaaatggatacatttaacatgacaaaaaatagcaaatcctctgctcatggaaagatgatttccaaaccctcttgtcttacagaagaaaacatttggttgactaagaactgacatggtctgctcatagggattcttagcatttttaacatcatccctgtttgactgcttctttttctacattctcatcttctaacttttttctagggctgctctttttagtaaagctaaacaaaacctggcgtcctacagccttactaacctttgttaatccgcctgctcgtcacatctttgtatggcatctgtgctcactcatgggggaaagagattctggaagaagcaacagcaataaccaaggcaaatgtggggaagtgtctgcatgggttgttagcatgatgtgtggggcctaggttttacttcattttcttcgaatagtgaggtcgttaagtcacgccatttgaataattttgtatgaccatagggtgacatactcatccctgttgtcaattctcctaagaaatttggtggcaaatttcatcacttaagccagaaagtggaaatttggattagggatgccaaataagcaaatctttatattgatagaaatgtacataggcgtatgtcttaatagacttccacattattgaggggttttttttggttttgttttgttttttagtttttttggtcttatttttaaatttggttaaggcttttttgcttgctttttcttcgatttaattttccttttttacattttaattttggttattttggggccattttttgattttgtttttccaaaggacgcggattctgatagcggggacgattctgacaagaggtcgtgtgaagagagctggaaactgattacttctctgagagaaaagctacctcccagcaagttgcaaaccattgttaaaaaatgtggcctcccaagcagtgggaagaaacgtgaaccaattaaaatgtatcagataccccaaagaaggcgcttgagtaaagattccaagtgggtcacaatctcagatcttaaaattcaggctgtcaaagagatttgctatgaggttgctctcaatgacttcaggcacagtcggcaggagattgaagccctggccattgtcaagatgaaggagctttgtgccatgtatggcaagaaagaccccaatgagcgggactcctggagggcagtggccagggacgtctgggataccgtcggtgttggggatgagaagatcgaagacgtcatggccactgggaaaggcagcactgatgtagatgacctcaaggttcatatagacaagctggaagatattttgcaagaagtcaaaaagcaaaataacatgaaagacgaggagataaaagtcttaagaaataaaatgctcaaaatggaaaaagtcttgccactgatcggatctcaggaacagaaaagcccaggaagccacaaagcaaaggagcctgttggtgctggtgttagtagcacctctgagaataatgtaagtaaaggagacaatggagaacttgcaaaagaagaacgtgtttcccagctgatgaatggggatccagcttttagacgtggacgtctgcgctggatgaggcaagagcaaattcggtttaagaacttgcaacagcaggagataacaaagcagcttcgtcggcagaatgtacctcataggttcatccctcctgagaaccggaagccccgcttcccctttaagagcaaccctaaacacagaaactcttggagtcctgggacacatatcatcataacagaagatgaggttatagagcttaggattccaaaagacgatgaagcaaggaaagggaataaagaagagagccaagaaaaagggggtaaaggagcttttaaggatccccagtttccatggggctctcaaggaatgagaagtcaagatcacatccaagttagcaagcagcacattaataatcagcaacagccacctcaactacgttggagaagcaattctctcaataatggccagccgaaaagtacgcgctgccaggcatctgcctccgcggagtcattaaactcccacagtggtcaccccactgctgatgtacagactttccaggcaaagcgccatattcatcaacaccgtcagtcttactgtaattataacactggaggtcagttagagggcaatgcagccacttcctatcagaagcagactgacaaacccagccactgtagccagtttgtgacacctccgcggatgaggagacagttctcagcacccaatctcaaagctggtcgagaaaccacagtataaatcagttactggacaaacttgaaatcatggtggaagaaacagacagtgttagctcatgatttgatttggttctacctttggccttgagttcttattatttacattataaatattaactggttttatattgttaagacaaaacactggtaaaagtttcaacacctcccttttgcttgtataccataaatgggcagtttctgaaattttggataaagcatcaagaactcctttttctgaaacgttcctccttttttagtgcctaattaatatacttacttacacagacttgtcccatcttgatgtaagtttgttatgtttttataatgcctataaattaatctgacatccagaaagacctgcctcttagtttatgcagacattcaaaaggagaatttgataagcagaattaaatgtctgttattcataaatgttagaaattggtttaaaaataataacatgcaactgggtgggcacagctttggatttctcatccacgtctgttcccttctttaaatatgattagaattttcgtaagccaaaactaaaggtcttcaaacatatcttgcaatacatagctttgcatcttccacacaacttccacgtcttcttttattctgtattttacaaaaaactcatataatggttttttcttttgaatgtatcagaatatgtatgaaatttgtcatatcagaatctataaattggcactgtgtctgggattctgtttgtggtttgcattttgaagttcaatgtatcatttgacacacatgcacacaaagtgaactattcaccaaaatcatgccaacagaaataccaacaaaaaacttgtgtagcttgtaaggaggttatttggcttgagagggaagaggtgggacagacatgggggacaaagctacagcatatggctctgtggtgctgcttttttccaatagttgatgaaatagtgaaataaaagttaactttggttgggcttggaataaaggagatgatacataataaactattctttggttagcattagtaatgcttgtagacactcaaacaaggaaggcgaagtcctgatgatgatttattgtatcaatacctcattttatttggttgtggtctcagtttgcctcactggagaatccactaagaaagatggattttaatgggaagaaaagaattattttctacatcgttcctcatctcttgagtttgtcaaaaagttttctaagaggcagtgtgaagagccagagatgtccgaaattgcctgacttcatgttttggaagattcctaagtcacatgaaatcatctatcaaacacttgtcttccaaacggtgtgaaaaactacagccaagatagcagttagcattcaaggaagccttaaagattgtgattatgtttttttttcctttgcgtgtgggcactatgctttattagaacacattatttttaatcatagtattttttctttgcctctaagaaaatactttcttaatgctcagaaagttgcttccaattaatgtttttttccccttaaaaagagaagctttgagagatatttttgctttcatagctagaacagttgaagtcttcaactgaggttttatagcagattagacatgggtaaatgatgtctgtaatgggttgagttactgagatgacaatctcctgtgccatttggtttgaatgtacttgataggctgcttcaaatcagtcacttcaatgcattttgtgtaaacccagttgtccttttttattcctctttagacataaatgtgctaactattcctttctatacacaatttattttctaagattaaaaataataattgctaggtttggtggcacatgcgtacagccccagctacttaggaggctgaagcaggaggatccctagagcccaggagttctgggctgtggtacactatgccagttgggtgtaagtttggcatcaatatggtgatgtccctgaagcaggaaaccacaaacttgcatcaggacgggtgaacccagcccaggttggaaatggagcaggccaaaactcccaggctgatcagtaatgggatcttgcctatgaatagccagtgcactgcagccaggacaacagagtgagaacctgtctttaaaaaaaaaaaaaaaaaaaaaaaaaaaggtaatatttattatattattcaggtttcaactctgtagcaaaaatgggctctcatttccctaacttgagataacatagggtaggtccatatattttcattcttacagtggtcttttcatgggagtgaatgagttactctccactggtgattaggtaatactgtagaatgaagagttgtataatatattcatttacagctgtggattgtggtaaggactatgtccacagtgatattccaaagaattgggtttatatttgtgcttcatctgttaatcccaggtgtcctcatgttgctgaaatatttagatagctaaaatatcccttaatttcacagatgaccaggaagaaattaaccaaggttttattgactgccatgtatgtcccatgatgcatttctgagcaaatgcttatcctagagaataactctgtatgaataaaattgcttaattgagtctcttactaaataagtaactagtgccatgcttttgtgagctcttggtatggcccatattactttgttttttgtttttgttattgttgttttgtgatagtcttgctctgtcgcccaggctgcagtgcagtggcacaatctcagctcactgcaacctctgcctcctgggttcaagcaattctcctgtctcagcctcctgggtagctgggactacaggtgcatgccaccatgcctggctaacttttgtatttttagtagagacagggtttcaccacgttggtcaggctggtctcgaattcctaacctcaggtgatccacctgccttggcctcccaaagtgctgagattacaggcgtgagccaccgcgcctggcctgtttgtttttttaacatgatttttctctaagcttaaataccacaaggccaaagagaaatggtcataatttaaaccattattatattgttgaggtatccctagctattattatagcaaagtgggaaaaaagtgtttattctattgaagttatgtaatgatccgacattaatgggaatatagaggagtcctaattaattggtataatttcacaaagcggaatggtattccttggagagttaaagacattctctttagtaagtgtaaaccaaagggcattttctttattcctgcttctaattccttctagcccagtgaattatttctcttttcactggtaatgtgatgaatgggaattgtttattacattgaagtgacttgaagtgaccttttgtgctttaggtgcaggttgacactgaaaaaaaaacaaaacactgaatttttcacacctatgtctgcattaaaggctgttttactaccggaagttacatagacttcctgcagtcagctgctgtgccccagtgccttactggtcctttgtagatttgccttaatgatttgtacaaatgactgggaggcggggatgctgcctgtgtcctggtgaaccttaatgaaggggccgtcttaggcacagtgcaaaacaagcatttgtcctgtactgttagagccaaaattgtgatgagcaatactgataattgtccagtttatgtcatctttcccagattttaaaatctgttctagatattcttagcttgaaccacttttgattgtgaaatgtattaggtgttgtcccattattactgtaaaatgaagttttgaatcttcttgttaataaactgtggatttcccctctcaatttcttaaacaacaacaaaaaaatgcttgaagattgtctttgagtgtaagatctgccttttcagaaagggagtgttagtttgtaatgttaaaaaataaagacctcattcaataaaagttgaagtcatcttttaagagtgtgatttctctctatgtgggaagagggaaaaggaaagcaaggtaatgctaactaaacctggttttgacttttatttattgctttttcatctgaagatggttgtaaactaaatcttctttttgatatttctatgtgaacttgattagttttaaagcttttgctttagctacccttttctgtttaacaaaattctatcttaagtgagatctttcagccctattttatgccacatttcacttacataaaatcttttctcacaaaagatgaataaggatattactttctgatttgagtttagtttaaccatgttttcagttttttctctacatactcttggtttgaagttcttttaaatgaaatgatttattttcctttatatgggcagaaactaaatttctaaaaagttttgagtgactctgcaggttttctttctcctttaacctctgcttttcttcacccagagtattgatggtacactagagaggaaacaggacaaagcagaatatttttctggaatggaccactagtctcattgaaaatttggacctgacattattttttaatgtttaaaaacaacataatcacgcatcatgggatagaatacaaaatccacatgagtttttaatatgaaatctgaaactttagagaagtgttatgcctgaatcggtctgcttccagcctcatacccttttccttcaggtactttgtaatcctttgctgtcggagaaactgttggaaaagttgcaatgtccctaccgtttatagggtgacacagaagattacagtgtgatatgtgtagtgacactgtgctgatgagactgtggccacacagtgctgctggtggtgagaagcgaagttaagtgttgtcaacaactggggtgtcatcttgggtgtggatattttccttccagctattgcttgctaattataatctgccattaggagccaagcctttaatgtctaaaacagcctaaccggaaaactcagaatggtgatattgattttactgtgaatatcaccttctcagaggtgccttaattgtaccaccatcatctctcatcgagagtaccctagcttgtctctttgcttctattcttgacccctataatccaatgtccacatagcaaccaagatcatcttttaaaaacataaatcatatcttgtcagtgtcctcaggggctttccattgcatgaaagaatcttagtcttactgtagtctccaaggctttacatgttttggctgcttacctaccactcttaacactgtcactctcacaccacagacactctgcccttttttttgttccttgtatatgccaagtttcttcccacctctgggctcttgcacttctcaagcctggagcccatttccatcatgcttacctccccttccagacttgagctcctcagctctttctgcccagcccaccacaagttgactcactgttttaataatgatggcctgtaattatcttttctttgtatttgtttggttcttccacgagaatgtaaactcacctagaataaatgccgtatctgtcttattcacttcgccagtcatataaatccataacctggaagagtggttctcaaactttaatgtcagttagaattttggggtcttatgagaacacagactattgggcccaccttcagagtttctgattcactaggtctggggcgagacctgataaatttgcatacctcataaattcccaggtgattctgatgctgctggtccagtaaacacctttgataaccagtgatctggaatgggggcttggtaagcattttctgtaaaacactagatagtaaatattttagacttagtggaccatgtggtcttttttgtgaaactgttcaactctattgttgtagtacgaaagcagccatagacaatatggaaatgaacaagggtggccgtgttccagtcaaactgtgtttacagaaacaggcagtgggctggatctagcccgaaggccatagtttgccgaccccgatctagaagatagctacttctgataaatatttatctaaaagatcagtatgtgactgtgtatgtaatctagaagacagatacatgccagttgctgggatgagtggtaagtgacaaatgtgtggtccctggcctcataaagttctcagagttatggagggagacagctgtaataaccacaccagtagtgagtcagtacatttgtgacaagtgccatgatggaaaaacacaaggtgctctgaaagggtttaacgggtgcctttgggaatgaaaagtggcctctcattgctcttagctgacaatgtttttgtttcactgaggaaaaaaagcaatcagaagaaactttgttttcttcctttgtctagttttgcctgcatcatccatccatacctgtactgggctttccctcctgttagtggataaactgtccttgatcctctcctagcccagcccttgctccctgcattccatgccctctcaagaacttgttgaacatttacccccttctcttttacatcatcagtttctctcctggattattcctgccagcatgcaaacatgtcaccagttgcaaaagttttctgtacttattacgtcctacttgcctacctcccattctttttttttttttttttgagatagagtctcactctgtcacccaggctggagtgcagtggcacgatctgagcttactgcaacctctaccttccgggttcaagtaattctcctgcctcctgagtagctgggactacaggtgaacgccaccacaccgagctaatttttgtatttttagtagagacggacggggtctcaccatgttggctaggctggtcttgaactcctgacctcaggtgatccacctgtctcagcctcccaaagtgctgggattacgggtgtgagccaccgctccaggccccattttttcttttcattatttcctatcctcattcttgctggaactcatctagtcagactcttgttctcccctcaccaccaaagctgctcttatcagagtcacaaaagctcttcttgatgatagattcagtgcattttctcagtcctcatcttactgaatgtctctggcatttgacacagttgtctgctcttcatgggacactttcttctcttggcttcttttccttgaacctttccagctgctccatcatggtctgtggacacagaccttggctatttctatatgtttctctgttcccccttccatttttgtactgatgatgaagataatgataactcatatattgagcatgtattacatgtattaatacacataaaccttttacatgttttgactcattgagtcctcacaacacccctcttctgtgaggtaggtattgcttattcccttttcacatactttcccagtgtaacacggctactcagcgggagagccagagccagtcccagggagtcattctgtctgcaaacctctgccctgcctcgccttctgctgactctcaggtgtcctctctctccagcctgggcccctaccctgagctctagatgctgatgatacacaactactgcctgacatccaaatcactggcaggcaccttacatttaaatcatttgaactggagcagctagctcaggccacaaatccaagtcacctttagtttctctttttcttcacatcccatgatcagatcatcagtagatcctgtttgctctccctgtaaaacatatcctgactccatctcttttcaccacctttgctgctaataacctggtccaagccaccacagtgctggacagtgctgtgacagcctcatgaccattcttcttatttccatagttcctcctgagtcccacagagaataatgtttttaaaacatatcccagctctaaaccatccagcagtttccattagaataatatccccagaccttaccatggtctataaggccatctgtactccatttgctacctgattacatctgatgcatctcctacccgtctccctactctgccattccatccacacaagttttcttgcttttcctgaaatatgtggtgcccctttccatttcaggaccttggcacttgctgttactatgaatttgagtagaataacccctgccaaagacctctgcctgcttaacctactcagtctagaagtctgtctcccattcttctccctggtagtctctaaccctatctttatctttcttcatactagtactcgccactaaaatccatctatattttgtttactctttatcatctctgtctcctttgtcaatggaacccttgtcttattgaccactagcatttggcacatagtaggagcacaaaaggtatttgctgagtggatggatggataatggtttaaaaatcatgctctggattgcctgggctcaagtctcatttttagcatttgcttaacctctttctttctctttaacatgaggctaactatatagtaccatctttatttttttgttttgttttgttttttgtttttttattgagacagagtcttgctctgtcacctaggctggagtgtgtgacacgatcttggctcactgcaacctctgctgccctggttcaagcgattcttgtggctcagcctcccaagtagctgagactacaggcacacgccaccacgccctacttatttttttgtatttttagtagagatgagttttgccatggtgaccagactggtttcaaactcccgacctcaggtgatccgtccaccttggcctcccaaagttctgggattacaggcatgagccaccacgcctagcctagtaccatctttataaggttattgagaagattgtaataattcatgtttaacattaagaacacttcctgatacaaaataagcttaaaaaccggggtagataggtaggagagaacattctagtagagagaacagccagtgctgtgcctttataaatatggggcatattttgaactagttaggatttttttttttttttttttttgagatggagtctcgctctgtcgcccaggctggagtgcagtggcgcaatctcggctcactgcaagctccgcctcctgggttcacaccattctcctgcctcaggctcccgagtagctgggactacaggtgcccaccaccacacccggctaattttttgtagttttagtagagacggggtttcaccgtgttagccaggatggtcttgatctcctgacctcgtgatctgcccaccttggcctcccaaagtgttgagattacaggcgtgagccaccgtgcttggccattaggatttcttataaacataaatgtctactgaaaaaattattattattattattattactgagacagagtttcactcttgttgcccaggccggagtgcagtggcgagatcttggctcactgcaacctctgcctcctgggttcaagcagttctcctgctcagccttccgagtagctgggattacggcatgtgccaccatgcctagctaatttttgtatcattagtagagatggggtttcaccagtcagccaggctggtctcgaactcctaactcacccgcctcggcctcccaaagtgctgggattgcaggcatgagccaccgcgtccagccaaaatatattattttttaatgtgccttccgtaattagtttttgtcacaaaatgaacagaacgatagtatgtgaatctcattaattagccatttgttgtgggaaatggtgatgatatacagtgtcctttttaaaagctcgtaagtagcctggtttggggagggggccaattcaatagatgatgttgatattttgactatcaattgtggtcaaaatgcagttaaagttttttgtttgtttgtttttgttgttgtttttgagatggggtctcgctgtgtcctccaggctggagtggagtggcacagtcttggctcactgcaacctccacttcctgggctcaagtgatcctcccaccttagcgtcccgagtaactgggactacatatgccctccactaagtccggctaatttttgtgtttttagcagaaacagggtctcactatgttgcccggactggtctcaaactcctgagctcaagtgatccacccgcctctgcctcccagagtgctgggattacaggcatgtgccaccacacctggcccagttaaactttttagattcatagggctatgggaaatcttttcatgttagttttggttactaaagcacagccacagctgttagggaaggtcatcctcataccttaactgtcagagtctgagaattttgtattcattggtagtttgaccagcctgtcaacttattcttgaagaaatcctcaagataaagtattaacattttttttctacctgatgatttttaggtaaagcagcagctttctctttttgctataataattccatgtaatgtatagtttttccccgactccccagctttttgagacatttgaaacagagaagctgaaaaaaaaactataatgaacttttgtatacccatacttatatatttttcctgaattatgtgaaaattatagatatcatggcagtttaccccaaatacttccatgcttatctcttaaaatcaagaatattcttttttttttttttttttttttttttaagacggagtctcactctgttgcccaggctagagcaatggtgcaatctcagctcactgcaaactacacctcccgggttgaagtgattctcccgcctcagcctcccaagtagctgggactacaggcacctgctatcatgcccagctaattttgtgtttttgtagagatggggtttcaccatgttggccaggctggtcttgaactcctgacctcaggtgatctgcctgcctcggcctcccaaagtgctgggattacaggcatgagccactgcatccagccaggaatattctcctaataccactatcccatctaggaaatttaatactgattcaatattgattcaatattatatcatgtacagtccattttcaaatttcgttaattaaatcaaaaattaggaaagagagtgttttaatccaagatccagtcaaggtttatatatttcatttggttatgattttttaaatctttcattatactggtatttttgaattgtctaggccacattctgatttgtctgattatttcctcagtattagattcaagttaaatctttttgttaagaatgctataaaggggccgggtgcagtggctcacgcctctaatcccagcgctttgggaggccgagacgggtggatcacctgaggtcaggagttcaagaccagcctggccaacatggtaaaaccccctctctattaaaaatacaaaatttaactgggcatggtggtacacacctgtagtcccagctacttgggaggctgaggcaggagaattgcttgaacctgggaggcagaggttatagtgagctgagattgtgccactgcactccagcctgggtgacagagcaaaactccatctcaaaaaaaaaaaaaaaaaaaagctatgaaggggccaggcacgttggctcactcttgtagtcccagctacttgggaggctgaggcaggaggatcacttgagcctgagaggtcaaggttatagtgagctatgattgtaccattgcaccccagcctgggtgacagagggagaccctttctccaaaaaaaaggaaaaagattgctataatggtgatgttgtgtacttcctgttgcatcacatcagtagacataaaatgtcagtttgtcctattatcaataatgttaaagtttggtaaatttggttaatgtgatgtttcccagctctctgcattgtaaatatatcatttcccttcttaaatagatatctgggcatggactttggatcgtatgcatatcctgtttcccatgcatcttttactcaattattttagctttttgttgtttgttgctattgttgttgtttttaagatggggtctcttgctctgtagcccaggctggagtacagtggcacgatctcggctcactgcaccctccgcctcccgggctcaagtgatcctcctacctcagcccctctagtagctgggactacaggtgtgtgccatcacacctggataatttttgtattcttttgtagacatggggtttggccatgttgcccaggccagtctggaattcctgggctcaagcagtttgcctgcctcagcctcccaaagtgctgggattataggcattgagtcactgtgcttggcctattttagtatttattatcctttcttgattcagttattacatctggggttgcaatatggtgattttccaattgccatttcttctgcatttattagccaccttttttttgtttttttgtttttcagatgggatcttgctgtgttgcccaggctggagtggctattcacaggcctgatcatagcgcactacagccttcaactcctgggctccagggatcccaggggctgggcatggtggctcacacctgtaatcccagcactttgggagataatttaactttctcagaattagaaggctagtaagaaaaagtgccaggaccccaaacccaagcctctttagcctcgagtagctgaaatgaacaggtgcatgccccatgcctggtaattagctagcttttaaaaaatttttatttaaagaagagtttcccctttttctctccttctttcagtatcaccatggaatcatgaattctttctatattcaatgtactgtgctatttttctgttgatttattggccagtgggatcctgtgtccttttgaaatggccccagtggtgtttgagttcttccatcctttctgacacaaaatatttcagactcaccttgtactttccttgcttcagacctggaagcagctatttttttcaaggaaccctggttcctttcagtggcagtggtacttagaaaccaagatctaggtgctaagtatgcttaaacaataaccttttataaaaaaacattgcctgaggccaggcgcactggctcacatctataatcccagcactttgggaggccgaggtgggcggatcacgaggtaaggagttcgagaccagcctggccaacatagtgaaaccctgtctctactaaaaatacaaaaaattagccaggcacggtggcgtgcacctgtagtcccagctacttgggaggctaaggcaggagaatcgcttgaacctgggaggcagaggttgtggtgagccgagatcgcatcactgcactccaacctgggtgacagagcgagactccacctcaaaaaaaaaaaaaattgcctgacattttgatattgtattaccatgtaagagggctttcacgtgtttttaaaatggttcatctcttggtccttcctctagtactgtgtgggtaggcaggtcaaatgctaaaatctttatttaaagatgaagaaggtgaagtttagagataatttaactttctcagaattagaaggctagtaagaacaagtgccaggaccccaaacccaagcctcttaccagtttaatttttttttcttttttttcataacatgtagtctcctaaaaaagtgtgtttagatatctagtaaagctatgtagttggttcgtggtcttggtcactgcctgcccatctaaagagaacacttcctttgtgagaataactgacaaacgaccagaaccatagaggatatttgcatccttctgagcattgcttgggagctccttttgtaatggagtttgctaaatggctttcagcagtgctttatgatgcatggaatgtttgatgtgggacttggagagctctgtttggaaacagtggatagtcatacttataccctttgtctcatgacagcctgtaattgggtcactgctagggaaccaaaagaagcagggctgggtgcggtggctcacgcctgtaatcccagcactttgggaggccaaggtgggcagatcgtgaggtcaggagttcgagatcagcctggccaacatggtgaaaacccatctctactaaaatataaaaattagtcgggcatggtggcgggcacctgtagtcccagctactgaggaagctgaggcaggagaatcgcttgaacccgggaggtggatgttgcagtgagccaagattgcgccattgcactccagcctggacaataatagagtgagactccatctcaaaaaagaaggaggaaaccctggcagtaaatcttaaaatgctatgcttatgctgtaatttagtattgcgctgtttgaaggtctctttcttaaccctacttattttattttcactaaaattcaagtttttcaaattaacaacctaaggaaactttttagacatttgtcccctattctctgcccaccatgagagtttaatacctcagatatactacatatctgtatactgattatatttgtacttcatatattaaaagactaagatttttttcatcctctgagaaccattttttggcccctttggggtgatattacccttattgaaaaacgcatggagtagatggaaaaatgaaggatacatctgatttgtattacaataatcctttttttttttttttttgagacagagtctcgctctgtctccaggctggagtgcagtggcgcgatctctgttcacttcaacctctgcctcccgggttcaagtgattctcctgcctcatcctcccaagtagctgggattataggcacgtgccaccatggccagctaatttttgtatttttagtagagacagggtttctccatgttggtcaggctggtctcgaactcccgacctcaggtgatcacccacctcggcctcccaaagtgctgggattacaggtgtgagccactgcacccggtcagtaatccatcttatagttgcatattgaaaataaagtgtcttacttgaataactaaatgcagtctataaattatttcagtcctaatagcactatgagcttttggttacctgaaggctaaactcatcctactgatcaaagatagtaatttttcacaaagaggaagcatcaaagtctacaatcttaattttttttccttccaaagagttagataattgagatttttgatgatactggtgaatttaatctttttcaatattgtttttctctggaatttattgatatataagatattacttgaatatattctaacgcttaaggtatacacgtgttatttcacctaaaaattccccctttctcctaccactaccccagatgaagaactcttgagtctttgagggagtagaaacatactgcagtgagttttttctttttaacatttacccattacagaccatcttgtgtgctttgtgggtttttttcctaaacatttccctgtatgtctttttattattgtttcctgcctttgtctcttttccttgtcctttgctttctctacttcccccaatattccttccatttctctttccctgccctcttatttcttccctctcctacatgttatctcctttcttttcattcaggactatgagagtaaattgcaggccttgcagaagcaggttgaaacccgatctctggctgcagaaacaactgaagaggaggaagaagaggaagaaggtgaaatctagagaccgaaagtttcctgtgtatatctttttgaagttatattatcaaattagtcatttatgcataatcaaagctggattcctcttagttggccctatcatttattgacattttactgagccagtttacagatgattgaatagatgtgcagtgttgagaatccaggctgtattttatgaggtggggatgggagtgatggtgttcttagaccttcgcacggtttctgagcacgttcatttaaatcccttaggaagttgacctgcactgtctctcatattgctgtagatgtgacttttagatatccattacaaatatagagctgaatctttgttaagacagtctgttcaatttgaagccatttctggcaaatttctaatcatattgcttagtcatgtttgcctatcttaggttttccagcatttcttagttgagttagggctttcattattacttattgccttataatgcagtatgaacacttaccacaattcgtttttctacccaacctcttggcaatctcaaggcttcaaactaactttgaaggaactcttaatttatgtattacatttcttatttatttatttacttatttatttttgagacagagttttgctcttgtcgcccacgctggagtgcaatggtgcagtcttagctcactgcaacctccgcctcctgcctcctaagtagttgggattacagggatgcgccaccatgcccagctaattttgtgtttttagtggagatggggtttcaccatgttggtcagactggtctcaaactcctgacctcaggtgatctgcctgccatggcctctcaaagtaatgggattacaggcatgagccactgcgcccagccaatttcttatttttaaataagtgagatggtaccttttttctctctgtaacagaaaaaaaaaaagaaatatatgaagtcatacaatgtaacagaggtcaggagtttgtctttttttttttttgagacagagtctcactttgtcacccaggctttagtgcagtggtgcagtcttggctcactgcaacctctgcttcctgggttcaagcaattctcatgcctcagcctcctgagtagctgggactacaggtgtgtgccaccacgcctggctaatttttgtaattttagtagagatgtggtttctccatgttggccaggctggcctcaaacccctgacctcaggtgatccgcctacctctgccttccaaagtgctgggattatagacgtgagccactgtgcctagccaggagtatttttttttattgtggccacatgttatacctttttttaaaaaaaagaaaaatttatttctttgttgtactattttaaataaatacaaaagtaggatttttaaagattttctgaaatgtatatattgctttcataatatcaacagaatttggtaagctttactaaaaagaaacaaaagcagctgaatggagagaaactggaaaacacctcaccttggtaaaagagataagctagaagagaggtgtaatttttatatagttgtaagattgccattaaatatgcatcattcattctttcagttccttggacacagcatgaatttgagttggcccaatgggccttccggaaatggaagtctcatcagtttacttcattacgggacttactctggggcaatgccgtgtacctaaaggaggccaatgccatcagtgtggaactgaaaaagaaggtatggagcaggaggacacaggagagctggaggcaaagccgagcctgctgtgggtgcatctgggttctcaccttgaattaacctttcctttgggggaactcagctgctttgtgctataaaacagctttatatatgtctttatttaatatatgtggctggaacatagtaggtgctaattaaatttttgttaaataaaatttttaaaacatgttttctagcttattttacaaatagactatattcctacaaaaactggagaaacatagtaatagaaaaatacttctcttgggtttctgaataattttaattttcttccacttttctgttattaagtttgcacctctaagtttggtatgcccctttgccattgatctgcttctcctctagggtctgagaggcactgctgtgtagtggacaagcacatgcaccctggacccagacagtccaggttccagtcccagctccacgagtggtgttgatccccctagccctgtgcctccattcccccatctacataatggggttggcagcagtacctggcaccaagggattttgtgaggaatgaaaatgggcatatgcataaagcacttatagtgtctggcatggtaaaaggcaataaatgttattcatttttgtaagtattaccaaaacttcacaccaaaccttagattcagtcttctgtatgcccccgtgtttatcagtttcttcactgctaagattacagtggaagaccatattgtgtagtaggtaagagcatggaccacctaactttggggaaattaattatcttctcctagaactaaattctagttttagggaatacgatatgttcttcattcataatcttggcagcctttctcattttataattatttattagccactcctctcctcaagtagactaaataaaggcagtaactgtctttttttcttactactgtgcatagcatttaattaatattaaataattgtttaataattgttggtgaaactataacgtggtagggagaaataaatgatgcaatgtcgtgaagtacttaccatatttattaaacacttttataaaaccatatttattaaacacttttttttatgagataggatctggctctgtcgcccaggctggagtacagtggcgcaattatggctcactactgcctccaccttctgggctgggctcagtttgtagagacagggtctcactgtgttgcctaggctggtctcaaactcctgggctcaagtgatccttccgcctcggccttctagtgtgctgggattacaggtgtgaacttccgtgcccagccaaataaatgcttttaagagcagtagttgcaatcctctgaatttaaaatgggaaaccttgctgtgttttcatcctctctcattagtgagggactagatatgcattttgtggtcgaccttttgttctctggtataaattctataaaagtcttcattcattcaatcaaaatgtatttataaagattttatgccgggtgtggtgggttgtgcctgtgatctgagccgccgaggtgggtggatcatttgagctcaggagttcaagaccagcctgggcaatgtggttaaaccccatctctacaaaaaatttttaaaaatcagctaggctggtgatgcatgcctgtagtcccaggtactcaggaggctgagatggtaggatcacctgagcctaggaggtggaggctacagtgctctgtgattgcatcactgcacccagcctgggtgacagagtgtaaccttgtccccaccgtgcctcccctcaagaagattttcgtatgtgcaaaaacactgccaggctaggaaaacaaagtccttaaatagcttaatttgaagttagggttattccctatgactgctaacaggtggccatatttttcagtagaaagttagtcacaagatatttgttgagcacattcgacctctttcccattgggtatgattgtatcgtctcatctctgaagcttgcttgctgaaaaccatttgtcaatggtttattctttctattcaggtgcagtttcagtttgttctgctgactgacacactgtactcccctttgcctcctgaattacttcccactgagatggaaaaaactcatgaggacaggcctttccctcgcacagtggtagcagtagaagtccaggatttgaagaatggagcaacacactattggtctttggagaaactcaagtatgaaaacattcataaaggctggttgttttatttaggaaataacaatgacctgctcaagtgagctccctccagctctcctctctctgaggacactgttgcttacttccctgtactttctaaatgctgttgttggccaatggtattaccatccatctgttttcttttaagtgaataaatgcactcctcacacactctgacatttgtagatatttaagtttaccctccatagaccctcttataaattttaaatattccagtttcatcatatttctgttacagatttggaacttatttattttttctatcctggacctcaggataatcaataataaacatggaagttataatctggcttcttttacatgtagtataatgaggtatttcccccgtctcagtgtatttgagatgtcacatacagttgacctacaatattcccccttatgacttttcacccggtagaggataggtggccattcttgacttttgatggcttatctctagaatcaagacactttagatactgagtgttggtttctgtatttttgggcttcattctttttagtaacattaaacagtgggagcaactcctttttttttttttgaagaaaatcttgaacggaagatgcttccaaagtgaaagtttaatgcaatctcattatattaacccaatgtgctttgtgtttactaaataggcagaggctggatttgatgcgagagatgtatgatagggcaggggagatggcctccagtgcccaagacgaaagcgaaaccactgtgactggcagcgatcccttctatgatcggttccactggttcaaacttgtggggaggtatgtgatgattttgttgatgtcttcttttaaaataatgattagttttaagtgtttaaaacctgagcagataatataaaaagttaagaggaaaaaaaaaggtgtaaaaaggccttatctataatcttatccactcacaaccactgcgtcatttggtatatttcccttcagttatattcagcaggcatttttgtttcgactctcaaactttcagccaaagtatttaaatcttccctgactttaaacttacaaagtgttctgtaattgattaagataaatttagaaggaaaagaaaacttacgcctgtatcctacacagtttaaattcatagtacagcttatcagacacaatctcttcgtgatctgatttgtttttcttttttttaaaaagcaattcatcccactttagtcattgcaagggtaaattaattgcaccttggtagtccccttcagcctcattttttttttatacattatttccagcacttaatgaaaacacatagtgcctctatgagtccatattgagtcaagtgttcttagaggttttcaaattttcaaagcagggaaatttaactttgagcttatgatttcagaatttgaattgctttttcaattgcagaaaaccctgtgatgttttttaaagaggctgggtaaaaaggagttgctgaagtcatagtatgttgtggaaatgaagtaaatcttttccactctgctctgatagcaaagtagtttttcaaagagatgaattggccaaacacatcttaccctagcaaagcacatgctgctttgccatatgccatttcatccattttggtttctgctccaaaatgacgtgagaatttcagtaaagactgaaagccttcttgtttcactttgatgttgagtgggtcctttgaggcctggatgctgatcttttatgtgaactggagaatgtaaacgtgttatagcacagtatttacctaggatggtctactcacgtgtttcctttgcttttcttattctaaggattagtccttacataactttttcaacttgcccttgttccctttcacctgacccaaatgatttatgcttattttatccttttgcttttccatttgcttttattgtgttgattccccagtggattctgtcctgttagcacctattgcttcctgtttaaccaactattcctctctccctggctgtgttaattggcgtcttacctggtgtctagctcccccattttccacggctgtgtgaacgagcgccttgccgaccgcacaccctcccccactttttccacggccgattccgacatcactgagctggctgacgagcagcaagatgagatggaggattttgatgatgaggcattcgtggatgacgccggctctgacgcagggacggaggagggatcagatctcttcagtgacgggcatgacccgttttacgaccgatccccttggttcattttagtgggaaggttggtgaggttattgtgagaaaggcgaaaagggaccagctcttgctctgaaggcctccctgcttgcacaattttggataaccttgcattagccaattcaactcatgaatgctctttttcaagttctccaatacttcaagctcttagtcagtgctggtctggctgagatggttctcaggcattgtgtgtgaggtcctcagtctactcagcacaatacgtagcaatatatgaagactgcatggaagacaccttgtcttaaattgcccagtaattttgttctgaagaagggaaccccaaaggagaaagtaaagctaagagtcaaacgtagtgggttcagtgaatagtattatggtctagatgtttcctttttaaaggattgtgattgaaaaagcatatggaggtaacatgagagagggggcagagtgaggccaaggtttggctgaagaatttgtggtactgcaggagtcagaggacaaaagtagattcaggagtagagttaaatttattttttgcttagtctactgaatcctaaaaagaatcaggaaagttaagcttctcctttacctaaaacggatgcctgtctttggccagtttcactgagcctatctacggatctttggcatctgctaaaattttaacctatagggtttataatgataaagctcagaaaatcatctattgaccccatcagcagtgaatattggccaggcacggtggctcacccctgtaatcctagcactttggctcacacctgtaatcccagcactttgggaggctgaggtgggtggataacctgaggtcaggagtttgagaccaacgtgacccatgaaacccgtctctactaaaaatacaaaaattaggctgggtgtggtggctcacgtctgtaatccagcagtttgggaggccaaggcggccgggtcacctgaggtcaggagtttgagaccagcctgcccaacacggtgaaaccccgtctctactaaaaatacaaaaaattagccgggcatggtggcgggtgcctgtaatcccagctacttgggaggctgaggcaggagaatcacttgaacccggaaggcagaggttgcagtgagacaagattgcacaactgcactccagcctgggtgacaagagcgaaactccgtctcaaaaaaaaaaaaaaaaaatgaatatttgtttggtgctatatgaaactgctttgtgttaagactaggtcaccaaactgaggcattgtctctggctctcagtttgtgcatccatctttcagtgatgcagaactctctatgcacatgatcctaatactggtgtctttgttcatctccagccttcatgctgaggtaatttaaattacaagttcaacagtagagcatgcattgaattaaccaaaaagtatgtccaggtttaaaagtattaaatttaaatttaatggtacattagaatcacatattgttgaatcctttataaataagggaattatgtcagtgttaaatggatgagtaccagttatctaaaaattaaaggatagcgagtctcctgacctagtagagacataggttctaaaatttatctcaccaggtgcagtggctcacacctgtaatctcagcaactctggaggctgaggccagaagtttgagaccagagtgggcaacatagtgagaccctgtctctttgaaaatttaaaaaacaattagctgggtgttgtggtgcatgcctgtagtcccagctccttggaaggctaaggcaggaggataatttgagcccaagagtttgaggctgcagtgagccatgattgcaccactgcactccagcctggggacagagcaagaccccaagtctaccaaaaaatataaaataaaataaaacagaatttgtagtatggtattggtcacatggtcggaacctcataactaaattagaagatgatcattcttatggaaagggggaaaagaaaagcttttttgatagaaatgaaagcctcaagtgtaactgtaggtcatagtattagacagtctctgggttttccagtggcaaaggagcatttagaattcagtttttccatgaataaacataaagggattatgtggccatgaatattgttttctactggcatatcgccatgaatagataacgtagaatttcagagaagctgatttttattaaaattgagaaaggtatgtacaaataatgggacaataatgcttgcttcatttgatggctgcctgtgttcttcagcacgtttccatcctgttctaagggagttggaagttaaaacccagtttctggccataaactttgtcccagtgctaattacacagtttctaaaactgttcgcttgtgttctataccattgcagtgaagagtaggcagcttcatcttacgtaacatggtgaggagaagcctgacctaattgtcaggagaagccttgggtcctaggccatctctgtcactatgacaagcaacttaaagtgaagcctttgggctctcaagtgtaaagtgaataacaggtagaaataaagagccataaagatctttttcaactttcatattctgtcatctacactagcaaaaatgaatatcctggttaagacttctactaagaagcatttgtattttgaggaagttgtgtggaaactcaagacaatcccacttaatgtggaaattaactgaggatacatgtattgttttctctctagttttatagttttctttcttttaatcatgtcagatgtaagtataggtataaagcaatcaactctattttgattttcacataaaatacttatggagctgtggctcaggaattgatttttccatttgtttaggttcccaagttctaaccttgcaagaaaggactgggggaggaagtgaaataatataatagcaatcagtaaagtgaaggatagctttccatttttgcccttgactacatttctcttctacaaacaaaatttacaataatgcaacatcacccagttgtgtagtggtcattgtatgtgtaaggaaagtaactactttcctgtttttgtgattcacaagattggatttctcctattggcatataattgccaatataaatcacttgtaaaatttttagtttctggctgggtgcggtggctcactcccgtaatcccagcactttgggaggccgaggtgggcagatcatgaggtcaagagttcgaaaccagcctggccaacatggtgaaacctcgtctctactaagaatacaaatattagccaggcatggtggtttgtgcctgtaatcccagctactcaggaggctgaggcaggagaattgcttgaacccgggagggggaggttgcagtgagccgagatcgcgccactgcacttcagcctgggcaacagagcaaagactctgtctagggggaaaaaaaaattagtttcttgtgaaattccattagtaagtttgttttttagccatgactgcctctgctaaaactttatattgcaagtgaaaaagagcttgtccctttagctattctcttatggcatgctgggatgttatgaaccatccatcataatttgggatgaaatgtaaaatatttaagctagtcttctgggttaaaagggggttaaagatgatgattctgtgatctctctaagtaccttaactgacattctttctataagtagcaccataattttgctaatttttcttatctttatgttgaccagtttgttccactttttgaagtaacttcattgaactttctgctaacgtatcctttccatattcccctctctcatccctgttctccttcagtctgctaggtcaaagtataaggattctcaaaaatgcagagtaattatgaaaattctgtttaaaaagcttcagaatagaatgtttatatagcattgatttggagctaagggctatattctggtaacataacaaggtgctatctagtgaatgtgtgattgtgtagtcatggagctgatgtccctgccatagaattacagaattatctaaaaagggaaatctataataatggccttcaatgctcccacacttggactagccattgccataggcagaaaggcaatctcatctttactgtgtgtgcaaacagtactttaatgtaatgtgtgcttaatataagctttctttaaaaaaaaaaaaggtggctcctgtttttgaatagctatttttaagatagatatagttaggaatctaaatgtgttctatatagttaatatccattatgaggtggctctgaaaaatcaacctagtataagttggatggctttgcttttctgcttctgttataacccatttttctagaaaagcttccacttctacttaaagataagaggcaaatcattttcctgttcccttatgcacatagatgttcacttaccaaatatttatagagtggcccagccctctgcagacagtggtgagcaaaaccagacatggttcctgccctcatagacttatagtctgatggatgacacagacataaattaaataattgcacaaataaatgtaaattatagcagtgatgaaatagttgtgtgtgttgtcggagatcacataacgttgggggacctgttatgagaaagtggtgtttgaaataagacctgaagatgtgaaatcaaaggcgtgaggctgggtgtggtagctcacgcctgtaatcccagcactttgggaggctgaggtgggtgaatcacctgagatcaggagtttgagaccagcctggccaacatggtgaaaccccacctcaaaaaaaaaaaaaaagacatcaaaggcatgaggtgtaggcatcgagtgcagagaggactccaggcaggggacatgtgcgatggctctttaatggcccaggccttgaaatgggcaagtctagctggggtgcccataatagaggagggtgatctgtgtatgtgttgactttgaaagtgaaattatccatttgataccttacgccaaattctttgtcttttaaattctgttgcagtagttgttgtttgagggtcttgtttagaactttttagaacttttcattcttacgtttttttacaccagagcttcaactctctgtttcttagcatttctctctctcctgctttggagcagactgaaagggaagtggcattatttcatctgatttaatgttcatttgcagttatttttgttatatgtttcatttgtatttcatttatgctctagttatgttaacatttgtttttctgtgatgtattatgtctgttttcataattttcattactttgagttgaaatcccaaatacccagtctatcctcctcctctctttgttttaaaatagatttcagagcaggaaaagcatcagataaacatgtatgtcacttggttttgtttgatttattgatacaagtgtctgtctttgtcttttgtcttatgttcgaagatcagcatataccaaatgggaagactggaatcatagtaggaactagattctatttccctttcactaattggaatgaacactctagctttgtgaccaccagtttttattgcttttttaaaaaagtagtagctacacaataaagaagaaaatacaaatgtgataggactttgctagtttgcttgaaatataaagtgttagagctataatttagctttcacttatgcatttctgaattaggttttgaactctaggagcaaacgcaaaccttttaggcatcaactgtcatcttctcccttaacatttatcttttttctttttttctcttgagacgaagtcttgctcttgtcccccaggctggagtgcaatggtgcgatctcggctcactgcaaccttcacctcctgggttcaagcgattctcctgcctcggcgcccccgagtagctgggattataggtgcctgccaccgtgcctggctaaattttgtatttttagtagagatggggtttcaccatgttggccaggctggtctcgaactcctgacctcaggtgacccgcctgcctcggcctcccaaaatgctgggattacagacgtgagccaccatgcccggcccttaacatttatcttgatgcccattcagagtctcctctaatcttagaactcaaaaatttcttgctgcagagcttctctgcccatatgtgtctgctgacctcaccttgtcagtcaccctgcctgaagataatagtcatttttttttttttttttttttttttttttttgagacggagtctcactctgtcgcccaggctggagtgcagtggcgcgatctcggctcactgcaagctccgcctcccgggttcacgccattctcctgcctcagcctcccgagtagctgggactacaggcgcctgccactatgcctggctaattttttgtattttttgtagagacggagtttcaccgtgttagccaggatggtcttgatctcctgaccttgtgatcggcccgcctcggcctcccaaagtgctgggattacaagcatgagccaccgcgcctggcctctttttttttttttgagacagagtctcaccctgtcacccaggctagagtgcagtggtgcattttggctcaccacaacctccacctcccgggttcaagcgattctcctgctacagcctcttgagtagctaggacaacaggtgcatgccaccatgcccggctgctgggtatatttttagtagagacagtgtttcgccatgttggccaggctggtctcgaactcctggcctcaggtgatccgcctacctcagcctcccaaagtgctgggattacgggcatgagccaccactcccagccaataatagttatttcttaaaataacaataaatgaccaggcacggtggctcacgcctgtaatcccagcactttgggaggccgaggcgggcagatcacctgaggtcaggagtttgaaaccagcctgaccaacagggagaaacccagcctactcaggaggctgagacaggagaatcgcttgaacccgggagatagagtttgcagtgagctgagattgcgccattgcactccagcctgggcaacaagagtgaaactccatctcaaaataaataaataaataaggtaacaataaagacccataggccaggcgcggtggctcacgcctgtaatcccagcactttggaaggctgttgcgggcggatcacgaggtcaggagatcaagaccatcctggctaacatggtgaaaccctgtctctagtaaaaatacaaaaaaattagctgggcatggtggcgggcgccgatagtcccaggtactcgggaggctgaggcaggagagtggcgtgaacctgggaggcagagcttgcagtgagccgagactgcaccactgcattccagcctgggtgacagagtgagactccatctcaaaatcagacaaaaagcaaccaataaagaccatatgctgtgatatggaatttattttagagttattaactgtatttcgtcccatttccctgccttttttgtctcctggtttctgttttatctattgggaaaaatgaaacaaaacctctttataatttcttaaattaaaaggttaagctcgcctgggcacggtggctcacacctgtaatcccagcactttgggaggccgaggcgggtggatcacaaggtcaggagattgagaccagcctggccaacatggtgaaaccccatctctattaaaaatacaaaaattagctggctatggtggcacgtgcctgtaatcccagctactcgggaggctgaggcaggagaatcacttgaacccgggagccggaggttgcagtgagctgagatcgtgccactgtactacagcctggcgacagagcgagactctgtctcaaaaaaaaaaaaaaaaaaaaggttgagctcttgaatgggctcctcctccaacctgcccgagcagcattcatagagcagtatcttgaaagtctgcttccaggtgtgactcttctccctacagtagttaagttttagagcatgatttggtgtgtgttggtcttcgtcaacagttctgccaagcgtttgcttgttcattatctgtgctgaaaaggcagctggaggcaaatctgagaggctaggactgagaaggggtcttaagacaaggccagaagtcagctcacagttgcaggaagatgttctcagtgaatctgaaagccagtttatctctccatggatgttctgacatttgtctcctggtttctgtctttagggcatttgtttacctgagcaatctgctgtatcccgtgcccctgatccacagggtggccatcgtcagtgagaaaggtgaagtgcggggatttctgcgtgtggctgtacaggccatcgcaggtaggtgaccctcttctgaaatgagagctgtgagttctttgtctagagacaaagcaggctgattctgcgtgggtcacgcttatattacacatacaaactgtggggagtttgtatgtgtaatatacagacacatactttggagaaagcctttattgctcctttctagcaattgttcccaagtatcacaaatagatcctgcttagtccagactactgctactttgcaataatggggtaaagagatttccttaaacatgttaaagaacagctcttgcattaactatataaaagtcattggtgtgttgttttttttttttttgagacagggtctcactttgtcgtccaggctggagtgcaatggtgcaatcatatctcactgcatccttcacctccaggctcagccatcctcccacctcagccacctgaatagctggaactacagatgcacaccaccatcccagctaatttttaagtttataaattttatagagttggggtctcattatgctgcccagcatagtctcgatcgaactcctgagttcaagtgatcttcctgccctggcctcccaaaatgttaggattacgggtgtgggccattgcacccggccagtcattggccttttattttgttttgagacggagtgtcgctctattgcccaggctggagcgcagtggcacaatctcaactcactgcaatctctgcttcctgggttcaagcgattctcatgcctcagcctccctagtaaatgggattacaggtgcccaccatcacacccaggtaatttttatatttttagtagaaacgaagtttcaccattttggccaggctggtctgaaactcctgacctcagatgatctgcccacctcggcctcccaaagtgctggattacaggcgtcagccactgcacccagcctggcctaaataatatatcttaactgcttcattattaacaaaggattgttaggcctttgtcttgcttagttgttgtttttttgtttgtttgtttttttctcagagtacttgtaatagacatttgtttggctgttgttttgtaatgcacgggtcaagctgatataagctgattgtggtggctcgtgcctgtagtcccagctacttgggaggctgaggcaggattgcttgagcccaggagtttgaggccaacctgggcaacatagtgagaccccatctcttaaaaaacaattgaaaaaaaaaaaagattttggtattttccatttttccatgatccagcctatgttctgaggaaagaatgtggtcatttgctgtaatctttctgtcttaattcccaaatgctgggctgtgtccagtgacctttcagcctttcccctatggaaacttgtgacacaatcaccagtgttgagtatatggaagtctcctccacaagtacaatataatattttcaaatacttgttgggtattattgactattatcttgccagcatggagacagtcaggatttctaggtatgacatttgaacaatctcaagaataaaactgattctttttttttgagacggagtctcgctctgttgcccaggctggagtgcagtggtgcaatctcggctcactgcaacctccgcctcccgggttcaagcaattctcctgcctcagcctcctgagtagctgggattacaggtgcccgccaccacgcccggctaatttttgtatttttagtagagacggggtttcaccatgttggtcaggctggtctcgaactcctgacctcgtgatctgcccacctcagcccctcaaagtgctgggatgacaggcgtgagccaccgcacccggcctgaaaccgattctttattgactagtctcatttgagctgaggaagttgataaatctacatgaatagagtgcgaagcagcccatgccgtgttactactttggtatcattctctcatgccaaagacttgagtttataatccagcaagagctttttccctccctccccctgtgtagtctcactcaattcttgctaatttttttttctgctttagcggatgaagaagctcctgattatggctctggaattcgacagtcaggaacagctaaaatatcttttgataatgaatactttaatcaggtgagaaaccgtcaggaagaaggaaaaccctgtggaaagagaaagaatgttcagcattggagatcagttctcctgtaaaactgaaaaatacagggtgctggttgccacagagtagttcaatagaatatgggacatgtctaacaattatgaaggtaaaggtgtatagactcaatattcatattttattcattgcctttcctcagacagccctcagtccatataattttccagtcactattatttgttggacagataaacagaagtaaggcaactggggaaaaatacgtttttatactactttaccatgtatctgcccctgcctttttttcagagtgacttttcgtctgttgcaatgactcgttctggtctgtccttggaggagttgaggattgtggaaggacagggtcagagttctgaggtcatcactcctccagaagaaatcagtcgaattaatgacttgggtatgtagacatagtttactgtgcttggggacattttcgacaaagggaaaatattgaccattatcaagggacatagtggccttcatcaactaggaatggaaagcatgcccaactccctcctctttgcattatttgaaccatctgtgtcttcatttgaccctctttagatttgaagtcaagcactttgctggatggtaagatggtaatggaagggttttctgaagagattggcaaccacctgaaactgggcagtgccttcactttccgagtaacagtgttgcaggccagtggaatcctcccagagtatgcagatatcttctgtcagttcaagtaagctgcccctttgctctgcctcccagctagctgctaaccgaggtgacatctcttgtgcactgtagagtgctttacatgtgtgagggattaacactcttgagacaaagactgatcagtctctgaaggaaaatactttcatcactcctatgggagtgagaaccagaaacctgtcctggaatgcaacagggttccctggcaggaggagcatgctgcacatcctgctgcagggctctgctgtgagcggtccccctttaccaggaatgtagggtctgatcacataagcctgttgatgagtctttctagtcctcttcatgttgaaatgtcttattaataagcctgaaagcaatgacttatctagctagcaattacgcctatttaatactcgggaaaaggaaaatttaaacaatgtaaagaaggataaattctacatcaactgaaaaaagctagtatgtagggaagatgtgatacctctcatttctcatctacataggacttgctctttcccgcggccctctcaaaccctgtgctctggatgctttcttctcaagactgccccaggaaaacatttttttgtgaatcttcagttttaatacctccaaacttcaatttgtcttttcagtacttggaaagggccacagtacaagagactgaagtgtgacccctccatacctaccgccctcagtttgccactggtgccaccaagaggctgctttgggttctgccatccctctcccctcagaatgtgccttggccgtcccatgggtcctagtgcagtttataaagcttttgtataggttttatcacagaaaattgagtcaaatgtgatttaaattaaatgtgatcactatatagtaagccactaatatcatttgctacaagtcatagttgttggaatattacccattgagcattgatttcacctatttaatgtgttttcactcataccctcaaacttagggcaggatagtgttcaccagatgaatctgttttttggaactgttgctattattctaatcaggcaactgatacgttttatggaaaacatctatttggttaactgatgtctgaagtgacaataatagtgagttgacctttgtcctacaatctcctaaaaagagcagcatctctacctggtgttagctctggggaaaagggcatgttgcttctgttgaaagcagcctcaaaggcgtcctgtgtttttatagtcgctcctctggcctgtgccgggaaggtatggctgcagagcactgtgaatgagttcacctgtcgtcagggaaccccaggaatgctgcggtgccagcaatacaggaatcagggatttggagcacttggcaaaagcatgctagtgttctcagacgggtgaactaatttggaagacaacaagttcatattaccagtctgtctgtccccccagttgaaaatagtttctttttctccattttttcttgatggaaggggtgtccttctgatggatttttctatctggcagtaaatctttgtgttgggtcctctttaactgtgcagttctttttatttcagactaataatagggagagagagagagagaacgataacatctcactatctgtgaaaataactaaatatagcccattgttttaacaaatctttccagagtatcttctgtgtgtcgagacctgtgggaaaacgcttgctgtctgggggagagaggcatataaatacattattacagtgaaatcattgctattaaggaaaaaaacattactagtaatgtgggaacacaaagctgccagggtaagtcaggaaagactgcctggaagaggtgacatttgaatccacaacagactcttatgtaactatgccatccacaggctctcgcactaactgtggaagcttgagtctgctaaattttgtctgtacaaaatgacattgtttttatttttagtaaaaagcttttacaaaggaagaggagttaattgaatgtacttcttcactctctctaaagcattcttgcatatacctccatatagctaagtgatcagggtcagttaatttttcagtcatttttgaaataaaatctaaaatgccctctgtgcaatatggaaaaggttcttgacaaggaaagtaaataacttaaagaatctgcttaagtggaatgcttctttctgtaggatccacattgggctcttgaaagagattctgataaaaccgtttaatgcattgttcacgagtctttttattttttttatgaagctttttgcatcgccatgatgaagcattctccacggagcccctcaaaaacaatggcagaggaagtcccctggccttttatcatgtgcagaatgtaagtgacatggacctttttgccaaacatatgtttttctggtaccttggctttctcagcccgggaagggtgataagaagaggtacaagtcactggctgtgcagggggagagtagacaatagagggcgtggctagagtggtgaggtcatccacagcggcctgagcagcaagccttcttgtctgtgttacagtgggcctagtgaatgtgggttcgtctgccaataaaatcttccatcagtttgaatgcaatgagttgttttagtgtttctgtcctagaaaaataagcatgcttaataagagttttattaaagtgaatgcattgtcctttaaaccctaagatacttatgttgctcgattgcaaataacataaaaaatatcaaataccttctgtagctaaattaagatttagatctgttttccttgcaactgatagtataattaacacattaatgccctttacaactgtattcctacgtggagtaagaaaacagacccttccctctcttacgtgaaatttcattcaaactctattccaaagtcattatcctcatcacaatagctaatattcactgagagtttattttgtgttagtcactgttctgagagtttttgtgtaatttaatctttacctttataccatagattaagataatccctgtgttagctgagatgactgaagcatagagcaattaaagtcactcatcaggctgggcgcagtggctcatacctgtcccggcactctgggaggccgaggcaggtggatcacttgaggtcaggagtttgtgaccagcctggccaacatggtgaaatcccatctgagacacgagaattgcttgaacccaggatgggggggttgcagtgagttgagattgtgccactgcactccagcctgggcaagaaagcgagactcccatctcaaaaaaaataaaaaagtaataataaaaataaagttactcatcagtgttacaagaggcagagataggacttaagctcagagaaatttagctctggtattcaggatattcactactacatgaaactgtctctcattctcttgctaaccatgtctgctctctaaagtaagagaggaaaggagaacttcaaagatggaacaagcaaacacaaaatatgccatcttctttttcatgttggtataaatataagcaagcatgtatctgataaactttgatcagctgctgtgcacaaggattgtgcctgacaactggggaatgcagatgaatctcagatgctcccagtgagcttcgaattacgataggggaaataaaatgcatacataaacaccagtcatgcaaagatgaacatgagaaaatattcactaaatgcagtgggagtggagaaagggaaagttatttctattaatggaaagctattttaagttactttttgttggggaggatagttgggtggagaaaggggataggaagctccctgaaggatgtagtataagcaagaaaaggtgtgtcaaacttggcattgtgcctggcacataggccatagtcagtacatgcatggatgtgctggaagggccttccaggcagggttgcagcctgggccagtccttggcacagctgaggagagagcaggtgaaaggagcagcaggtgagtgagtgagccagaatagtaagtgtgggaaggacaacaggggccaagatcagttgaggcaaagtatggaagatcttgaatacctgaagctgggaaaagttactttagaattaaaaacaacataggggatcccctgttttttgttgcaagagtcctgcatagtaaaatacccagcagatactggacactcagcagcagtaaaattgggccaggcatagtggctcatgcctgtaatccagcactttgggagctgaggcagaaggatcagttcagcacatgagttcaagaccagtctgggaaacatagtgagatactgtctctacaaaaaattgttttaaattagccaggcatggtggtgcatgtctgtagtcctagctactccggaggctgaggcaggaggattgcttgagcccgggagggtgaggccgcatgagccttgtttgcgtgctacagagcaagaccttgcctcaaaaaaaaaaaaaaaaacccaaaatacgtactaaagttctgattgaagcaaaaatgtgtattttcttgtaatcttttcctaatcttgcttggctttagattgcagtggagatcactgaatcatttgtggattacatcaaaaccaagcctattgtatttgaagtctttgggcattatcagcagcacccacttcatctgcaaggacaggagcttaacaggtttggaccagataagcaaacatttttgatggtattgttttgatttttagtttctcaattgctggaaaggaagaaatcttttgagggattaagataactaaataagtattctatattaccctgtttcctctttagaaacttcactatcatcttatagccacctaatcactgattttagatagagcaaattaaattttgaccaggtgacctcaaataccatctttttgtaggaagagactttgaatatggtagaaatttgaggtaataggaatataacatgaaaattgttaaaaattgttcctaatgcccacagctttatgaaacagaagctctaagtacagtcatcacaactgctgaggaaagcaacagtgggcctttctgatgatggcagagtgttggtgttggcagaagaatttttttatttattagctaagacttagagggagacattttttaaatgagatttagcctgtttcactatctaggattatctctattatctggtattatgccagagttgaaaatggaaaagtctgcttccttaaagggaattaaaacatgctattgataccaacatccaactctttgtagtctttttctttctcttgaaaaaacagggtttattgatttctacactgcaaatagtcattacaaaaagttttttttcttttaaataaattcacacaaagagaattagaaagcgatggtaatgaccagcaagaggaataataattacgttcatcttaatgtctgtgtgccagttctgtttacgttaatgttggaaaactccaacttggaatccagaacttcaaatctgcaaatagaatgtcttgagataggcacgtggaagtcaaacagtttctctctttttccctgctttcagaagctatacataaaatgttgttgccttctgtactgtcacagaacttttacgtacattctcactcctacttgtgaaacccctaaagagaaggaaattcaatttgcagtccagcacaaaggggagaatttctaaaataaataactctttatagtcttgatctttgtcttcctttctttgcagtccgcctcagccgtgccgccgattcttccctccacccatgccactgtccaagccaggtgagcactcgctccgctttttgcatgatgatctctttgtgaatacatgtcttattctgaatgacttttcaaatagaagtcatgtttgaattcctattcttctatatatccacatgtattcctgctcctcttgtatgtatctagtaggaactagaattcctagttcctgatttaaaataagaagtaaaggctgggcgcggtggctcatgcctgtaatcccagcactttgggaggccgaggcaggtggatcacctgaggtcaggagttcaaaaacagccagaccaacatggtgaaaccctcgtctctactaaaaatagaaaattagccgggcatggtggcacacgcctgtaatcccagctacttgggaggctgaggtaggagaatcgcttgaaccggggaggtggaggttgcagtgagctgagattgcacctttgcactccagcctgggcaacaagagcgaaactccgtctcaaaacaatataaaataaaataaaataaagtaataaaataagacaagaagtaagaaacaatagggggccttatctacaaactctctggtcttctatttgcagattttgataatcactctgttcctaaatctttctgctttgcatgtaacttcccataactgtcaggggactaggcatttctttgcatagtaaatttattctgtatgttcagtgatcttgttttgatttttctttatttctgtcctttttcctcattgcctattcgccaaattcccaccccaccctgtgctcactctccaccctctgtattccccatcttcatctgccttcagaccatgagagaaagattgagctgattcggtttctcgtgtctggctatgtgaatgtgcatatgttggacacattttctgagcacgccagtgtgcttgcatcctccgctattgccaccttccaggatgaggctgacccattgccgccttttctctttctgccagttcccagctgccagagcgagagggtacccaaacgagatggttagtagctgaattagctccaccttagatgtagaaccatcctcaggcgcttgtcctgaagcctggctctctgcatatgaaacactgacatttccctttgcaacttgagctgaatgtagagctcagcacattttcaaggttgtatcacattttcttcctagagatttgggaagcagcttctctacatgtgcctctttcacatcaccatcgcagtgggggaggcctttgcatttgtttttatggattctttgcaatagtatttttaattttgaagattttactagtagttggtttgttagaatacttctggttttgctttctgacccttagatgactgccaggatcacttaccctattttctttctgactagcatcaccaactcatgtgaaactcagctgggctgaatactgctgatagggtacacgtgtgaatagtgctaaatgattcataaagctcctttatgtacattatgttagtggatcttcatgattgcttttcaagatagtaggctaaatattagggtctacagtttataaatgaggagacagactcccagaggttaagcagcttaactaaagtcacatagcatcagtacagttaagaatatggagtttaaatctggccgggtatggtggctcgcacctgtaatcccagcatttgggaggctgagtcggacagattgcttgagctcaggagttagagaccagcctgggcaacatggcgaaaccctgtctctacaaaaaaatgcaaaaattagccgggcgcggtggtgcacgcctttggtctcagctactcaggaagctgaggtgggaggatggtttgagcccagagggcagaggttgcagtgagccgagatcacgccataaaaaagaaaaaaaagcatatggaatttaaatctgaagaaaatgtgtgacataagatcatttacagaatcctgtatttataaatgataccagtagttggtttccaactttgtcctcacattggtatcacctgggaaactttacccctcatggaggaagaactttgtctttcccttagagattgtgatttaattgatctgggatgtgtcctggactttaaggtccccaggtgctcctatgtgcagggaggtttgggaaccactggggtggaggatgggtcttttcttcaggacatcagctttgattgagcccctgtgacgtgaggctttccaagcattgtctctcccacgttagtcccatgctttacgtgtcacacaatctgagattctggaattggaaggtttcatgagcacatttattctacacaaaagctgttttctcatcattagagacagtttgttgagaaaaaagatactgatttctttattttccttgttctctgaatgtagagataactaataacttacaaagtttatattggtgtttctctgggtcttttgcattgaaatctttcctctgactcttgctgcctttcccaagtatgtctttaaagactgacattagagaagcttgtatttttgctgagtagtcttggaccagattttgacatactctaaaaacttttaaaagttccagccaccaagttaaacacgatgagcaaaaccagccttggccagagcatgagcaagtatgacctcctggtttggtttgagatcagtgaactggagcctacaggagagtaagtccaacttaataaatttttaaataaggcaaaatgtttcaaattaggaaatgcaattttgaatcttcttgtatttgggttcatgaatcattgtcactgtcaaattccagggatggttttgtttttgtttttgttttaatagagatgcagtcttgttatgttgaccaggttggtcttgaccactcctggcctcaagcagtcctcctgcttcgacctcccaaagtgctgagattacaggcatgagccaccacacctggccgaattccagttttgaattgatttttggtggtcttggtatttgaatcagatgtttatcagagaactgactgttgagcataataatttgccttctcgttagcaacagcaaaatcatggagacaggcatcttgttgttttttggggttttttttgttttttgttttttttgagatggaggcttgctctgttgcccaggctggagtgcaatggcgcgatctcagctcactgcaacctctgcctcccaggttcaagcgattctcctgcctcagcctcctgtgtagctgggattacaggtgcgtgccaccacgccaggctaatttttgtatttttagtagaggcagggtttcaccatgttggccaggctggtctcgaactcccgacctcaggtgatccacccgcctcagcctcccaaagtgctgggattataggcgtgagccactgtgcccagcagcaccttgttgtaagggttttatcataatgggttttattagtagtaaagcaaaaggagcatattgcatagaatatggtaaagacttacattactgatgtcaaggaggacatagaagggcagaatattttcctagaccagggtttctcaacctcagcactatttggggctggataattctctgttgtgaggggctgtcctgtgcatttagaatattttgcagcatccttggcccctacccacaagatgccagtagcagctccactctatttgtgacaaccaaaaatgtcttcagacattgccaaatatcccccagggagggcatcctcagttgagaaccactgtcctagatcaaagtgataccatcagcttactctgtctcgatgagctgagttagagtaagtgattaatgtaattgttgtgtataatcatctctaaaatgcttttgtaaaaacacaaatgaaagagatcttactcttaggacagaggcaaggggctgtatcagttaatataaagggtaggagtaaatgttatcctaatgttctcctatatgtaattctgagaaccaccatcatggtcatcattgggaaacacttattaagttcctactatgtgtaggatactgtgttaagtgtggtatgtagttgttagtagtgacagtgctttgaggaatttgacttttcatagacagacttatgatgtgattacaagttgcattatgagggagaggtagttacagtaattgtttctactgaattaattgctttctgaatcttaaaaaaaactatagtctgaaattatctgtgtttcttatctcctgtcaattgccattgcacttctacattatttattgaatacttaatatcaaggggctggatgcaaccaaaagatgttactgtcctttgactactcaagtctagagaggattgagacatagatgtgtggaaaggatgagtaaatgcaaatgactgtatgattaaatgccagcatgggtgagaaagacatgggatcagaatttatcaaaacaaagaccaccaggggctaagccttgcagatgaagtagcacttagttttttcttttgcgtttctattttttaggtatatcccagctgtggttgaccacacagcaggcttgccttgccaggggacatttttgcttcatcaggtactaatgagggaccaaaacaggcatcggagggaacactgaaaagaatttagaataagagacggaattctttcttattctctgttttcatctctatttcagagggtgggcggggcattgtcctgttgtcatttttttttttttctgtgtctgtctgtagatatttcttcctcagaccttggcttatatttatccttgcttttatatgtatttagaatagctattttgaaaaatattttgtttcattcaattactctaatttgtgtagctcctatgtcacttttaatacttttcatttcgtgatgtttggaagctctgtgctttcacaccagaagttcttaataggaatagaggatgaaggtttcaatggactaaaaatctggttatgaaacataggtccgcttttggtaaatcaaaagtaggttcagtcagtgttcaaaagtacttaagacccaagtgggcataggggctagggataccatacatttgggacatacaatcagggcatggttgaatacttattatacaaggggctgggatgcagccacataatctcctgtgacagattatggttattcttaaaaccatagagaaaaagaattttttaaaaaagaaaagaaaaccatatcagaacctgactgttccttagtccctgacacatctccctttgttttgaataacaatgtggatagcattttccgtctttccacacctctccttcctgctcatcccccatgccatgccatacaggccagaaaacagtagacgagaggagataatagattgcttcagctaaattgcaaccctgcttcattacctagggcatccagcgaaggatcacagtgaccattatccatgagaaggggagcgagctccattggaaagatgttcgtgaactggtggtaggtgagtacgtttcatcagccaaggatagaaccaggacttacagagattttttttttttttgagatagggtcttgctctgtcacccaggctggagtacagtgatgagatcatagctccctgtagcctcaaactcctgggctcaagcaatcctcctgcctcaggttcccgagtagctgggaccacaagtgtgaggcactgtgccctgttagagatgttattcttccctgtttgcggtacatggaatgtgtagaagaccatattcggaaacacagactatggagatgcagaggccttgagtttgaaactctgtattcctgtttcttcgctctgtcattagtgatatgttatccaactaactaactcagttaccagggaatggttctgtggtagagtctgtgagagggcataaaagaaatctctgctggctgggtgtggtggctcatgcctgtaatcccagcacttttggaggctgagatgggtggattacttgagcccaggggtttgtgcctggccaaggtagcaaaatcccatctctacaaaaaaatatgaaaattagctgggcatggtggcacgcacctgtagtcttggctactcgggaggctgaggtgggaggatcgcttgaacttgggaggtggaggttgcagtgagctgagatggcaccactgcattcaagcctggacaacagagtgggactccgtctcaaaaaaaaaaagaaaagaaaaatctctgctaattgtgagcttgcattttagttagggagacagcatatatatgtgcagaatgctttgatgaataaataccaaaatgaggacaaaggaaaatctgtgctaagagagttaacagtgaaaacaagccaggaggactgaatagattcaagaaaaattagagggttttttttttttttccagacacaagcattttgagtaagagagtcaggaatatgtctaacatgcaaatgacaagaaaccccatggccagagtggagaaagtaaattaaggagtattggctagatagtgtaaactttagaatgacagtccgaggcaagagtttggaacttttgttgccatggacctctttggcagtaacgaagccttagaattatgttttcaaatgtgagaaataaagtatttaggattacaaaggaaaccgataatattgaaatacagttgttaaaacattaagctcttctttactgatgcatgaaataacaagatttagcagttattctaattaccataatttccaagtagtgatcaatgaaaaagatatcttgtgtccaggcacggtggctcacgcctgtaatcccagcactttaggaggctgagatgggcggatcacaaggtcaagagattgagaccatcctggccaacatggtgaaaccccgtctctactaaaaatacaaaaattagctggttgtggtggcgggcgcctgtagtcccaggtactcggaaggctgagacaggagaatcatttgaacctgggagacagaggttgcagtgagccaagacagcagagtgagactctgtttaaaaataaataaataggccgggcgtggtggctcatgcctgtaatcccagcactttgggaggccaagatgggcggatcacgaggtcaggagatcgagaccatcctggctaacacggtgaaaccccgtctctactaaaaatacaaaaaaattagccaggcgtggtggtgggcgcctgtagtcccaactgctcgggaggctgaggcaggagaatggcatgaacctggaggcggagcttgcagtgagccacgattgtgccactgcactccagcctgggcaacagagcaatactccatctcaaaaaaatatataaataaataaataagatattttgcacatggaaacatctgtggtttctactggggacagagtcacgggtactggccaattcttctgtggtttattgccttcctttgtgattgaaggagatgccaatttttagttaaaggtttgtgaaaataaagatgtaatttttttccccatccaagctcaaggaccctttgaattctgtccacagagtgcttgtgtctctctggaccagattaagaaccttggggccaggcacagtggctcacgcctgtaatcccagcactttgggaggccaaggcaggcggatcacttaagttcaggagtttgagactatcctagacaacatggcaaaaccctgtctctctacaaataagctgggtgtggtggctcatgcctatagtctcaactactcaggaggctgaggctggaagcttgcttgaacctgagaagtcgaggctgcagtgaaccatgatcatgccactgcatgacagaacaagaccctgtcaaaaaaaaaaaaaaaaagaatcgttggaagggagattatgttctctcttgtctggggcagcagtggtagtagcttttcaatatttttcataataaatttttctttttttaatttagttttttttttaactttatttacaaagtactgaatgtcctttgacaaaataatgtttatatggaaccctaataccgaaacagaagagatgctttctgaccagagaaggagagggaggatgcagaggcagcagttactatggcttctctgaaggatcctatgatatatttttagtttgttttattaacaaactctgatgtagtatttaccacatgccaggtgcttttctgaatgctccaaaaatactagtttgtttaatcctcatagcaaccatatatggaaggaattgttattctcgcttgacatatgagggaactgaggctcagagaggttgagccttaggctcaaagcctcacaggtggtaggagttggaacccaggcagtccagcactggaggccaagtccttaacgtctatgcaatgctgcatccgctagtgttaacttgaaaacagagtgtaggattttgagcaagaaaggggtgtaataaagtcagcatggccaggtatggtggctcatgcctgtaatcccagcactttgggaggccaaggcaggaggatcgtttgagctcaggagttcgagaccagcctgagcgacatagtggggccccgtctctacaaaaaaataaaataaaataaaatagctggatgtggtgctgcaggcctaaagtcccagttactcaggtggcttaggtgggaggatcacttcagcccaggaattcaaggctgcagtgagctatgatcaaaccactgctctccagcctgggagacagaccaagacattgtttcaaaaaaaaaaacacaaaaaaacaagaaactgtcagtcagtggcttcagaagttgctgttaggtgagagtggaatggattggaacggggaggtgtgaatagcaggtcagaagttgctgttaggtgagagtggaatggattggaacaggggaggtgtgaatagcaggtcagaagttgctgttaggtgagagtggaatggattggaacgggggaggtgtgaatagcaggtcagaagttgctgttaggtgagagtggaatggattggaacggggaggtgtgaatagcaggtcagaagttgctgttaggtgagagtggaatggattggaacgggggaggtgtgaatagcagggagaccagttaaatggctgttgcaggttccagaccagagaggaggtggccttttgtgatcagggcaatgatattgtgaataaaagttgggatgaatgtgggaaactctttgaataaagaatcaatatggtttcatagttaactcaatgtgggaagtaatggagtcagaccgtggaggaccctacaggtaaccaaatgacccttccagctcctgaacttacacagagatttaaaagtctcttttgggcttaatgaattcatgttttgttttcaaatgtgtccgtgctctgttttttttatcctttcttttaggtcgtattcggaataagcctgaggtggatgaagctgcagttgatgccatcctctccctaaatattatttctgccaagtacctgaagtcttcccacaactctagcaggtgggacacccagagcagtgtgaagaagtccacacttgcaggcgttaattggtacaccgttaggtgccttattcattaatgactcccagttcggacaaagaaattaactcccttctcccttctagcttcaaaaatctctttatttcttcacctgcctgctgtactctccaaaaagaaagaaagaaagtattgcagatatttgtatgtgatcagttactcttagagaatggaagtgatcctgtcccatgtgaagtttgaatagatgtaacaagtgataaatgaaaattggagaaagaaaacagtatattccccaaggatttaaaagtacgaattaattattgccaagattaaattttttcctgtgaaatggttgctgtggagagaaaggtttctctcactccccaagtatcatggaaatgtgccctctgagataaaatgaagcctcttgtgttaagtctttgctgctgctgactataggctccattatccttagtatttgtttttcatttatgcacaaaagcgataaataatatgaactcttatgaccaagattggctgccataaataatagattttactttgttttttattttaaatgtttcacttaaaattatcttttataatcaggtgataacagacagttcgtaaagtacatagccattctgctttcctttgtaagactagaactaaaccagctgggatcctcttacctcacccaggaagggagttctcattgtctcagaggctccgtctctatatcctaggggctgggaaacaggagcggctgcctcttctaatgtgggctgagcacactgccttcccaccacaggactttgctgtgcttcagtctgctcctgaaaaacttgtttacatccatgttgagaggagggagggaaggaataagacgataggcagaaatggaatgaaaggtttggaccaggattaatttctttctgttgttttcttgtattatagtttaccataggaaagagaaaaaagaaacaaacttctgtttgctggcaggggctgtggagaaagagggaaggagtgagagggtacatatgtatgtctggggagggggagtggcagaaataaagaggggtgctttgactatccatgggcaaaatcacgagcaatactatttccctgaagtcagcagtaattctgcatagctttctgttttctgccaatgttcagccgggttttaccaccacattttctttgtagctatgaaaaatgtattgtaaatttccctagggtacttagtaaaatatacagggaaagatgggctttggttgaaatactggttattctaattttgcctccattagagtaactttaagaagtcctttaattcacgcccaacaacaggtcaggtgctacaagaaatgaatttggctttgttagaagcagcttatcttgtgagttagaatgagttcatcaaaaaaggctgaagtcaagaataacaacaacaacaaaaaacaccttaaatatttctgttctcatttaaactatataaatctacattaatttatcaaacttttgctggaaagccatggccttttctttaattataagatcatttactggagttctgattgtctttcttgcaaaaccacacccataattcatcatctatgactttcagtttggtggagcaagaattagaaacctgtgaagaaaatctaagttcaaaatcctttaaattttttatcatttattaacattaatcatttaaacattttatcattttcccctttcttttacatttgtctcacccaaacttaacagttatttttaaacaactcaccattttctaaccttttgaaaacattcaacttagttttcacaggaacaaaaattatttatgttttcatatttcattgatttgcctaatgtttaatgaagttagataataataataagtacaactggcataaacagatttgggaccagatactactgacatttgataagcactcaactcttcggagcgaagtgtctgggcaaatgagacatctttgtagtttagaatgctcaaggagaactagccatcaatctgtatattttagggatatggaaaacataggttaatatggtaagtggcaaaatggagtttggttaagagaactttcgttctgtttgtctaaggtttaatgtttaaagttgaacttacctgcaatttgggtatattatgtgtgtatcttagagggctttgctaatacattgatagtggggtataattgacaagggaccattcattattccttttcttcccagtcctacatttatgttaatgcattgacttggttttcccttaactccacagcaacttcctattattctcaatactaagtcaccactgaaaggggtactgatggtggtggtctccactttccctcttatgtctggcattttccttagttggaagtctcaggagagggacccatgttattgtaagtcctctatggaattgtgttccatgggattctgtgttaattgtctgtccacttgaattcactttgcttatcagcaaattttgtcttctttatatatatattttttctgattctctcccttatttcttttgtttttttgctgcactaactaaagccttttctatgtttttgcaggctctttcttgataaggatattcctaggtattgtctgtttgcttttttgcacgtaggattctagtttatcagaatgctttctgtcttatgttgctttgccattttaattttgtagtcccctccccatgtaaacctactgtacctaggatagagtagaccctgttctgtaccctaagaagcgtatagcttcttaaatgatttttagagtttcaaattattttttcattccatttgctaaacttgtcagttttattcttagactctttcaagttttcctcttctacattacaaagtagaatgtttctcccttcatttcatacagaatctcaggttttgttttctgttttcctctttatctgtcttctctccgtcaaaagcatgaagggtttattgctttataaaacctgagtccattgcagtcttgcaaaactgttcactttcttctctgttttgtcctgtgtggtaatagagacaaatttggctatttggatagctgagtctatgagaaatattttatatatattttttaacatttatctttctcctgtcagggctgcttgttttatctgtttattttcttcttttggaataggaaaaatcctggtttggtattaaaggaagttttttaaaaaatctgtctcatttagggaagaaaattgaaggaagtgatacatgacaatataacctaaaatgttaaaaaaaatacaacataaacgggctgggctcagtggctcacacctgtaatcccagcactttgggaggccaaggcgggtggatcacgaggtcaggagttcaagaccagcctggccaagatggtgaaaccccatctttactaaaaatacaaaaattagcctggcatgatggtgggcgcctgtaatcccagctactcaggaggctgaggcagaggatcgcttgaacccgggaggcggaggttgcagtgagccgagatcgcgccactgcattccagcctgggcgacagagcgagactctgtctcgaaaaaaaaatacataaacatatttatatatttgactgatgttactgatataatgattttatccctcaatttggaccccattcagtttacatttcagagattctcctaatgaactcaaaagggttcatcagatgtgaccatgatataagaaggtggcttctgttttgttttcttgagacggggtgttgctttgttgcccaggctagagtgtagtagctatacctgcagatgctttaaaaaaagaaaaaaaaatgcggccgggcacggtggctcacacccgtaatcccagcactttgggagaccgaggcgggcggatcatgaggtcaagagatcgagaccatcctggccaatatggtgaagccccatgtctactaaaaatagaaaaattagctgggcgtggtagcatgtgcctgtagtcccagctactcaggaggctgaggcaggagaatcgcttgaacctgggaggcggaggttgcagtgagccaagatcgtgccactacactccagcctggcgacagagctagactccgtctctaaataaataaataaataaataaataaataaagtgcggtagcatgatcatagctcactgcaaccttgaattcctgggctcaagcagtcctccctcctcagcctcccgaataggtgggactccagacacgtgccaccatgcctcgctaatttaaaatttttttgtagagacagggtctcgctatattgcccacgctggcctcaaattcctggcctcaagtgatcttcccacttttatctcccatagtgctgggattacaggtgtgagctaccacaactgaccagaagttggtttttaattgttcataaataataaattcaaaggaatatatccttcaaagcagtcaccttgaaacctgtttttcctctgatgctgctgctgttcagaacatcttgagaaatccatttggaattacttctcaccaccttaggaggcatacaggaaaatatgtcttgggattcagccctgtttgtaaccctaaattctattgccagcttgattaaattgacatttctccccagtcttggttgtatttcttacaaccacctctcaagaattgccagtgtaatggctcacacctgtaatactagcactttcctactaaggtaggaagatcacttgagcccaagagttcaagacctgcctgggcaatgtagaacttgtctctaaagaaaaaaaaaaattaattagccgggtgtggtggctcgtgcctatattcccagctactcaggaggctgaggtgggaagatcacttgagcccaggagttagattgcaccagtgcactccagcctgggcaacagagcaagacccttgtctaaaaataaaataggccaggcgcagtggctcacacctgtaatcccagcactttgggaggccgaggcgggtggatcacctgaggtcaggagttcgagaccagcctggccaacatggtgaaaccccatctctactaaaaataaaaaaattagccagacttggtggtgggcgcctgtaatcccagctacttgggaggctgaggcaggagaatcgcttaaacccgggaggcggaggttgcagtgagccaagatcgcaccattgcactccagcctgggtgacaagagtgagactctgtctcagaaaaataaataaataaaatatatatttttttaaattgaattaccacctttggtgggtattctaacagaacttgctgcagcaagtcccaagccaaaaaaaaaaaaaaagaaagaaactttttttgacaaaagaaaaaaatgaaagaaaaatttttccctcaatacaggaagactttagtggagtcaaaatttcctttgtgttaaccaggtttctgcaagtgaaattttctctttatgttaagtgaaagcttagcctgaaaacagaaatgtgaagaggcttttttagacaagttcaaaacatttgcctcagttgaaagagtcagtgtcatgaaacctcagcagtggtcctgggaggtgccacgttatggtttggaacttaatgaaggcagcagcattgatagaaatttctgtcaaatatcaccaaagtcataaatgccgtcactctaagaagaggggtttatttaactttagcatggatgtatccagcctctgaaatgggacaaataagccccgccccttctaggtactttgacaaaaacaggaacacaataaaagagcagacctctggaggctgaggcaggagaatcacttgaacccggcatgaggaggttgcagtgagccaagatcatgccaccctactccagcctgggtgacaaaagcaagactctgtctcaaaaaaaaaaaaaaaaaacagatctcacaatgatacagtcagttctcaagtggcatctgttgaagcagtggatgtcgtcacccagtattagaatatgtcttaaaccaaattaaaactttactttacacagagttttatggacacatgaagggtttcctcctgtgcccagggagcccaagaactatagaaaggccttcattgtccatcatttctgttcctgtttgggtcacttggtggctttgtctttgacttgttagttgtttctctatcttctgtgtctttgtagagaattttcttgacccacactcactgcctcaaagactagacatttgagagagtattaagtacttgaagaagacttagatctagaagcagctatgttagatgatcagacctcatacactgccacttggaagatgaggtgtggtcatggggttcagtttcagaaatgtgttctctctgttgatcgtttctggaggaagaaacatggggatgtgtttagagggaggatatgccagctacttatcataggaagtctagaaaaggcagccatagtgaggtcactatttgaaaaggagtaagaaggaatgtattgggcaggaaagagtgtgcatagactcttctaggtgaatcaggtgagctgtgttctatctgcggagaactagtgatggtggggcagaccaggcatcttcccctccacttgtcataggggtctgagaagggaaacatggggcagaattgggaatcaatctgtaacactgcttttaaactaagtgctgtatttcacattagacttgcagaactggaagatttaatgtcaattagagttaatgttgttttaccagtagaaaaaaaacgatattagaacaataacaacaaaatagtttgtgggtatctattaaattaagtttccatttgttacataaatgtaagattaatttttcaaatggcttttttttttaagctaacaaatggtatttgtctggctctagtgttaacaatttattctcttttactgaaacatcagttaagaataaccttgtattcttttatttaaaataaggctctcggccggcacagtggctcacacctataatcccagcactttgggaggccaaggtgggcagagcgcttgaggtcaggagtttgagaccagcctggccaacatggtgaaacccctcctctactaaaaatagaaaaattagctggcgtagtggtgcgtgcctataatcccagctactcaggaggctgagtcaagagaatcgcttgaacccaagaggcagaggttgcagtgagctgagattgcgccactgcactccagcctgggtgacagagtgaaactccgtctcaaaaataaaataaaataaaaaaataataaaataaaataaaataatgctctctatacttaaacccatctacccagtttctaccattaatcccttcagatatatctgtggtgtttctgaggcccagcagcactggattgaatgatgtttagccctcttgtgatgtgaagattgaagctgacaagttaccaagcattcacttcctgctgtcatcattaactgacaggagagcttacatagtctttctttcttctttcagtttctgtccatactcacttatccatttcatcttaatccctttgattgaccttactatttttatgtttataggcagaggcaggcttgtcaaaacaaaattaaaaaaagcacaactggccaggcacagtggttcacgcctgtaatcccagcactttgggaggccgaggtgggcagatcatctgaggtcaggagttcgagaccagcctgaccaacatggtgaaaccctgtctctactaaaaatacaaaaattagccaggcgtggtggcgggcgcctgtaatcccagctactcggaaggctgaggcaggagaatcacttgaacccgggaggcagaggttgcagtgatccgagattgtgccactgcactccagtatgggcaacagagcaaaattctgtctcaaaaaaaaaaaaaaaaaagcacaactaagtgttccttaatgatgggtggggttgggagcaagaggatggggacctatcttttcctcctaggagataagggttcctctctgttattagagtttgataaactgaaagtgtctgttggttggcgtatggttctttaggatgattgacagtggcagtacctggactaacgtgactttagcttcttttggatgattccctcttgtctttctgaccttaggaccttctaccgctttgaggctgtgtgggatagctctctgcataactcccttcttctgaaccgagtgacaccctatggagaaaagatctacatgaccttgtcggcctacctagaggtgaggagacttggaacttcagttgatgccaacagtcagccctgaacagtgtgcaggttacagcaggaagtggtcagcgaagattccacttgttttgtcctctttcttcctccacatccttaagtttttcattttattatacattgctaactcttctgattatattagactctattcctgggttctgtttactcaaaaaatcacatgactcattgcagcttcagctttagtagcctaatcaccattgtttgaagaatgtgtgatttttaagaaaatgtcacctcttgtttttgtagttgtggacagagtgtaatagtggttaatagcccagacccaagacccagcctgtcggttcaaatccctgtgctgccacttacttcctctatgtccttggagaaactctctttgcctcagtttcctcacctatcaggagaaacaacatttacctcagataaaaataaatgcatctctaaggagtactacctactcttgcacatattatccattgggtggctgttgaaataattggtggagctaaaatccttcagttctcacaactgggactcgctttccaaatacgttcgtgtatagactctagtcacagtactctgcctgcacttcatcagcacctaccctgtctgctttcagctggatcattgcatccagccggctgtcatcaccaaggatgtgtgcatggtcttctactcccgagatgccaagatctcaccaccacgctctctgcgtagcctctttggcagcggctactcaaagtcaccagattcgtaagtttttcacacaagttagcttccagtgtgtttgttcagtacaacagaatcattagtccttaagtattctcggcttactgtctcacggttagtttacagtttatgaaccattttggtaactgacacctggaatgtactgacttgcatgctgacatttaataaaatgttgatggatggacgagttatgagggaaggaaggaatattacattgtgaacacgtctaaaacaattttgcaaagactaaatttgcaaagacttttaaatgtcatcatcattatttctaacagagtaccattgaaattttcttctttttaagatttgttatgcatatttaaggcatacaaaatatgtcaggaataatacagtgaaggccatacacagtggctcatgtctgtaatcccagcacgttgggaggctgaggacagagaattgcttaagcctaggagtttgagaccagcctgggcaacacagaccccatctccacagaaaattttaaaattacccaggtgtggtgacacacacctgtagtcccagctactcaggaggctgaggtgggaggatcacttgagcttgggaggttgaggttgcagtgagccatgatagagccactgcactccagcctgggtgaaacagtgagaccctgtctcaaaatttaaaaaaaagaaaagaaaaaggaaaaaaaaaaaaaagaaagaaacaatacaatgaatacctgtgtatcaccgcccagcttaaaaataagtgttactaatacaatagaaggtattatacctcctactactcacaatccccagaagttgttgattatcatttcattctagtcattgtttccctcatatcgtctctcttatagtaagaaaagacaaatttttagttttcacatttatattttaaattttctagtttatcattcaattttattcaccctattgaaataaagtgtttaaaagatagagatgaggtggggcatggtggcttatgcctataatctcagcactttttgatgccaaggtggaaggatcacttgaggccaggagttcaagaccagcctgggcaacataaggagaccctatctctacaaaaaaacttaaaaattagctgggtatagtggtgtatgcctgaagtcccaactactcaggaggctgaggcagaaggatcacattagtccaggagttcgaggctgcagtaagttgtgattacatcactgcactccagcctgggtgacacagggaaaccctatctataaaaaaattaaattgagatgaaagcggactcctctaggaaaaggtatgctacttaggttcaaaataagaaaagagcggtgacaaataagaaatgcctggaattatatttgagtccctgcagagaagacactattttaagtagcagaaattgaaattttcctgtttttgtgctttaagagattaaacaattgttttattttcttcaaataggaatcgagtcactggcatttacgaactcagcttatgcaaaatgtcagacacaggtagtccaggtaagctcttgtggattgaggaggtgatagttatctttgtgtatgtttcaagtatcctgtatttaggctgggcacggtggcacacacctgtaatcccagcgctttgggaggccaaggcgggtggatcacctgagtccaggagttcaagagcagcctgaccaacatggtgaagcccccctttctaccaaaaatacaaaaattagccaggtgtggtggcgcgtgcctgtaatcccagctactcaggaggctgaggcatgagaattgcttgaacctgggaggcagaggttacagtgagccgagattgtgccactgcactgcagcctaggtgacagagtgagactcagtctcaaaaaagaaaaagaaaaaaaaatcaaattattaagtcagatttgttctgtattctttttaatgtgtttttaaactgctcttgttcctctagctaggcggagttaagcagcacttagcatttctatgtttgtaaaccgaaacatgaacaaaagttaaggttttctaatagcatttgattaatgtgagtttgagtcattttacagaatatacatggaaaacaagtcagggcccacaggcaagacttagataagtaaagaagactttgagtatgaatccaagtagcacctaattattatactatccagatagtttcttgaggaatttttttaattaatataaattcatgtatttaatatgtaaaaccagcataatactaaaaaaaattaacaggaaataatagaggctaaagttctctgtcatctgtcagccagtgagctactgagtgtgtgtatgtgtgtgtgtattcccttccgtctttttaaaaatttttatttttagggacaggatcttttttttttttttttttttttgagacagagtctcgctgtgtcacccaggctggagtgtggtggcgccatcttggctcactgcaacctctgcctcctgggttcaagtgattctcctgcctcagcctcctgagtagctgggtttgcaagcacccaccaccatgcccagctaatttttgtatttttagtagagatggggtttcactatgttggccaggctggtctcgaactcctgacctcagatgatagcccacctcagcctcccaaagtgctgggattacaggcgtgagccatcacgcccggccccatagtgtatagactactacagactatttaatatttctgcattttcacctaacatcataattttatcattttcttaaattgcatcccagtcttcataattatcaaagaatgtaaaactcagtttttaaaaacgttcagttgctttgctatttaaacaaaatcccatatatcttcagaccaaactgtcttagtttgctacgtataagaattattaattcgtggccaggcgcggtggctcacgcctgtaattccagcactttgggaggctgaggcaggtggatcacgaggtcaggagatcgagaccatcctggctaacacagtgaaacccggtctctactaaaaatacaaaaaattagctgggcatggtggcgggcacctgtagtctcagctactcgggaggctgaggcaggagaatggcatgaacccaggaggcggagcttgcagtgggctgagatcacgccactgcactccagcctgggcaacagagcgagactccatctcaaaaaaaaaaaaaaaagaattattaattcgttttgacctaaacttggaattgaattttttttctgaaacaaaaacttgtttcctcttgtcttaggtatgcagagaaggagaagaaaaatcttagatacgtcagtggcatatgtgcggggagaagagaacttagcaggctggcggccccgtggagacagcctcatccttgagcaccagtgggagctggagaagctggagctcctacatgaggtatccaggggcagggttgttcagatgcaagaactctcggacaagattgccaaagtatcagtcttcctccccgctgctgcatgtgatcatagcttttcacttttctctcctgaggtcttaacgagctttgtgtttgctatagcagtagtattgatcttctcaggtggaaaaaacccgccactttttgctgctgcgtgagagacttggtgacagcatccccaaatccctgagcgactcgttatcccccagcctcagcagtgggaccctcagcacctccaccagtatctcctctcagatctcaaccactacctttgaaagcgccatcacacctagcgagagcagtggctatgattcaggagacatcgaaagcctggtggaccgagagaaagagctggctaccaaggtgtgaatcccttcctctttgctgaacgtcttcccacaaggctccacaaactagcctctcggtttattcattttcaacacctttgttcgaggtgtttgaaggcctgtgataatactgtgaatgtagaaataaaaagacgcagttcctaccctcaacaagcttacagggccaggcacagtgcctgatgcctattatcccaccactttgggaggctgaagcaaagggattgcttgagcccaggagttaaagacaagcccaggctaacatagtgagaccttgtctctacaaaaacaaaaattaggccaggcatggtggctcacacctgtaatcccagcactttgcagggctgaggcaggtggattacctgaggtctggagttcgagaccagcctggccaacatggtgaaaccctgtctctactaaaaatacaaaaattagccaggcgtggtggcgagcgcctgtaatcccagctactcaggaggctgaggcaggagaattgcttgaacccaggaggcggagattgcagtgagccgagatagctccactgtgctccagcctgagcgacagagtgacactccatctcaaaaaataaaataaaataataaaaaattaaaaaattaaaaaatataaaggttgcagaatattaggtcacaagcatataatagagatgtgtgtttcaaatgctatgggagtcagaggagaagtgtctatggtggggagctcatgagctgaccttgaaaggatgcgcaggagggaggcagcagtgtcgacacctgcgtgatcaggagggaggcagtggtgtcctgcgtgatcaggagggaggcagcggtgtcttgcgtgatcaggagggaggcagcggtgtcctgcgtgatcaggagggaggcagtggtgtcctgcatgatcagtcttggggaattcacgtgggactggaacaggaggtgtggagtgaagaatcttgtatactgcactgaagagtttagagtggatgatgggagcaaggcagaaatatgttaaacaggtatttgtgttttagaaagatttctggcgaggggcggtggctcacgcctgtaatcccaccactttgagaggccgaggcaggtggatcacaaggtcaggagattgagaccatcctggccaacatggtgaaaccccgtgtctactaaaaatacaaaaattagccgaacgtggtggcgtgcgcctgtagtcccagctactaaggaggctgaggcaggagaatcgcttgaacccaggtggcggaggctgcagtgagccgagatcgcgccactgcactccagcctgggcaacagagtgagacaccatctcaaaaaatatatatatttctctggcagcaataaagagaatggattgatggtgaagagatacactgaggaagggagaattctttatctttattacagtaatctgatgagaaatgataaaagctttttaaaattttattttttttgagatggagtctcactcctgtcacacaggctgggatgcagtggcatgatcttggctcactgcaacctccacttcccaggttcaagcgattctccttcctcagcctcccaagtagcttggagtacaggcatgtgccaccacacctggctaatttttgtatttttagtagagacagagtttcaccatgttggccaggctggtcttgaactcctgacctcaggtgatccacccgcctcagcctcccaaagtgctaggattacaggtgtgtggacgcccagccagataaaagttttttaaagaaggcagaggtggctgggtgcggtggcacacgcctgtaatcccagcactttgggaggctgaggtgggcggattgtgaggtcaagagatcactatgatgtttttattttttatttttatctttattaaattttttttttttttgagatggagtcttgctctgtggcccacgctggagtgcagtggtgcgatctcggctcactgcagccttcacttcccaggttcaagcggttcttctgccttagcctcctgagtagctgggattacaggtgtgcaccaccatgcccagctcattttttgtaggtgttttttttgtttgtttgtttgttttttggagaggggatggagtcttactctgctgccaggctagagtgcagtggtatgatctcagctcactgcaacctccacttcccgggttcaagtgattctccttcctcagcctcccgagtagctgggattacaggtgcccaccatgacgcccagctaattttcttatttttagtagtgatggggtttcaccatgttggccaggatgatctcgatctcctgacctcgtgatccacctgcctcagcctcccaaagtgctgggattacaggtatgagccatcacacccagccagaaccatggtgtttttagtaattcactttggtaatcttgagaaaggtttttttaagccacttgctttatctttattagacatacatagaacttcccttactatatacttagttctaatttctagagctgtttgggcaacatcggagctgcactgtgggtttaggacatgttatttcccctcctgccttgtatccagggcttcatttagtcattgaggtttttgtttgtttgtttttaaatttactgatttattagaaaggacagtgcaaaggagaccaatgaacggcagatggacgaatgcatagggagaggagatgtggagcttccatgccctccccgggaactcagcccttcaggagcctccacgtggtcagctatcccaaggctcctggctgttgacattttatgttcagcttgcacttctctttctcttctttagtgcctgcaacttctcacccacactttcaacagagaattcagccaggtgcacggcagcgtcagtgactgtaaggtgagcacattgactgtaatttttagccagtatgttgataactgatttctccacagcagcccagattacctattcctggtttttgctgcttttaagcaacttgtcatgggcatagcattgtatttgaaaatttatgacatactgctctggtattcattctaatttttcagagtccgaacactgacttctgaagataaaagtactcctttgtgtctcttagagtgattatcagatgggaaacattttggctttttcatgactcctttggaggagaatattctatggggaggtggtatgttattctttgccagggtacaaggaaaccctgaggttcctggtggcataaagttttattgacttcaacaaagagtgaagtaaacacttcagagaatttctgtgttattcactcaattctagtcagcttgaccttaaaccctcccggctcattcctgccttggggtctttgcacacctactatttctttgcctggaattgcctttctccaggtattgccatggttggctcccttacctctttcatttttctactccattatcacctcctgtgagtcgactctgttaacacctgataataaatctgacagctgtctgaaactttctacctacccctctttcctgctttattttttgctatagcactaattactacctgatgctttttaaagtgtttgttgagtggtttattgtctgtcttaagctccagggaggcagatcctctgccatattattagaacaatgcctagtacatggaaggtgcaccactgtaataccacttatattaattcaggggctgggtgtggtggtgcatacctgtaatcccagcactttgggaggccaagatgaggggatcgcttgaggccaataggttgagaccagcctgggcaatatagcacaaataccctatctctacaaaaaaatttttgaaaaattagccaaatgtggtggtacacacctatagtcctagctactcaggaggccaaggcaggattgcctgagcccaggagtttgaggctgcagtgaggtatgattgtgccattgcaccccagcctgtgtgacagtatttttttgtctcttaatgataacggactggggggctggctgcggtggctcatgcctgtaatcccaacactttgggaggccaaggcgggaagatcacctgaggtcgggagtttgcgaccagcctgaccaacatggagaaaccccatctctactaaaaatacaaaattagccggatatggtggcgcatgcctgtaataccagctactcaggaggctgaggcaggagaatcgcttgaacctgggaggtggaggttgcagtgagccaagatcgtgccattgcactccagcctgggcaacaagagtgaaactccgcctcaaaaagaaaacaaaaaacaaaaaaacccccaaaataatgggccaggcatggcggctcatgcctgtaatcccaacactttgggaggccgaggtgggcggatcacctgaggttgggagtttgagaccagcctgaccaacatggagaaaccctgtctctgctaaaaatacaaaattagccgggcgtggtggcacatgcctgtaatcccagctactcaggaggctgtggcagaattgcttgaacctgggaggtggaggttgcggtgagccaagatcgcaccactgcactccagtctgggtgacagagcgagacttcgtctctccaaaaataaataaagataatgcaggagaggccagtgacagtggctcacatctgtaatcctgccagcttgggaggtcaaggtcgatggatctcttgaggccaagagttcaagacgagcctgggcaacatgacaaaaaccccatctccacaaaaaaatacaaaaattagttgggtgtggtggtgtacacctgtagtcccagctactcaggaagctgagatgggaggatcacttgagtcctggaggctgaggctacagtgagccaacatcgcaccactgcactacagcctggtagacatagcaagaccttatctcgaaaaagaaaataataataataataataagaagaagaagaagaagaagaagacatagcaagaccttatctcgagaaagaaaataataataataataataataataatgacaacaataataataatgcaggagggcagtaggaacataaaaaaccaaccttgccccttttataaatgtcttgattcctggtgtggcacttaggccgtaaaatatttgtaggcttgttttttttcttttttgaaaatattttcaccagttgtggtggtacacgcttgtagtcccaggtactcaggaagccagggcacaggaggatcgctggagcccaggagttggaggccacaggaagctaggattgcatcactgccctccagcctgggcaatagagcaaggccttgtctcttaaaattttacctatgtatttatttattgataaattatgtataggcttgttttcttaaatgaccttctgaaacaagatgtatcaaagtgaggttctggttgttgaaactccctattgttactgtagaggcagcttttttcagctgaatgtaacttgtagtgttcggtttgcttccagttgtctgatatctctccaattggacgggatccctctgagtccagtttcagcagtgccaccctcactccctcctccacctgtccctctctggtagactctaggagcaactctctggatcagaagtaagtacccagatttcactgagagaagtcaatctaagaaccaaggtaaatgtcaaccttcctctagctcaatggttcttgactgaaggcagcaccttctccctaggcagcatttggaaatgtgtgggagcctttttggctatcacagtgactggagaggtgctagctactggcatctcttcacatcatagcttactaaccttctgcatcatcaactcatcatgactgtcttcttcatccctttctgctagttttatcctccattcctacccctgcttgtctccccagtcataataccagacataggaagtgctatcttgggaaaaatattttgaaactgttttggaaaaaaatattttgattccacagcaaattatgtaggtaagaaaaataaagacaaggccaggtgaggtggctcccagcactttcggatgccaaggcaggaggattgcttgaggctgggagttcgagaccaggctgggcaacatagcgatatgctgtctctacaaaaaataaataagatacccaggcgtggtggtctgtgcctgtggtcccagctactcgggaggctgaagtgggaggatcgcttgaatccaggagttcaaggttgcagtgaggttttattattgcaccactgcattccaccctgggcgacagagcaagaccctgtccctaaaaaaaataaaaaaaagacaaatgtagtctagagtccatgattcatcatcataatccgttctttgcaacacaccctcttgtgcatctccatcaattatgctcacctggttatcatccacctgtctatcttattgtaccaacactgacacaggcaaaggtggctggagaaaataacacaaccaggtaatttcattaaatttaggatgccacagactgtagggactattctgtgccactaagagaagaagaaaaagcactgacaactaacttaagcatgccatcaattataagatgaatcccaatttaagaaatggtggctgagtgcagtggctcatacctgtaatcccagcactttcaggggctgaggtgggaggattgcttcagcccacaagtttgagaccagcctgggcaacatagggagacccccatctctacaaaaaataaataaaatagttggacatgatggcatgcgcctgcggttccagctactcaggaggctcacatgggaggattgcttgagcccgggaggttgaggctgcaatgagccatggttgcaccattgcactccagcctgggtgacagagcaagaaatcagccaggcataggggcatgtacctgtaatcccagctactggggaggctgaggcaggaagattggttgaacctgggaggcggaggttgcagtgagccgagattgcgccgctgcgcgccannnnnnnnnnnnnnnnnnnnnnnnnnnnnnnnnnnnnnnnnnnnnnnnnnnnnnnnnnnnnnagtagctgggactacaggtgcccgccaccacacccagctaattttttattttattttatttatttatttacttttgagatggagttttgctctcgttgcccacgccagagtgtagtggtgcaatcttggctcactgcaacctccaccttccagcttcaagtgattctcctgcctcagcctccaaagtagctgggattacaggcacccgccaccatgcccagctatttttttttttatttttagtagagatcgggtttcaccattttggtcaggctagtctcaaactgctgaccttatgatccacccgcctcgacctcccaaagtgctgggattacaggcgtgagccactgcacccggccacacccagctaattttttgtatttttagtagagatggggtttcaccgtgttagccaggatggtcttggtctcctgacctcatgatctgccagcctcagcctcccaaagtgctgggattacaggcgtgagccactgcgccggccttttttttttttttttgagacagagtctcactctgtcgcccaggctggagtgctgcaacctctgcctcccgggttcaagtaattctcgtgcctcagcctcctgggtagctgggattacaggggcctgccaccacgcccagctaatttttgtatttttagtagagacggggtttcgccatgttggtcaggctggtctcaaactcctgacctcaggtgatctgcctacctcggcctcccaaagtgctgggattacaggtgtgagccactgcacctggctaacttgatttcaaaaaaaaaaaagaatgaagtatgagaaaaagttaaaatgggctttttagatttagtgagatacaatgctatgttactctacaaagatatctagcaatacagagtataggaatttatttctcacacagtagtcaagagggctggtccaggtccaggtcagtggtgcaggtcttctctgcacagccgttcaggaaccctgggtcttcccatttgtttgctttttctgccattttctaaggcagtgggcctctgagacttcagtgtacatcatcatcccctgggaggcttgttgaagcccccatggctcaaccccacccaaagtttctcgttccgtaggtctggcttggagtctaaaaatttgagtttttgaacagtttcccaggtgaagctgatgctgctggctgggagcacactttgagaaacatcgcttttggtgtggccatgggactaaaaagaaacatataaaggagtagagttcctattccagataatgtgttcagagggctttaatataggcagagagattgtgtgacccagtggccatcaatgatcaatttcctttcataacttcagaaggatgacaccagttgaacgcagagttaactttctgaagccagcttgtctcctcagctgagctctctgcaactcaagtttgcagctggggtttagggagggccattgtgttcctcccagtgaaacagtactcagtatgccttgattgtaactgattctcttgttacccttttctttctaatctctctattttaaaggaccccagaagccaattcccgggcctctagtccctgcccagaatttgaacagtttcagattgtcccagctgtggaaacaccatatttggcccgagcaggaaaaaacgaatttctcaatcttgttccagatattgaagaaattagaccaaggtgagtactatattgagcaggaatgccagctataaaaaacaaatccacaggaagaagtgactggccagctcttccctgtgaggtctgtactgtagtctgatgcaatctgtactgtagtctgatgcaagttgagtctggggtgagagggccagcctgggtttctccagttgggtctcataatgcatctgcaccctggcgcagcatgttgccatggcacggtttcgcttttgccgtattactttggcagataagattctaggccaaataggtcatttgcctgtttcatcgaatctaaggacttggcctaagtgtggcgtattttgatggtcctcagcacgattattttctttttgtgagaaactaacttttgtcatattgtcgtttttagctcagtggtctctaagaaaggataccttcatttcaaggagcctctttacagtaactgggctaaacattttgttgtcgtccgtcggccttatgtcttcatctataacagtgacaaagaccctgtggagcgtggaatcattaacctgtccacagcacaggtggagtacagtgaggaccagcaggccatggtgaaggtccgtcctgccctgccttggtttcttattgccacgtgtgcccttctcttttgatttctgcactctctgttacgtggtgtgaaatttccctattctctctggttttgaacttcctttgtgaagtgctatatgccttgggaatatggcaaggcagtccccattgctgtctctgtagtaactttcttgtctacctgcatttttctttcagacaccaaacacctttgctgtctgcacaaagcaccgtggggtccttttgcaggccctcaatgacaaagacatgaacgactggttgtatgccttcaacccacttctagctggcacaatacggtaagaagttttgttgttgttgttgttgtttttgagacggagtctcactttttctccctgaagtgcagtggcttggtcttggctcactgcaacctccgccccctggttcaagcgattctcctgactcagcctccccagtagctgagactacaggcacgtgccaccattgcctggctaattttcgtattttttgtagagacggggttttaccacaatggccaggctggtctcaaactcctgacctcaagtaatccacccacctcagcctcccaaagtgctgggattacaggcctgagccactgcacccagcctagaagttgttctgtgttttctttctctctttggcttttggcttcaggaatatcaggataaataggaaaggaagaatttttcttttcttttttcttttcttgtttttttttttttttttttttttggagatggagtttttgctcttgtgtggcccaggctggagtgcagtggcatgatatcggctcaccgcaacctccacctcccaggttcaagccattctcctgcctcagtctcctgagtagctaggattacaggtgcccgccaccacacccagctaatttttttttttgtatttttagtagagatggggtttcaccatgttggccaggctggtcttgaactcctgacctcaggtgatccaccctcctcggcctcccaaagtgctgggattacaagcgtgagccaccacatctggcttgaaaggaagtatttttcaaaataaatttaaaagagaggaaggacaggagtgtaaattggttgtggggtggtaatgaggcctctgcatcttgtaaggcattgtcatgttctgaaccaccagggatactctggtcacacatgtgcaccaattattttccttcttggtctttttgttctcaagagttctaaagatggggctcaggggagagagtaaagggaggacagtgagaaccttaatggtctcccaacctccagccctgtgattcagcctcacgttctgagggcttgtgtcacagggtcccggagtagacggcttagaggactaggcctgcggtgccaaataggaagatgctccaggagggagcctcagagggagaggactgtgaggggacaagacttgtacccagacttctaatcctacctccccgtttgtcccccataggtcaaagctttcccgcagatgcccgagccagtcgaaatactaagtgactctgccgagtgccctcactcgccttcgagagataaagaaagcgttacctctcatttctctttgtgattcttgacggtgactcttgtatgtaatcctgtggcttaactacttctccctccttgtccagcacttttctagctctcccgttccccatctccattgctctgtactcttttcttttttcttgtgctgagaatctcgttagtagcatgtggcctaacaaaaggaaaaaatgtttttaaacacacacacacacacacacacacacacacacatacacagacaaaaacacaaaaactctgaggggatctggtgaatctccaaattattgtgggtgtactttggcttccttttgtatgataggtccccatcatgaccacctctgatgtctgtgctgctgtcaccaggcacctttgtttttcaagacaacatactttttttttcttttctctgtttgtgatatcactttaatttttcttgggtggcttagagactaagggaggagacatctggcctttttagaacctgagaggaaaaaaagagtctttttttcccctctgtctctttttgccatggctaatccctgcatttccattcagggaaaaggtggtagtgagcatagaactgcaacagttatattctgagtcaaagttggggctttttacggcataattatggaatttttatttactggtagagaggagacgagaggctttttcagtgggcctgggacagtggctgctcttgactttgtgtgaagggaaatgccaaggatgcttctggtggacttcaggggaccccagggtttggccgtgggccgtgatggcagcaggcggtgggatgcttgtagctcctcacagcaggattcctgcccactgttttttctctgttgggagggaagctcttttctaggagtgtctcagttctgcttttggcattagtgatggtggtggtacagttggaattagtgccatgtcatacacaaatgttccacaaggcgggagtgtttcactttctggtgataaacttgatggtcattgttatgattaagataatgccgggcaggccgggcacagtggctcacgcctgtaatccaagcacttggggaggccgaggcgggcagatcacgagatcaggagttcaagaccagcctggccaatatgatgaaaccccgtctctactaaaaatacaaaattagtcgggtatggtggcacatgcctgtaattccagctgcttgggagcctgaggcaggagaactgcttgaacccaggaggcagaggttgcagtgagccaagatcgcgctattgcactccagcctgggtgacagagcaagactctgcctcagaaaaaaaaaaaaataataatgctgggtagtgaccttgtgattgttacagctccctttgatcaaagaaatatagctttcaggcataaacctggaagtctccctctgaatccagcagttgttttcattgatgcttgtcaggttgaagatgctttcagtgatgctctctatactcataaataagcaaatgtggcaggctttgctttctggatcccaggattaaaactaaccgtgaccactactccaaacaaaacacaatatgcctaggggcacggatgaacgtccagggagcccgggccccaggctttgttgcgtgttccctgctcctctccatctggtgtggaaacactgcccagggagaaaggaggaagctcactgtggacagtcttctttccttctgacagaccaggtcatctggcttccgagatcatcagagaagataagtctgtctctttcagctgccagtaagttttccaggatgagaggggaaaaagaaagcctccagtgacttcagttgctttgccagttgtcttgggattgttttacaccatcctttacttcccttgctcagacctctctgtttcaccattgctcaggcattcaggaaagtatctgctcactcccacttggtgagtcctcggccttgaggttgctgactctcaggcgttaggcagctggatgacttcccgcttcacgcagcaaaggccaggggcttgcgcgcctctgcagagttgttgctagggagacttgtgtcatcatccacaaccttgtttctcacttcctggttgggctcatctctgaagaacaggtctcccagcttcgctccttatcactgcattgtgaagaggaggaaaagtgaatcacggagagagaaaggaaaggatagaatcacaggctgcgtctgcacctgaaaagtgacccgcggaaactctatggcggattttttttttaactttcttcttcctgttaaaacataggtcactaactgtgatgttatttgttttctaagtggtatgtgagattttctaatgtagttagaagtttcattgtctgatggacacaatatgcccttccggttctattcaaaccagcaggatctgtcggtgcttagagatggctgcctggactggaatcaaatctaatttcagggaaatgaagatggaatttgaaggtcacttttaaaattaagtcattgatgctgctgttacagagtgtgacagaggatccatgtctgtgacacaggacggtgggaagcctgagagagagtgaaattatgtgatacactgaaatgacttttgtttttcttctaactcatacaaaactggtttggaaagtctttgctttggaagcgtcagacattagaacaggccaaactggactgtctgttcatagcgtgcctgaataagaaggcctcttagggagccagagggagcagagtggtcgtgtcctgcgtgctcttcaccctctggggcgcccctgctgcggctggcaggtgcagacagcctttgctggtccccagcacgtccagggtgggtgctcccttgcccgacagaaccatccccactgtgaggctgtgagagatttgtggcaggaactgtttatgaggctctagttgttgctgttgtggcgggaaagttaagaaacatagcccttaaggaaaccacctttatgtattttcttaaagcacgcctttaaataagcaaaaactttaaaaggcaggaaagagaattcttaggcaaattcagagaaataagtgctagttaatactaatcacctcctcctctgtctctcatcctcctttctcccatcaaagcaaaatatggcctcaccaccagccccaaatcagtgctcagaccctctctgtgtctgtgtgccctcctgggagtcagtcagcgctcaggccaggactgtgcagggccagccagcccatgcgctagtcaggagcacaggcaaggggtgcttgtggcagtggccgggcacctgagccccagctcgttgttaaacgtgctgacggcaaggggcaatggagtgagtttcccaactaagaaaccactattatatattttttcccttcagtcacatagacttcagacaactctcctattttttatggatttttcagctcatttcagatgaaggaactaagtcattgtgaactgtctcttgagatctaaaaacaagatgacttttcctggcacatattccaaagcaaagactttgttgcctgctgcttattgtctaatttacagggatatttaattttgtcaggtctatgtatatttatccagctatacttacttgcacagtggattggagagaaaggattctccagtgtgcacactcatcggtactctttctgcatttccctcgtgctgtgtcccgctcgggttccaatggacagtatcagggcttgtttgacttaggtctttcagttttcctttcggttcccttttaaaaatgtgattgttaacctgcctcttgaaagattcaaccgggtgtggtggctcacgcctgtaatcccagcacattgggaggccaaggcaggtggatcacctgaggtcagaagtttgagaccagcctggccaacatggtgaaaccccgtctctactaaaaatacaaaaagtagccaggcgtggtggcgtgtgcctgtagtcccagctacttgggaggctgaggcaggagaatagcttgaacctgggaggtggaggctgcagtgagttgagactgcaccattgcactccagcctgggtgacaaagcaggactccgtctcaaaaaaaaagaaaagattcatgatgctgctgctcccagaaggtttgctggatgtgtttacataggactctaacttgtgtgcactacagttgttcaccagggccagtgattcaccccagtgtgtggccagaccatgactgtgtagcaggaatgttttaatttgtgcttccttagtaaattgaaatatcagctgagagattatttgctgctgttattcaaaaggccatttatgaagttagtatttgagccccataagatctttaaaaagcctccaatcatttaaaggaagaaatcagagttgctataaaattcagtaaaaagctcatagccaaacggctgtgctcagatggaaagtctgagctgaggttggtctcttgccaaaccgtggctgttgtgtgttgttcttcatgtcttcgagttcattttttttcattctgcctattctggcatcagctcacttgaggagtccctcagccttcttgtatttaaggcatcgtcttagactttgtggctctaaagtacctgtctgttgagatttcaagtctcttgtcaccatcctcacacatgacaacaaaacccataatgcataagtggcctttttgaaccaagactttgcaaactgatctctcccccgtgaaggagttgagcacattagcaacaatgtacattaattttggattttcattttcatgttttattttgtaaatattatctgatgtttggagcttgagtatacagactgtaaatatagttcttgtatttgtactaattctgattcttttgctgtatagccttagatgtgcaatgcagacactatctaactgtgtgtggtaaccttgcgtcacggagctgttagtgaacgaggtaaaaataataaaggtacagccagtgcatcagaaggttctcgatgtgcatttattcttgcaccccttgaaaggtaattgcacaaagatttcttttcttgatttgcaaagataatacctttctaagacagaagtcacgatatcatcgcttaagtattcctttctgatattcaaaatcgtggtttttatataaccaagaaagctaatatggtgctgtttctttgaaagtacttttctcccaaagatgtaagtggttattttagctagaagatttgttgtttttctcctgaagcctccttgtatgccttccaataattctgtagtgttgtgttggcttctttttttttttttttttctttttgagacagagtcttgctctgtcacccatgctggagtgcagtgatgtgatctcgggtcactgcaacctctgcctcctgggttcaagcgattctcctgcctcagactcctgagtagctgggattacaggcgtgcgccaccatgcgtggctaatttttgtattattattattattattattattattattttatttatttatttatttattttgagatggagtctcactctgtcgtccaggctggagtacagtggcatgatctcggctcactgcaactttccacctcccgggttcaagcgattctccctgcctcagcctcccaagtagctgggattacaggcatccatcacgcctggctgattttatttttagtagagaggggtttcactgtgttggccaggctggtctcaagctcctgaccttgtgatccacccgcctcagcctcccaaagtgctaggattacaggcttgagccaccgtgcccaacctataattatttttttgagatggagtttgactcttgtcacccatgctggtgtgcaatggcaccatctcagctcactgcaacctctgcctccccagttcaaacaattctctttcctcagcctcccaggtagttgcaattacaggtgcccgccaccacacctggctaatttttaaaaatatttttagtagagacggggtttcagcacattggccagactggtctcaaactcctgacctcaggtgatccgcccacctcggcctcccaaagtgctgggattacaggcgtgagccaccgtgcctggccatgttgggtttttttgggtggggaagggtaaatggggatttgaaaagttgaacatgtcaatttaatttaacaagccctcatcacgagcagagcatgagcaggggccactgtcctgggtgtttggggagaaacagaagaagggagggaggagcagccctcaggttaaaagcaatgatttgttccaaccaatatttgagtacccaccctgtgcctggtgtgctgctgggtgcagtaattcagcagccaacaaagcaagcccatgcacttgtgccctcccattccagtggggaagacaatgtttaaacaaatttacaacatcggtcctaagtattttggaggaaagcagctaaataaaaggatgaaagagggatgggaacgagggatgtttagatggcatagtcagggaaggcctctcttcggagatcacatttgagcagactctagaatgaaaggatagggtaagccatgcaaacccctgggcaaagaggtctccaagtagagaaatgaagcccttgaggcagcagtgtcctcagtaggttccagaaatagcaaggtcgctggtacagagtcagggactgggagcgcaatagaagacatcagaaagtagccagggaccaggatatttagggcttaggtgaggacttggaatttcattagagtgaatgggaagccattgaaggctttggagcagaggagtcacaggggcttatttacatttttaaaagaccattctggaaaacagtctttgtactcaggcagggacaagtggaaaaaaggggcaaaataagattgttaccccagtattccaggggaggagacggtggctcagactaaggtagtagagtataggtgggacgaaatgggcagattcaaggtacattttgaagttagaacagttttctgagagacttcatgcagagttgttggagagaaaggagaaaagtaactaaaagggtaagtgcctgagtaaaagaacagcattgcagttttctaaggtgaagacaattggtagaacaaaagctgagaatggtcatgcctgtaatcccagcactttgggaagccaaggtgggaggatcactggagcccaagacttcgagaccgaccagcctgggcaatgtagtgagaccccatctctacaaacaattaaaaattagctgggcatgatggtgcacgccagtagtgccagatacccaggagactaaggcagaaggatcgcttgagcccaggagttggaagctgcagtgagctgtgatcttgccactgcactccagcctggtcaacagagttgagaccctgactgttaagaaaatagcactttgggaggccgaggcgggcagatcacctgaggtcaggagtttgaggccagcctggccaacatggtgaaaccccgtctctactaaaaatacaaaaattagcggggcgtggtggcaggcgcctgtaatcccagctatttgggaggctgagacaggagaaccgcttggacccaggaggcagaggttgcagtgatctgagatcacgccactgcactccagcctgagcaacagagagcgaaactgtctcaaaataataataataatttgatttgagtcatgttcactttcagatgccaacacatgcacctaagtgtatagtcaacaaaacagttggctggactagcgggattcaaggggagtggttggagctggagacacacatttgggagttggcggcatgaagatagcagatcgagcctcaggcagggaaggagacctggagcgtgtgtgtggctgacaggaaccaaggactgatcttggagcttggtgcgctccaacacatggaggtcaggaagagagaggagtccagccaggaggacaagcagtggccgtggagggagagtgtggaagactgaggaagtggttgctttgtccagggcagccaataggttacaggaaggactgagcagggaccacaggttttgttaactgaaaggtgtaagaagtccgagggagccaggggataccctaatttttcccaatttcagaaccaattaagaaacaaaaaataagacgatgggagatgggagaccaaaataccacccttattactgataaaactgctgttagaaaatgtggttacatctgggaacactggatttcttttcttttcttttttttttgtgatggcatctcgctctgtcgcccaggctggagtgcagtggtgtcatcttggctcactgcaagctccgcctcccagattcacaccattctcctgcctcagcctccccagtagctgggactacaggcacccgccaccgcgcccggctaatttttttttttgtatttttagtagagacggggcttcaccatgttagccaggatggtctcgatctcctgacctcatggtctgcccgcctcagcctcccaaagtgctggaattacaggcgtgagccaccgcgcccggcctggatttattttgtaaggctgaacctcagaatgaggcggtttagagcagtgcttcttgaactttattgtgcaccagaatcccctggggatcgtactaaaatgcaggttctgattgagtagggcttgggtggagcctgagattctgcttttctaataagcttccaagtgatgtcagtattgccattgtggggatcactctttgagtagcagaagttaagaggaacgcagcgcatatgtcccctgaaggcagccgaggttctgagagagagggaggaagtggccaggcagtctatgcctaaccgctccttccagactcacaggaacattctagtaatggggctcacttctcatggagggaggcatcaggagtgcttctacactagcaaggtcattggtgaggggagcatttgtttgagtggtgcctaattggagtaggttctagggaaagtgggaggagaggagggtgaaacagtacaaacaattctttcatagatttttctgtaaaagggaaaagacaaatggagtaactggaaggggatatggggtaaaggagaggcttttgttttaaagaagggaaatagcatagcttgtgcatgtactaattggaaaaaatgaactgggagggaaaacctggcagtggggaagacagtgaggtggagagagttgtggagtgggcctgagggactgggggccagtgcacagcagagaggtaggtcctagatccaactgagcaccctggcttatatccacagtgctgccgacagctcagtgataggaacactgcaagtctctggattgctaggactcttcagtcttaagttaatgtctggctgggcgtggtggctcatgcctgtaatcccagcactttgggaggctaaggcgggtggatcacctgagctcaggagttcaaaaccagcctggccaacatggtgaaaccctgtctctactaaaaatacaaaaattagctgggcatggtggtgggtacctgtaatcccagctactcgggaggctgaggctggagaatcacttgaacccgggaggcagaggttgcggtgagccgggatcacaccattgcactccagcctgggctacagagcgagatttttgtctcaaaaaaaaaaaaaaaaaaaaagttagttaatgtcagctctagggcttatgtcaggccacgtcttcctgaaactggacttgcagtttaaaatgggagatcatccccgaatcagtgcatattatgctggttgtgccctcaactagacctcacccaggagcatgtaggattgaatcctcactagggttgcacgcttagtaaatccccatgtctcttgcaaagctgatagtttgggaagtcaggtgacccatggaagcatgcatgagtctggtgcgctgcttttcttttgttgttgttgttttgagacggagtcttgctccgtcgcccaggctggagtgcagtggcacaatctcggctcactgcaagctccgcctcctgggttcacgccattctcctgcctcagcttcctgagtagctgggactacaggcgcccgccaccacgcctggctaattttttgtatttcttagtagagacagggtttcaccgtgttagccaggatggtcttgatctcctgaccttgtgatctgcccacctcggcctcccaaagtgctgggattacaggtgtgggccactgcgcctggcccgggctcgtgcgctgcttttctatctggttcttcttgttattccacttgcggttggatggggagatattccactttcccttaggaactcttgtccctgcacagaccattttagctattctgagcacatcacaagcatactcctctggggtgagaatatatagcctctgggctttttcagaattgctccttctgctactctggaagctaacgtggaatgattgcttgagtccagcagttcaaggccagcatgggcaacaaagcaagaacctgtttctttaaaaaaaaaaaaaaaaaaaaaaaaaggcggggggagcaggcatggtggcttacacctgtaatcccagcactttgagaggccgtggcaggaggatcacttgaagccagagctcaaaaccagcctgggcaacttagtgagcccccatttctacaaaaaataaaaacaattaactgggcatggtggtacacacctgtagcctcagctactcaggaagctgagatgggaggatcccttgagcccaggagtttgagactgcagtgagctatgatggtgccactggcgcctgggtaacaaagcaagaccctgtctcaaaaaaaaaaaaaaaaaaaaaaaaaaggagctgggcatagtggcatgtgcctgtaaatgaaaggcatcatttcatgcaagctcctctgagcccaggagttccagcctagcccaggcaacagggcaagaccacgtctcaaaaaaaaaaaaagtactctttccacctaaaatatattcaggtcatttgagttcagtttgagttcagctacgagaattatttagttgagtgagtgtcagagctgggattttcaaatctgcccttactggtatgttgctttacacaccctcttacgtaaatcaaactaggattccaccctgggaggtttgcatagagggctgttcttgtagaacttgtgctcatgctttgatttgggatttggggagttagggcaagccagaaagtttttctggtggataataatgtgggttgactttcttaagcattttaagccaagcacttgagtttctaacaactaaaaagctaagtcagcctgacacagctctagcgcgccctggcttgattctgttcatccccagggggagacttgcctttgttccagtcctgctctcccaagccagcttactgtagttttccagcaattctgagaagcagtattttttactgctgattagaaccttaacatggaaatggaaagtttgtgtagcatgtaacattattagaagggaaaacatgactatatgattagatacatattgattttatgcaatatgtttgcataaaatctcttcagtagtaacttggttaaattattcacattgactcagcataatttctcccttgctaaatctcagactaaagcaatcaatttgttcctgcaagaaagtctgatggtaggctttccttgtaactgagccccatagaaagaggaagcagctgcaacaaagttgaaaaggatgcctgtcaccaaggttcttttaagggagccattgtgtgaagttctacttgtgaaatttctgcaagtactgtttgttctccaaaatccagctttccgttgaaagtcaatgaaacatctctaaaatgcagacatacccaggttcattgggaacacagtcactgtgagtatacatgattatgtcctgctaaccctattgggaaagaatgctgggcttggccctagtaagtagacttgggttaaagttcacctccgccactaactagctgggaagttcaacttccctgagctgagtttgtcacgttagagaatattaataaatatgaaaattgtggagcagtcttaagtttaaaaggaactttcatggacattagctcattttgctgtgcccaccctgggaaggaagcaggacaggcaggcagtggcatccctgtcgtcaagcagcctgaggactgctgtgagcctctggagcaaggcaggagtttgaggaggctctcagtccttttgtcctttttttgagacagagcatcattctgttgcccaggctggagtgcaatggcatgatcttggctcactgcaacctctgtcccccacccttaccactgggttcaagcaattcttaggcctcagcctcctaagtagctgggactacaggatgcaccaccacgcccagctaattttgggggggttttttttgagacgagtttcactcttgtggtccaggctggagtgtagttgcgtgatctcggctcactgcaacctctgcctcctgggttcaagtgattctcctgcctcagcctcccgagtagctgggattacaggcgcccaccaacacgcctggctaattttttgtatttttagtagagacggggttttgccatgttggtggtctcaaactcttgacctcaggtgatccacccgcctcggcctcacaaagtgctggagttacaggtgtgagcctgtgtgtcctttctattgaggcttctctccacattttctgatcctcagtctccttatttcctgtaaggctgaggtcccaaatccagcctgtgaaagagaaatgccagcagaggcagcacccagcacaggatctattattgcagcatgccctgtggtcagggccttcagtaaaagcccacagaccctgactactttctggcggactctggaggaaggccttaaccacagacaaaaggacaaggacagtgctgtggagggactgctggctgctgcagcgtgaagagaatagggaatgcactctacaaaaataaaaaagcataaaattggaaaaaatatataccaaaaacatttcaaggttctggacatcaaccaaaggcaggcaaattaagaagcatttattcttgagaaaaaactggctgggcacggtagcttgcacctgtaatctcccaacactttgggaagcaaaggtgggaagttggctggaggccaggagttcaaggccagcctatgcaaccaagcaagaccctgtctctacaaaaaataataatgaataataaaaagaaaaagagtggctcacgcctgtaatccctgcactttgggacgcctaggcaggtggatcacctgaggtcaggagttcgagaccagcctgaccaacctggtgaaacccatgtctctacgaaaaatacaaaaaaattagccaggcatggt

SEQ ID NO: 750 - DNA, 8406 bp, Homo sapiens
ttccctagttatgtgaagaactttttgagaaaatcaatgacaactgtaatgaagaaatgtcttactctgtagaggtgagctacatggaaatttactgtgaaagagtacgagatttgctgaatccaaaaaacaagggtaatttgcgtgtgcgtgaacacccacttcttggaccctatgtggaggatctgtccaagttggcagttacttcctacacagacattgctgacctcatggatgctgggaacaaagccaggacagtggcagctacaaacatgaatgaaacaagtagccgttcccacgctgtgtttacgattgttttcacccagaagaaacacgataatgagaccaacctttccactgagaaggtcagtaaaatcagcttggtggatctagcaggaagtgaacgagctgattcaactggtgccaaagggactcgattaaaggaaggagcaaatattaataagtctcttacaactttgggcaaagtcatttcagccttggccgaggtgagtaaaaagaagaagaaaacagattttattccctacagggattctgtacttacttggctccttcgagaaaatttaggtggcaattctcggactgcaatggttgctgctctgagccccgcggatatcaactacgatgagactttgagcactctgagatatgcagatcgtgcaaaacaaattaaatgcaatgctgttatcaatgaggaccccaatgccaaactggttcgtgaattaaaggaggaggtgacacggctgaaggaccttcttcgtgctcagggcctgggagatattattgatattgatccattgatcgatgattactctggaagtggaagcaaatatctgaaagattttcagaacaataagcatagatacttgctagcctctgagaatcaacgccctggccatttttccacagcatccatggggtccctcacttcatccccatcttcctgctcactcagtagtcaggtgggcttgacgtctgtgaccagtattcaagagaggatcatgtctacacctggaggagaggaagctattgaacgtttaaaggaatcagagaagatcattgctgagttgaatgaaacttgggaagagaagcttcgtaaaacagaggccatcagaatggagagagaggctttgttggctgagatgggagttgccattcgggaagatggaggaaccctaggggttttctcacctaaaaagaccccacatcttgttaacctcaatgaagacccactaatgtctgagtgcctactttattacatcaaagatggaattacaagggttggccaagcagatgctgagcggcgccaggacatagtgctgagcggggctcacattaaagaagagcattgtatcttccggagtgagagaagcaacagcggggaagttatcgtgaccttagagccctgtgagcgctcagaaacctacgtaaatggcaagagggtgtcccagcctgttcagctgcgctcaggaaaccgtatcatcatgggtaaaaaccatgttttccgctttaaccacccggaacaagcacgagctgagcgagagaagactccttctgctgagaccccctctgagcctgtggactggacatttgcccagagggagcttctggaaaaacaaggaattgatatgaaacaagagatggagaaaaggctacaggaaatggagatcttatacaaaaaggagaaggaagaagcagatcttcttttggagcagcagagactggactatgagagtaaattgcaggccttgcagaagcaggttgaaacccgatctctggctgcagaaacaactgaagaggaggaagaagaggaagaagttccttggacacagcatgaatttgagttggcccaatgggccttccggaaatggaagtctcatcagtttacttcattacgggacttactctggggcaatgccgtgtacctaaaggaggccaatgccatcagtgtggaactgaaaaagaaggtgcagtttcagtttgttctgctgactgacacactgtactcccctttgcctcctgaattacttcccactgagatggaaaaaactcatgaggacaggcctttccctcgcacagtggtagcagtagaagtccaggatttgaagaatggagcaacacactattggtctttggagaaactcaagcagaggctggatttgatgcgagagatgtatgatagggcaggggagatggcctccagtgcccaagacgaaagcgaaaccactgtgactggcagcgatcccttctatgatcggttccactggttcaaacttgtggggagctcccccattttccacggctgtgtgaacgagcgccttgccgaccgcacaccctcccccactttttccacggccgattccgacatcactgagctggctgacgagcagcaagatgagatggaggattttgatgatgaggcattcgtggatgacgccggctctgacgcagggacggaggagggatcagatctcttcagtgacgggcatgacccgttttacgaccgatccccttggttcattttagtgggaagggcatttgtttacctgagcaatctgctgtatcccgtgcccctgatccacagggtggccatcgtcagtgagaaaggtgaagtgcggggatttctgcgtgtggctgtacaggccatcgcagcggatgaagaagctcctgattatggctctggaattcgacagtcaggaacagctaaaatatcttttgataatgaatactttaatcagagtgacttttcgtctgttgcaatgactcgttctggtctgtccttggaggagttgaggattgtggaaggacagggtcagagttctgaggtcatcactcctccagaagaaatcagtcgaattaatgacttggatttgaagtcaagcactttgctggatggtaagatggtaatggaagggttttctgaagagattggcaaccacctgaaactgggcagtgccttcactttccgagtaacagtgttgcaggccagtggaatcctcccagagtatgcagatatcttctgtcagttcaactttttgcatcgccatgatgaagcattctccacggagcccctcaaaaacaatggcagaggaagtcccctggccttttatcatgtgcagaatattgcagtggagatcactgaatcatttgtggattacatcaaaaccaagcctattgtatttgaagtctttgggcattatcagcagcacccacttcatctgcaaggacaggagcttaacagtccgcctcagccgtgccgccgattcttccctccacccatgccactgtccaagccagttccagccaccaagttaaacacgatgagcaaaaccagccttggccagagcatgagcaagtatgacctcctggtttggtttgagatcagtgaactggagcctacaggagagtatatcccagctgtggttgaccacacagcaggcttgccttgccaggggacatttttgcttcatcagggcatccagcgaaggatcacagtgaccattatccatgagaaggggagcgagctccattggaaagatgttcgtgaactggtggtaggtcgtattcggaataagcctgaggtggatgaagctgcagttgatgccatcctctccctaaatattatttctgccaagtacctgaagtcttcccacaactctagcaggaccttctaccgctttgaggctgtgtgggatagctctctgcataactcccttcttctgaaccgagtgacaccctatggagaaaagatctacatgaccttgtcggcctacctagagctggatcattgcatccagccggctgtcatcaccaaggatgtgtgcatggtcttctactcccgagatgccaagatctcaccaccacgctctctgcgtagcctctttggcagcggctactcaaagtcaccagattcgaatcgagtcactggcatttacgaactcagcttatgcaaaatgtcagacacaggtagtccaggtatgcagagaaggagaagaaaaatcttagatacgtcagtggcatatgtgcggggagaagagaacttagcaggctggcggccccgtggagacagcctcatccttgagcaccagtgggagctggagaagctggagctcctacatgaggtggaaaaaacccgccactttttgctgctgcgtgagagacttggtgacagcatccccaaatccctgagcgactcgttatcccccagcctcagcagtgggaccctcagcacctccaccagtatctcctctcagatctcaaccactacctttgaaagcgccatcacacctagcgagagcagtggctatgattcaggagacatcgaaagcctggtggaccgagagaaagagctggctaccaagtgcctgcaacttctcacccacactttcaacagagaattcagccaggtgcacggcagcgtcagtgactgtaagttgtctgatatctctccaattggacgggatccctctgagtccagtttcagcagtgccaccctcactccctcctccacctgtccctctctggtagactctaggagcaactctctggatcagaagaccccagaagccaattcccgggcctctagtccctgcccagaatttgaacagtttcagattgtcccagctgtggaaacaccatatttggcccgagcaggaaaaaacgaatttctcaatcttgttccagatattgaagaaattagaccaagctcagtggtctctaagaaaggataccttcatttcaaggagcctctttacagtaactgggctaaacattttgttgtcgtccgtcggccttatgtcttcatctataacagtgacaaagaccctgtggagcgtggaatcattaacctgtccacagcacaggtggagtacagtgaggaccagcaggccatggtgaagacaccaaacacctttgctgtctgcacaaagcaccgtggggtccttttgcaggccctcaatgacaaagacatgaacgactggttgtatgccttcaacccacttctagctggcacaatacggtcaaagctttcccgcagatgcccgagccagtcgaaatactaagtgactctgccgagtgccctcactcgccttcgagagataaagaaagcgttacctctcatttctctttgtgattcttgacggtgactcttgtatgtaatcctgtggcttaactacttctccctccttgtccagcacttttctagctctcccgttccccatctccattgctctgtactcttttcttttttcttgtgctgagaatctcgttagtagcatgtggcctaacaaaaggaaaaaatgtttttaaacacacacacacacacacacacacacacacacatacacagacaaaaacacaaaaactctgaggggatctggtgaatctccaaattattgtgggtgtactttggcttccttttgtatgataggtccccatcatgaccacctctgatgtctgtgctgctgtcaccaggcacctttgtttttcaagacaacatactttttttttcttttctctgtttgtgatatcactttaatttttcttgggtggcttagagactaagggaggagacatctggcctttttagaacctgagaggaaaaaaagagtctttttttcccctctgtctctttttgccatggctaatccctgcatttccattcagggaaaaggtggtagtgagcatagaactgcaacagttatattctgagtcaaagttggggctttttacggcataattatggaatttttatttactggtagagaggagacgagaggctttttcagtgggcctgggacagtggctgctcttgactttgtgtgaagggaaatgccaaggatgcttctggtggacttcaggggaccccagggtttggccgtgggccgtgatggcagcaggcggtgggatgcttgtagctcctcacagcaggattcctgcccactgttttttctctgttgggagggaagctcttttctaggagtgtctcagttctgcttttggcattagtgatggtggtggtacagttggaattagtgccatgtcatacacaaatgttccacaaggcgggagtgtttcactttctggtgataaacttgatggtcattgttatgattaagataatgccgggcaggccgggcacagtggctcacgcctgtaatccaagcacttggggaggccgaggcgggcagatcacgagatcaggagttcaagaccagcctggccaatatgatgaaaccccgtctctactaaaaatacaaaattagtcgggtatggtggcacatgcctgtaattccagctgcttgggagcctgaggcaggagaactgcttgaacccaggaggcagaggttgcagtgagccaagatcgcgctattgcactccagcctgggtgacagagcaagactctgcctcagaaaaaaaaaaaaaaatatagctttcaggcataaacctggaagtctccctctgaatccagcagttgttttcattgatgcttgtcaggttgaagatgctttcagtgatgctctctatactcataaataagcaaatgtggcaggctttgctttctggatcccaggattaaaactaaccgtgaccactactccaaacaaaacacaatatgcctaggggcacggatgaacgtccagggagcccgggccccaggctttgttgcgtgttccctgctcctctccatctggtgtggaaacactgcccagggagaaaggaggaagctcactgtggacagtcttctttccttctgacagaccaggtcatctggcttccgagatcatcagagaagataagtctgtctctttcagctgccagtaagttttccaggatgagaggggaaaaagaaagcctccagtgacttcagttgctttgccagttgtcttgggattgttttacaccatcctttacttcccttgctcagacctctctgtttcaccattgctcaggcattcaggaaagtatctgctcactcccacttggtgagtcctcggccttgaggttgctgactctcaggcgttaggcagctggatgacttcccgcttcacgcagcaaaggccaggggcttgcgcgcctctgcagagttgttgctagggagacttgtgtcatcatccacaaccttgtttctcacttcctggttgggctcatctctgaagaacaggtctcccagcttcgctccttatcactgcattgtgaagaggaggaaaagtgaatcacggagagagaaaggaaaggatagaatcacaggctgcgtctgcacctgaaaagtgacccgcggaaactctatggcggattttttttttaactttcttcttcctgttaaaacataggtcactaactgtgatgttatttgttttctaagtggtatgtgagattttctaatgtagttagaagtttcattgtctgatggacacaatatgcccttccggttctattcaaaccagcaggatctgtcggtgcttagagatggctgcctggactggaatcaaatctaatttcagggaaatgaagatggaatttgaaggtcacttttaaaattaagtcattgatgctgctgttacagagtgtgacagaggatccatgtctgtgacacaggacggtgggaagcctgagagagagtgaaattatgtgatacactgaaatgacttttgtttttcttctaactcatacaaaactggtttggaaagtctttgctttggaagcgtcagacattagaacaggccaaactggactgtctgttcatagcgtgcctgaataagaaggcctcttagggagccagagggagcagagtggtcgtgtcctgcgtgctcttcaccctctggggcgcccctgctgcggctggcaggtgcagacagcctttgctggtccccagcacgtccagggtgggtgctcccttgcccgacagaaccatccccactgtgaggctgtgagagatttgtggcaggaactgtttatgaggctctagttgttgctgttgtggcgggaaagttaagaaacatagcccttaaggaaaccacctttatgtattttcttaaagcacgcctttaaataagcaaaaactttaaaaggcaggaaagagaattcttaggcaaattcagagaaataagtgctagttaatactaatcacctcctcctctgtctctcatcctcctttctcccatcaaagcaaaatatggcctcaccaccagccccaaatcagtgctcagaccctctctgtgtctgtgtgccctcctgggagtcagtcagcgctcaggccaggactgtgcagggccagccagcccatgcgctagtcaggagcacaggcaaggggtgcttgtggcagggggcaatggagtgagtttcccaactaagaaaccactattatatattttttcccttcagtcacat

SEQ ID NO: 751 - protein, 1661 aa, Homo sapiens
MSYSVEVSYMEIYCERVRDLLNPKNKGNLRVREHPLLGPYVEDLSKLAVTSYTDIADLMDAGNKARTVAATNMNETSSRSHAVFTIVFTQKKHDNETNLSTEKVSKISLVDLAGSADSTGAKGTRLKEGANINKSLTTLGKVISAEVSKKKKKTDFIPYRDSVLTWLLRENLGGNSRTAMVAALSPADINYDETLSTLRYADRAKQIKCNAVINEDPNAKLVRELKEEVTRLKDLLRAQGLGDIIDIDPLIDDYSGSGSKYLKDFQNNKHRYLLASENQRPGHFSTASMGSLTSSPSSCSLSSQVGLTSVTSIQERIMSTPGGEEAIERLKESEKIIAELNETWEEKLRKTEAIRMEREALLAEMGVAIREDGGTLGVFSPKKTPHLVNLNEDPLMSECLLYYIKDGITRVGQADAERRQDIVLSGAHIKEEHCIFRSSNSGEVIVTLEPCERSETYVNGKRVSQPVQLRSGNRIIMGKNHVFRFNHPEQARAEREKTPSAETPSEPVDWTFAQRELLEKQGIDMKQEMEKRLQEMEILYKKEKEEADLLLEQQRLDYESKLQALQKQVETRSLAAETTEEEEEEEEVPWTQHEFELAQWAFRKWKSHQFTSLRDLLWGNAVYLKEANAISVELKKKVQFQFVLLTDTKPLPPELLPTEMEKTHEDRPFPRTVVAVEVQDLKNGATHYWSLEKLKQRLDLMREMYDRAGEMASSAQDESETTVTGSDPFYDRFHWFKLVGSSPIFHGCVNERLADRTPSPTFSTADSDITELADEQQDEMEDFDDEAFVDDAGSDAGTEEGSDLFSDGHDPFYDRSPWFILVGRAFVYLSNLLYPVPLIHRVAIVSEKGEVRGFLRVAVQAIAADEEAPDYGSGIRQSGTAKISFDNEYFNQSDFSSVAMTRSGLSLEELRIVEGQGQSSEVITPPEEISRINDLDLKSSTLLDGKMVMEGFSEEIGNHLKLGSAFTFRVTVLQASGILPEYADIFCQFNFLHRHDEAFSTEPLKNNGRGSPLAFYHVQNIAVEITESFVDYIKTKPIVFEVFGHYQQHPLHLQGQELNSPPQPCRRFFPPPMPLSKPVPATKLNTMSKTSLGQSMSKYDLLVWFEISELEPTGEYIPAVVDHTAGLPCQGTFLLHQGIQRRITVTIIHEKGSELHWKDVRELVVGRIRNKPEVDEAAVDAILSLNIISAKYLKSSHNSSRTFYRFEAVWDSSLHNSLLLNRVTPYGEKIYMTLSAYLELDHCIQPAVITKDVCMVFYSRDAKISPPRSLRSLFGSGYSKSPDSNRVTGIYELSLCKMSDTGSPGMQRRRRKILDTSVAYVRGEENLAGWRPRGDSLIHQWELEKLELLHEVEKTRHFLLLRERLGDSIPKSLSDSLSPSLSSGTLSTSTSISSQISTTTFESAITPSESSGYDSGDIESLVDREKELATKCLQLLTHTFNREFSQVHGSVSDCKLSDISPIGRDPSESSFSSATLTPSSTCPSLVDSRSNSLDQKTPEANSRASSPCPEFEQFQIVPAVETPYLARAGKNEFLNLVPDIEEIRPSSVVSKKGYLHFKEPKNWAKHFVVVRRPYVFIYNSDKDPVERGIINLSTAQVEYSEDQQAMVKTPNTFAVCTKHRGVLLQALNDKDMNDWLYAFNPLLAGTIRSKLSRRCPSQSKY

SEQ ID NO: 752 - DNA, 8274 bp, Homo sapiens
ttccctagttatgtgaagaactttttgagaaaatcaatgacaactgtaatgaagaaatgtcttactctgtagaggtgagctacatggaaatttactgtgaaagagtacgagatttgctgaatccaaaaaacaagggtaatttgcgtgtgcgtgaacacccacttcttggaccctatgtggaggatctgtccaagttggcagttacttcctacacagacattgctgacctcatggatgctgggaacaaagccaggacagtggcagctacaaacatgaatgaaacaagtagccgttcccacgctgtgtttacgattgttttcacccagaagaaacacgataatgagaccaacctttccactgagaaggtcagtaaaatcagcttggtggatctagcaggaagtgaacgagctgattcaactggtgccaaagggactcgattaaaggaaggagcaaatattaataagtctcttacaactttgggcaaagtcatttcagccttggccgaggtgagtaaaaagaagaagaaaacagattttattccctacagggattctgtacttacttggctccttcgagaaaatttaggtggcaattctcggactgcaatggttgctgctctgagccccgcggatatcaactacgatgagactttgagcactctgagatatgcagatcgtgcaaaacaaattaaatgcaatgctgttatcaatgaggaccccaatgccaaactggttcgtgaattaaaggaggaggtgacacggctgaaggaccttcttcgtgctcagggcctgggagatattattgatacatccatggggtccctcacttcatccccatcttcctgctcactcagtagtcaggtgggcttgacgtctgtgaccagtattcaagagaggatcatgtctacacctggaggagaggaagctattgaacgtttaaaggaatcagagaagatcattgctgagttgaatgaaacttgggaagagaagcttcgtaaaacagaggccatcagaatggagagagaggctttgttggctgagatgggagttgccattcgggaagatggaggaaccctaggggttttctcacctaaaaagaccccacatcttgttaacctcaatgaagacccactaatgtctgagtgcctactttattacatcaaagatggaattacaagggttggccaagcagatgctgagcggcgccaggacatagtgctgagcggggctcacattaaagaagagcattgtatcttccggagtgagagaagcaacagcggggaagttatcgtgaccttagagccctgtgagcgctcagaaacctacgtaaatggcaagagggtgtcccagcctgttcagctgcgctcaggaaaccgtatcatcatgggtaaaaaccatgttttccgctttaaccacccggaacaagcacgagctgagcgagagaagactccttctgctgagaccccctctgagcctgtggactggacatttgcccagagggagcttctggaaaaacaaggaattgatatgaaacaagagatggagaaaaggctacaggaaatggagatcttatacaaaaaggagaaggaagaagcagatcttcttttggagcagcagagactggactatgagagtaaattgcaggccttgcagaagcaggttgaaacccgatctctggctgcagaaacaactgaagaggaggaagaagaggaagaagttccttggacacagcatgaatttgagttggcccaatgggccttccggaaatggaagtctcatcagtttacttcattacgggacttactctggggcaatgccgtgtacctaaaggaggccaatgccatcagtgtggaactgaaaaagaaggtgcagtttcagtttgttctgctgactgacacactgtactcccctttgcctcctgaattacttcccactgagatggaaaaaactcatgaggacaggcctttccctcgcacagtggtagcagtagaagtccaggatttgaagaatggagcaacacactattggtctttggagaaactcaagcagaggctggatttgatgcgagagatgtatgatagggcaggggagatggcctccagtgcccaagacgaaagcgaaaccactgtgactggcagcgatcccttctatgatcggttccactggttcaaacttgtggggagctcccccattttccacggctgtgtgaacgagcgccttgccgaccgcacaccctcccccactttttccacggccgattccgacatcactgagctggctgacgagcagcaagatgagatggaggattttgatgatgaggcattcgtggatgacgccggctctgacgcagggacggaggagggatcagatctcttcagtgacgggcatgacccgttttacgaccgatccccttggttcattttagtgggaagggcatttgtttacctgagcaatctgctgtatcccgtgcccctgatccacagggtggccatcgtcagtgagaaaggtgaagtgcggggatttctgcgtgtggctgtacaggccatcgcagcggatgaagaagctcctgattatggctctggaattcgacagtcaggaacagctaaaatatcttttgataatgaatactttaatcagagtgacttttcgtctgttgcaatgactcgttctggtctgtccttggaggagttgaggattgtggaaggacagggtcagagttctgaggtcatcactcctccagaagaaatcagtcgaattaatgacttggatttgaagtcaagcactttgctggatggtaagatggtaatggaagggttttctgaagagattggcaaccacctgaaactgggcagtgccttcactttccgagtaacagtgttgcaggccagtggaatcctcccagagtatgcagatatcttctgtcagttcaactttttgcatcgccatgatgaagcattctccacggagcccctcaaaaacaatggcagaggaagtcccctggccttttatcatgtgcagaatattgcagtggagatcactgaatcatttgtggattacatcaaaaccaagcctattgtatttgaagtctttgggcattatcagcagcacccacttcatctgcaaggacaggagcttaacagtccgcctcagccgtgccgccgattcttccctccacccatgccactgtccaagccagttccagccaccaagttaaacacgatgagcaaaaccagccttggccagagcatgagcaagtatgacctcctggtttggtttgagatcagtgaactggagcctacaggagagtatatcccagctgtggttgaccacacagcaggcttgccttgccaggggacatttttgcttcatcagggcatccagcgaaggatcacagtgaccattatccatgagaaggggagcgagctccattggaaagatgttcgtgaactggtggtaggtcgtattcggaataagcctgaggtggatgaagctgcagttgatgccatcctctccctaaatattatttctgccaagtacctgaagtcttcccacaactctagcaggaccttctaccgctttgaggctgtgtgggatagctctctgcataactcccttcttctgaaccgagtgacaccctatggagaaaagatctacatgaccttgtcggcctacctagagctggatcattgcatccagccggctgtcatcaccaaggatgtgtgcatggtcttctactcccgagatgccaagatctcaccaccacgctctctgcgtagcctctttggcagcggctactcaaagtcaccagattcgaatcgagtcactggcatttacgaactcagcttatgcaaaatgtcagacacaggtagtccaggtatgcagagaaggagaagaaaaatcttagatacgtcagtggcatatgtgcggggagaagagaacttagcaggctggcggccccgtggagacagcctcatccttgagcaccagtgggagctggagaagctggagctcctacatgaggtggaaaaaacccgccactttttgctgctgcgtgagagacttggtgacagcatccccaaatccctgagcgactcgttatcccccagcctcagcagtgggaccctcagcacctccaccagtatctcctctcagatctcaaccactacctttgaaagcgccatcacacctagcgagagcagtggctatgattcaggagacatcgaaagcctggtggaccgagagaaagagctggctaccaagtgcctgcaacttctcacccacactttcaacagagaattcagccaggtgcacggcagcgtcagtgactgtaagttgtctgatatctctccaattggacgggatccctctgagtccagtttcagcagtgccaccctcactccctcctccacctgtccctctctggtagactctaggagcaactctctggatcagaagaccccagaagccaattcccgggcctctagtccctgcccagaatttgaacagtttcagattgtcccagctgtggaaacaccatatttggcccgagcaggaaaaaacgaatttctcaatcttgttccagatattgaagaaattagaccaagctcagtggtctctaagaaaggataccttcatttcaaggagcctctttacagtaactgggctaaacattttgttgtcgtccgtcggccttatgtcttcatctataacagtgacaaagaccctgtggagcgtggaatcattaacctgtccacagcacaggtggagtacagtgaggaccagcaggccatggtgaagacaccaaacacctttgctgtctgcacaaagcaccgtggggtccttttgcaggccctcaatgacaaagacatgaacgactggttgtatgccttcaacccacttctagctggcacaatacggtcaaagctttcccgcagatgcccgagccagtcgaaatactaagtgactctgccgagtgccctcactcgccttcgagagataaagaaagcgttacctctcatttctctttgtgattcttgacggtgactcttgtatgtaatcctgtggcttaactacttctccctccttgtccagcacttttctagctctcccgttccccatctccattgctctgtactcttttcttttttcttgtgctgagaatctcgttagtagcatgtggcctaacaaaaggaaaaaatgtttttaaacacacacacacacacacacacacacacacacatacacagacaaaaacacaaaaactctgaggggatctggtgaatctccaaattattgtgggtgtactttggcttccttttgtatgataggtccccatcatgaccacctctgatgtctgtgctgctgtcaccaggcacctttgtttttcaagacaacatactttttttttcttttctctgtttgtgatatcactttaatttttcttgggtggcttagagactaagggaggagacatctggcctttttagaacctgagaggaaaaaaagagtctttttttcccctctgtctctttttgccatggctaatccctgcatttccattcagggaaaaggtggtagtgagcatagaactgcaacagttatattctgagtcaaagttggggctttttacggcataattatggaatttttatttactggtagagaggagacgagaggctttttcagtgggcctgggacagtggctgctcttgactttgtgtgaagggaaatgccaaggatgcttctggtggacttcaggggaccccagggtttggccgtgggccgtgatggcagcaggcggtgggatgcttgtagctcctcacagcaggattcctgcccactgttttttctctgttgggagggaagctcttttctaggagtgtctcagttctgcttttggcattagtgatggtggtggtacagttggaattagtgccatgtcatacacaaatgttccacaaggcgggagtgtttcactttctggtgataaacttgatggtcattgttatgattaagataatgccgggcaggccgggcacagtggctcacgcctgtaatccaagcacttggggaggccgaggcgggcagatcacgagatcaggagttcaagaccagcctggccaatatgatgaaaccccgtctctactaaaaatacaaaattagtcgggtatggtggcacatgcctgtaattccagctgcttgggagcctgaggcaggagaactgcttgaacccaggaggcagaggttgcagtgagccaagatcgcgctattgcactccagcctgggtgacagagcaagactctgcctcagaaaaaaaaaaaaataataatgctgggtagtgaccttgtgattgttacagctccctttgatcaaagaaatatagctttcaggcataaacctggaagtctccctctgaatccagcagttgttttcattgatgcttgtcaggttgaagatgctttcagtgatgctctctatactcataaataagcaaatgtggcaggctttgctttctggatcccaggattaaaactaaccgtgaccactactccaaacaaaacacaatatgcctaggggcacggatgaacgtccagggagcccgggccccaggctttgttgcgtgttccctgctcctctccatctggtgtggaaacactgcccagggagaaaggaggaagctcactgtggacagtcttctttccttctgacagaccaggtcatctggcttccgagatcatcagagaagataagtctgtctctttcagctgccagtaagttttccaggatgagaggggaaaaagaaagcctccagtgacttcagttgctttgccagttgtcttgggattgttttacaccatcctttacttcccttgctcagacctctctgtttcaccattgctcaggcattcaggaaagtatctgctcactcccacttggtgagtcctcggccttgaggttgctgactctcaggcgttaggcagctggatgacttcccgcttcacgcagcaaaggccaggggcttgcgcgcctctgcagagttgttgctagggagacttgtgtcatcatccacaaccttgtttctcacttcctggttgggctcatctctgaagaacaggtctcccagcttcgctccttatcactgcattgtgaagaggaggaaaagtgaatcacggagagagaaaggaaaggatagaatcacaggctgcgtctgcacctgaaaagtgacccgcggaaactctatggcggattttttttttaactttcttcttcctgttaaaacataggtcactaactgtgatgttatttgttttctaagtggtatgtgagattttctaatgtagttagaagtttcattgtctgatggacacaatatgcccttccggttctattcaaaccagcaggatctgtcggtgcttagagatggctgcctggactggaatcaaatctaatttcagggaaatgaagatggaatttgaaggtcacttttaaaattaagtcattgatgctgctgttacagagtgtgacagaggatccatgtctgtgacacaggacggtgggaagcctgagagagagtgaaattatgtgatacactgaaatgacttttgtttttcttctaactcatacaaaactggtttggaaagtctttgctttggaagcgtcagacattagaacaggccaaactggactgtctgttcatagcgtgcctgaataagaaggcctcttagggagccagagggagcagagtggtcgtgtcctgcgtgctcttcaccctctggggcgcccctgctgcggctggcaggtgcagacagcctttgctggtccccagcacgtccagggtgggtgctcccttgcccgacagaaccatccccactgtgaggctgtgagagatttgtggcaggaactgtttatgaggctctagttgttgctgttgtggcgggaaagttaagaaacatagcccttaaggaaaccacctttatgtattttcttaaagcacgcctttaaataagcaaaaactttaaaaggcaggaaagagaattcttaggcaaattcagagaaataagtgctagttaatactaatcacctcctcctctgtctctcatcctcctttctcccatcaaagcaaaatatggcctcaccaccagccccaaatcagtgctcagaccctctctgtgtctgtgtgccctcctgggagtcagtcagcgctcaggccaggactgtgcagggccagccagcccatgcgctagtcaggagcacaggcaaggggtgcttgtggcag

SEQ ID NO: 753 - protein, 1621 aa, Homo sapiens
MSYSVEVSYMEIYCERVRDLLNPKNKGNLRVREHPLLGPYVEDLSKLAVTSYTDIADLMDAGNKARTVAATNMNETSSRSHAVFTIVFTQKKHDNETNLSTEKVSKISLVDLAGSADSTGAKGTRLKEGANINKSLTTLGKVISAEVSKKKKKTDFIPYRDSVLTWLLRENLGGNSRTAMVAALSPADINYDETLSTLRYADRAKQIKCNAVINEDPNAKLVRELKEEVTRLKDLLRAQGLGDIIDTSMGSLTSSPSSCSLSSQVGLTSVTSIQERIMSTPGGEEAIERLKESEKIIAELNETWEEKLRKTEAIRMEREALLAEMGVAIREDGGTLGVFSPKKTPHLVNLNEDPLMSECLLYYIKDGITRVGQADAERRQDIVLSGAHIKEEHCIFRSSNSGEVIVTLEPCERSETYVNGKRVSQPVQLRSGNRIIMGKNHVFRFNHPEQARAEREKTPSAETPSEPVDWTFAQRELLEKQGIDMKQEMEKRLQEMEILYKKEKEEADLLLEQQRLDYESKLQALQKQVETRSLAAETTEEEEEEEEVPWTQHEFELAQWAFRKWKSHQFTSLRDLLWGNAVYLKEANAISVELKKKVQFQFVLLTDTKPLPPELLPTEMEKTHEDRPFPRTVVAVEVQDLKNGATHYWSLEKLKQRLDLMREMYDRAGEMASSAQDESETTVTGSDPFYDRFHWFKLVGSSPIFHGCVNERLADRTPSPTFSTADSDITELADEQQDEMEDFDDEAFVDDAGSDAGTEEGSDLFSDGHDPFYDRSPWFILVGRAFVYLSNLLYPVPLIHRVAIVSEKGEVRGFLRVAVQAIAADEEAPDYGSGIRQSGTAKISFDNEYFNQSDFSSVAMTRSGLSLEELRIVEGQGQSSEVITPPEEISRINDLDLKSSTLLDGKMVMEGFSEEIGNHLKLGSAFTFRVTVLQASGILPEYADIFCQFNFLHRHDEAFSTEPLKNNGRGSPLAFYHVQNIAVEITESFVDYIKTKPIVFEVFGHYQQHPLHLQGQELNSPPQPCRRFFPPPMPLSKPVPATKLNTMSKTSLGQSMSKYDLLVWFEISELEPTGEYIPAVVDHTAGLPCQGTFLLHQGIQRRITVTIIHEKGSELHWKDVRELVVGRIRNKPEVDEAAVDAILSLNIISAKYLKSSHNSSRTFYRFEAVWDSSLHNSLLLNRVTPYGEKIYMTLSAYLELDHCIQPAVITKDVCMVFYSRDAKISPPRSLRSLFGSGYSKSPDSNRVTGIYELSLCKMSDTGSPGMQRRRRKILDTSVAYVRGEENLAGWRPRGDSLIHQWELEKLELLHEVEKTRHFLLLRERLGDSIPKSLSDSLSPSLSSGTLSTSTSISSQISTTTFESAITPSESSGYDSGDIESLVDREKELATKCLQLLTHTFNREFSQVHGSVSDCKLSDISPIGRDPSESSFSSATLTPSSTCPSLVDSRSNSLDQKTPEANSRASSPCPEFEQFQIVPAVETPYLARAGKNEFLNLVPDIEEIRPSSVVSKKGYLHFKEPKNWAKHFVVVRRPYVFIYNSDKDPVERGIINLSTAQVEYSEDQQAMVKTPNTFAVCTKHRGVLLQALNDKDMNDWLYAFNPLLAGTIRSKLSRRCPSQSKY

SEQ ID NO: 754 - DNA, 8286 bp, Homo sapiens
ttccctagttatgtgaagaactttttgagaaaatcaatgacaactgtaatgaagaaatgtcttactctgtagaggtgagctacatggaaatttactgtgaaagagtacgagatttgctgaatccaaaaaacaagggtaatttgcgtgtgcgtgaacacccacttcttggaccctatgtggaggatctgtccaagttggcagttacttcctacacagacattgctgacctcatggatgctgggaacaaagccaggacagtggcagctacaaacatgaatgaaacaagtagccgttcccacgctgtgtttacgattgttttcacccagaagaaacacgataatgagaccaacctttccactgagaaggtcagtaaaatcagcttggtggatctagcaggaagtgaacgagctgattcaactggtgccaaagggactcgattaaaggaaggagcaaatattaataagtctcttacaactttgggcaaagtcatttcagccttggccgaggtgagtaaaaagaagaagaaaacagattttattccctacagggattctgtacttacttggctccttcgagaaaatttaggtggcaattctcggactgcaatggttgctgctctgagccccgcggatatcaactacgatgagactttgagcactctgagatatgcagatcgtgcaaaacaaattaaatgcaatgctgttatcaatgaggaccccaatgccaaactggttcgtgaattaaaggaggaggtgacacggctgaaggaccttcttcgtgctcagggcctgggagatattattgatacatccatggggtccctcacttcatccccatcttcctgctcactcagtagtcaggtgggcttgacgtctgtgaccagtattcaagagaggatcatgtctacacctggaggagaggaagctattgaacgtttaaaggaatcagagaagatcattgctgagttgaatgaaacttgggaagagaagcttcgtaaaacagaggccatcagaatggagagagaggctttgttggctgagatgggagttgccattcgggaagatggaggaaccctaggggttttctcacctaaaaagaccccacatcttgttaacctcaatgaagacccactaatgtctgagtgcctactttattacatcaaagatggaattacaagggttggccaagcagatgctgagcggcgccaggacatagtgctgagcggggctcacattaaagaagagcattgtatcttccggagtgagagaagcaacagcggggaagttatcgtgaccttagagccctgtgagcgctcagaaacctacgtaaatggcaagagggtgtcccagcctgttcagctgcgctcaggaaaccgtatcatcatgggtaaaaaccatgttttccgctttaaccacccggaacaagcacgagctgagcgagagaagactccttctgctgagaccccctctgagcctgtggactggacatttgcccagagggagcttctggaaaaacaaggaattgatatgaaacaagagatggagaaaaggctacaggaaatggagatcttatacaaaaaggagaaggaagaagcagatcttcttttggagcagcagagactggactatgagagtaaattgcaggccttgcagaagcaggttgaaacccgatctctggctgcagaaacaactgaagaggaggaagaagaggaagaagttccttggacacagcatgaatttgagttggcccaatgggccttccggaaatggaagtctcatcagtttacttcattacgggacttactctggggcaatgccgtgtacctaaaggaggccaatgccatcagtgtggaactgaaaaagaaggtgcagtttcagtttgttctgctgactgacacactgtactcccctttgcctcctgaattacttcccactgagatggaaaaaactcatgaggacaggcctttccctcgcacagtggtagcagtagaagtccaggatttgaagaatggagcaacacactattggtctttggagaaactcaagcagaggctggatttgatgcgagagatgtatgatagggcaggggagatggcctccagtgcccaagacgaaagcgaaaccactgtgactggcagcgatcccttctatgatcggttccactggttcaaacttgtggggagctcccccattttccacggctgtgtgaacgagcgccttgccgaccgcacaccctcccccactttttccacggccgattccgacatcactgagctggctgacgagcagcaagatgagatggaggattttgatgatgaggcattcgtggatgacgccggctctgacgcagggacggaggagggatcagatctcttcagtgacgggcatgacccgttttacgaccgatccccttggttcattttagtgggaagggcatttgtttacctgagcaatctgctgtatcccgtgcccctgatccacagggtggccatcgtcagtgagaaaggtgaagtgcggggatttctgcgtgtggctgtacaggccatcgcagcggatgaagaagctcctgattatggctctggaattcgacagtcaggaacagctaaaatatcttttgataatgaatactttaatcagagtgacttttcgtctgttgcaatgactcgttctggtctgtccttggaggagttgaggattgtggaaggacagggtcagagttctgaggtcatcactcctccagaagaaatcagtcgaattaatgacttggatttgaagtcaagcactttgctggatggtaagatggtaatggaagggttttctgaagagattggcaaccacctgaaactgggcagtgccttcactttccgagtaacagtgttgcaggccagtggaatcctcccagagtatgcagatatcttctgtcagttcaactttttgcatcgccatgatgaagcattctccacggagcccctcaaaaacaatggcagaggaagtcccctggccttttatcatgtgcagaatattgcagtggagatcactgaatcatttgtggattacatcaaaaccaagcctattgtatttgaagtctttgggcattatcagcagcacccacttcatctgcaaggacaggagcttaacagtccgcctcagccgtgccgccgattcttccctccacccatgccactgtccaagccagttccagccaccaagttaaacacgatgagcaaaaccagccttggccagagcatgagcaagtatgacctcctggtttggtttgagatcagtgaactggagcctacaggagagtatatcccagctgtggttgaccacacagcaggcttgccttgccaggggacatttttgcttcatcagggcatccagcgaaggatcacagtgaccattatccatgagaaggggagcgagctccattggaaagatgttcgtgaactggtggtaggtcgtattcggaataagcctgaggtggatgaagctgcagttgatgccatcctctccctaaatattatttctgccaagtacctgaagtcttcccacaactctagcaggaccttctaccgctttgaggctgtgtgggatagctctctgcataactcccttcttctgaaccgagtgacaccctatggagaaaagatctacatgaccttgtcggcctacctagagctggatcattgcatccagccggctgtcatcaccaaggatgtgtgcatggtcttctactcccgagatgccaagatctcaccaccacgctctctgcgtagcctctttggcagcggctactcaaagtcaccagattcgaatcgagtcactggcatttacgaactcagcttatgcaaaatgtcagacacaggtagtccaggtatgcagagaaggagaagaaaaatcttagatacgtcagtggcatatgtgcggggagaagagaacttagcaggctggcggccccgtggagacagcctcatccttgagcaccagtgggagctggagaagctggagctcctacatgaggtggaaaaaacccgccactttttgctgctgcgtgagagacttggtgacagcatccccaaatccctgagcgactcgttatcccccagcctcagcagtgggaccctcagcacctccaccagtatctcctctcagatctcaaccactacctttgaaagcgccatcacacctagcgagagcagtggctatgattcaggagacatcgaaagcctggtggaccgagagaaagagctggctaccaagtgcctgcaacttctcacccacactttcaacagagaattcagccaggtgcacggcagcgtcagtgactgtaagttgtctgatatctctccaattggacgggatccctctgagtccagtttcagcagtgccaccctcactccctcctccacctgtccctctctggtagactctaggagcaactctctggatcagaagaccccagaagccaattcccgggcctctagtccctgcccagaatttgaacagtttcagattgtcccagctgtggaaacaccatatttggcccgagcaggaaaaaacgaatttctcaatcttgttccagatattgaagaaattagaccaagctcagtggtctctaagaaaggataccttcatttcaaggagcctctttacagtaactgggctaaacattttgttgtcgtccgtcggccttatgtcttcatctataacagtgacaaagaccctgtggagcgtggaatcattaacctgtccacagcacaggtggagtacagtgaggaccagcaggccatggtgaagacaccaaacacctttgctgtctgcacaaagcaccgtggggtccttttgcaggccctcaatgacaaagacatgaacgactggttgtatgccttcaacccacttctagctggcacaatacggtcaaagctttcccgcagatgcccgagccagtcgaaatactaagtgactctgccgagtgccctcactcgccttcgagagataaagaaagcgttacctctcatttctctttgtgattcttgacggtgactcttgtatgtaatcctgtggcttaactacttctccctccttgtccagcacttttctagctctcccgttccccatctccattgctctgtactcttttcttttttcttgtgctgagaatctcgttagtagcatgtggcctaacaaaaggaaaaaatgtttttaaacacacacacacacacacacacacacacacacatacacagacaaaaacacaaaaactctgaggggatctggtgaatctccaaattattgtgggtgtactttggcttccttttgtatgataggtccccatcatgaccacctctgatgtctgtgctgctgtcaccaggcacctttgtttttcaagacaacatactttttttttcttttctctgtttgtgatatcactttaatttttcttgggtggcttagagactaagggaggagacatctggcctttttagaacctgagaggaaaaaaagagtctttttttcccctctgtctctttttgccatggctaatccctgcatttccattcagggaaaaggtggtagtgagcatagaactgcaacagttatattctgagtcaaagttggggctttttacggcataattatggaatttttatttactggtagagaggagacgagaggctttttcagtgggcctgggacagtggctgctcttgactttgtgtgaagggaaatgccaaggatgcttctggtggacttcaggggaccccagggtttggccgtgggccgtgatggcagcaggcggtgggatgcttgtagctcctcacagcaggattcctgcccactgttttttctctgttgggagggaagctcttttctaggagtgtctcagttctgcttttggcattagtgatggtggtggtacagttggaattagtgccatgtcatacacaaatgttccacaaggcgggagtgtttcactttctggtgataaacttgatggtcattgttatgattaagataatgccgggcaggccgggcacagtggctcacgcctgtaatccaagcacttggggaggccgaggcgggcagatcacgagatcaggagttcaagaccagcctggccaatatgatgaaaccccgtctctactaaaaatacaaaattagtcgggtatggtggcacatgcctgtaattccagctgcttgggagcctgaggcaggagaactgcttgaacccaggaggcagaggttgcagtgagccaagatcgcgctattgcactccagcctgggtgacagagcaagactctgcctcagaaaaaaaaaaaaaaatatagctttcaggcataaacctggaagtctccctctgaatccagcagttgttttcattgatgcttgtcaggttgaagatgctttcagtgatgctctctatactcataaataagcaaatgtggcaggctttgctttctggatcccaggattaaaactaaccgtgaccactactccaaacaaaacacaatatgcctaggggcacggatgaacgtccagggagcccgggccccaggctttgttgcgtgttccctgctcctctccatctggtgtggaaacactgcccagggagaaaggaggaagctcactgtggacagtcttctttccttctgacagaccaggtcatctggcttccgagatcatcagagaagataagtctgtctctttcagctgccagtaagttttccaggatgagaggggaaaaagaaagcctccagtgacttcagttgctttgccagttgtcttgggattgttttacaccatcctttacttcccttgctcagacctctctgtttcaccattgctcaggcattcaggaaagtatctgctcactcccacttggtgagtcctcggccttgaggttgctgactctcaggcgttaggcagctggatgacttcccgcttcacgcagcaaaggccaggggcttgcgcgcctctgcagagttgttgctagggagacttgtgtcatcatccacaaccttgtttctcacttcctggttgggctcatctctgaagaacaggtctcccagcttcgctccttatcactgcattgtgaagaggaggaaaagtgaatcacggagagagaaaggaaaggatagaatcacaggctgcgtctgcacctgaaaagtgacccgcggaaactctatggcggattttttttttaactttcttcttcctgttaaaacataggtcactaactgtgatgttatttgttttctaagtggtatgtgagattttctaatgtagttagaagtttcattgtctgatggacacaatatgcccttccggttctattcaaaccagcaggatctgtcggtgcttagagatggctgcctggactggaatcaaatctaatttcagggaaatgaagatggaatttgaaggtcacttttaaaattaagtcattgatgctgctgttacagagtgtgacagaggatccatgtctgtgacacaggacggtgggaagcctgagagagagtgaaattatgtgatacactgaaatgacttttgtttttcttctaactcatacaaaactggtttggaaagtctttgctttggaagcgtcagacattagaacaggccaaactggactgtctgttcatagcgtgcctgaataagaaggcctcttagggagccagagggagcagagtggtcgtgtcctgcgtgctcttcaccctctggggcgcccctgctgcggctggcaggtgcagacagcctttgctggtccccagcacgtccagggtgggtgctcccttgcccgacagaaccatccccactgtgaggctgtgagagatttgtggcaggaactgtttatgaggctctagttgttgctgttgtggcgggaaagttaagaaacatagcccttaaggaaaccacctttatgtattttcttaaagcacgcctttaaataagcaaaaactttaaaaggcaggaaagagaattcttaggcaaattcagagaaataagtgctagttaatactaatcacctcctcctctgtctctcatcctcctttctcccatcaaagcaaaatatggcctcaccaccagccccaaatcagtgctcagaccctctctgtgtctgtgtgccctcctgggagtcagtcagcgctcaggccaggactgtgcagggccagccagcccatgcgctagtcaggagcacaggcaaggggtgcttgtggcagggggcaatggagtgagtttcccaactaagaaaccactattatatattttttcccttcagtcacat

SEQ ID NO: 755 - protein, 1621 aa, Homo sapiens; identical to SEQ ID NO: 753

SEQ ID NO: 756 - DNA, 6949 bp, Homo sapiens
ttccctagttatgtgaagaactttttgagaaaatcaatgacaactgtaatgaagaaatgtcttactctgtagaggtgagctacatggaaatttactgtgaaagagtacgagatttgctgaatccaaaaaacaagggtaatttgcgtgtgcgtgaacacccacttcttggaccctatgtggaggatctgtccaagttggcagttacttcctacacagacattgctgacctcatggatgctgggaacaaagccaggacagtggcagctacaaacatgaatgaaacaagtagccgttcccacgctgtgtttacgattgttttcacccagaagaaacacgataatgagaccaacctttccactgagaaggtcagtaaaatcagcttggtggatctagcaggaagtgaacgagctgattcaactggtgccaaagggactcgattaaaggaaggagcaaatattaataagtctcttacaactttgggcaaagtcatttcagccttggccgaggtgagtaaaaagaagaagaaaacagattttattccctacagggattctgtacttacttggctccttcgagaaaatttaggtggcaattctcggactgcaatggttgctgctctgagccccgcggatatcaactacgatgagactttgagcactctgagatatgcagatcgtgcaaaacaaattaaatgcaatgctgttatcaatgaggaccccaatgccaaactggttcgtgaattaaaggaggaggtgacacggctgaaggaccttcttcgtgctcagggcctgggagatattattgatacatccatggggtccctcacttcatccccatcttcctgctcactcagtagtcaggtgggcttgacgtctgtgaccagtattcaagagaggatcatgtctacacctggaggagaggaagctattgaacgtttaaaggaatcagagaagatcattgctgagttgaatgaaacttgggaagagaagcttcgtaaaacagaggccatcagaatggagagagaggctttgttggctgagatgggagttgccattcgggaagatggaggaaccctaggggttttctcacctaaaaagaccccacatcttgttaacctcaatgaagacccactaatgtctgagtgcctactttattacatcaaagatggaattacaagggttggccaagcagatgctgagcggcgccaggacatagtgctgagcggggctcacattaaagaagagcattgtatcttccggagtgagagaagcaacagcggggaagttatcgtgaccttagagccctgtgagcgctcagaaacctacgtaaatggcaagagggtgtcccagcctgttcagctgcgctcaggaaaccgtatcatcatgggtaaaaaccatgttttccgctttaaccacccggaacaagcacgagctgagcgagagaagactccttctgctgagaccccctctgagcctgtggactggacatttgcccagagggagcttctggaaaaacaaggaattgatatgaaacaagagatggagaaaaggctacaggaaatggagatcttatacaaaaaggagaaggaagaagcagatcttcttttggagcagcagagactggacgcggattctgatagcggggacgattctgacaagaggtcgtgtgaagagagctggaaactgattacttctctgagagaaaagctacctcccagcaagttgcaaaccattgttaaaaaatgtggcctcccaagcagtgggaagaaacgtgaaccaattaaaatgtatcagataccccaaagaaggcgcttgagtaaagattccaagtgggtcacaatctcagatcttaaaattcaggctgtcaaagagatttgctatgaggttgctctcaatgacttcaggcacagtcggcaggagattgaagccctggccattgtcaagatgaaggagctttgtgccatgtatggcaagaaagaccccaatgagcgggactcctggagggcagtggccagggacgtctgggataccgtcggtgttggggatgagaagatcgaagacgtcatggccactgggaaaggcagcactgatgtagatgacctcaaggttcatatagacaagctggaagatattttgcaagaagtcaaaaagcaaaataacatgaaagacgaggagataaaagtcttaagaaataaaatgctcaaaatggaaaaagtcttgccactgatcggatctcaggaacagaaaagcccaggaagccacaaagcaaaggagcctgttggtgctggtgttagtagcacctctgagaataatgtaagtaaaggagacaatggagaacttgcaaaagaagaacgtgtttcccagctgatgaatggggatccagcttttagacgtggacgtctgcgctggatgaggcaagagcaaattcggtttaagaacttgcaacagcaggagataacaaagcagcttcgtcggcagaatgtacctcataggttcatccctcctgagaaccggaagccccgcttcccctttaagagcaaccctaaacacagaaactcttggagtcctgggacacatatcatcataacagaagatgaggttatagagcttaggattccaaaagacgatgaagcaaggaaagggaataaagaagagagccaagaaaaagggggtaaaggagcttttaaggatccccagtttccatggggctctcaaggaatgagaagtcaagatcacatccaagttagcaagcagcacattaataatcagcaacagccacctcaactacgttggagaagcaattctctcaataatggccagccgaaaagtacgcgctgccaggcatctgcctccgcggagtcattaaactcccacagtggtcaccccactgctgatgtacagactttccaggcaaagcgccatattcatcaacaccgtcagtcttactgtaattataacactggaggtcagttagagggcaatgcagccacttcctatcagaagcagactgacaaacccagccactgtagccagtttgtgacacctccgcggatgaggagacagttctcagcacccaatctcaaagctggtcgagaaaccacagtataaatcagttactggacaaacttgaaatcatggtggaagaaacagacagtgttagctcatgatttgatttggttctacctttggccttgagttcttattatttacattataaatattaactggttttatattgttaagacaaaacactggtaaaagtttcaacacctcccttttgcttgtataccataaatgggcagtttctgaaattttggataaagcatcaagaactcctttttctgaaacgttcctccttttttagtgcctaattaatatacttacttacacagacttgtcccatcttgatgtaagtttgttatgtttttataatgcctataaattaatctgacatccagaaagacctgcctcttagtttatgcagacattcaaaaggagaatttgataagcagaattaaatgtctgttattcataaatgttagaaattggtttaaaaataataacatgcaactgggtgggcacagctttggatttctcatccacgtctgttcccttctttaaatatgattagaattttcgtaagccaaaactaaaggtcttcaaacatatcttgcaatacatagctttgcatcttccacacaacttccacgtcttcttttattctgtattttacaaaaaactcatataatggttttttcttttgaatgtatcagaatatgtatgaaatttgtcatatcagaatctataaattggcactgtgtctgggattctgtttgtggtttgcattttgaagttcaatgtatcatttgacacacatgcacacaaagtgaactattcaccaaaatcatgccaacagaaataccaacaaaaaacttgtgtagcttgtaaggaggttatttggcttgagagggaagaggtgggacagacatgggggacaaagctacagcatatggctctgtggtgctgcttttttccaatagttgatgaaatagtgaaataaaagttaactttggttgggcttggaataaaggagatgatacataataaactattctttggttagcattagtaatgcttgtagacactcaaacaaggaaggcgaagtcctgatgatgatttattgtatcaatacctcattttatttggttgtggtctcagtttgcctcactggagaatccactaagaaagatggattttaatgggaagaaaagaattattttctacatcgttcctcatctcttgagtttgtcaaaaagttttctaagaggcagtgtgaagagccagagatgtccgaaattgcctgacttcatgttttggaagattcctaagtcacatgaaatcatctatcaaacacttgtcttccaaacgtgtgattatgtttttttttcctttgcgtgtgggcactatgctttattagaacacattatttttaatcatagtattttttctttgcctctaagaaaatactttcttaatgctcagaaagttgcttccaattaatgtttttttccccttaaaaagagaagctttgagagatatttttgctttcatagctagaacagttgaagtcttcaactgaggttttatagcagattagacatgggtaaatgatgtctgtaatgggttgagttactgagatgacaatctcctgtgccatttggtttgaatgtacttgataggctgcttcaaatcagtcacttcaatgcattttgtgtaaacccagttgtccttttttattcctctttagacataaatgtgctaactattcctttctatacacaatttattttctaagattaaaaataataattgctaggtttggtggcacatgcgtacagccccagctacttaggaggctgaagcaggaggatccctagagcccaggagttctgggctgtggtacactatgccagttgggtgtaagtttggcatcaatatggtgatgtccctgaagcaggaaaccacaaacttgcatcaggacgggtgaacccagcccaggttggaaatggagcaggccaaaactcccaggctgatcagtaatgggatcttgcctatgaatagccagtgcactgcagccaggacaacagagtgagaacctgtctttaaaaaaaaaaaaaaaaaaaaaaaaaaaggtaatatttattatattattcaggtttcaactctgtagcaaaaatgggctctcatttccctaacttgagataacatagggtaggtccatatattttcattcttacagtggtcttttcatgggagtgaatgagttactctccactggtgattaggtaatactgtagaatgaagagttgtataatatattcatttacagctgtggattgtggtaaggactatgtccacagtgatattccaaagaattgggtttatatttgtgcttcatctgttaatcccaggtgtcctcatgttgctgaaatatttagatagctaaaatatcccttaatttcacagatgaccaggaagaaattaaccaaggttttattgactgccatgtatgtcccatgatgcatttctgagcaaatgcttatcctagagaataactctgtatgaataaactcttggtatggcccatattactttgttttttgtttttgttattgttgttttgtgatagtcttgctctgtcgcccaggctgcagtgcagtggcacaatctcagctcactgcaacctctgcctcctgggttcaagcaattctcctgtctcagcctcctgggtagctgggactacaggtgcatgccaccatgcctggctaacttttgtatttttagtagagacagggtttcaccacgttggtcaggctggtctcgaattcctaacctcaggtgatccacctgccttggcctcccaaagtgctgagattacaggcgtgagccaccgcgcctggcctgtttgtttttttaacatgatttttctctaagcttaaataccacaaggccaaagagaaatggtcataatttaaaccattattatattgttgaggtatccctagctattattatagcaaagtgggaaaaaagtgtttattctattgaagttatgtaatgatccgacattaatgggaatatagaggagtcctaattaattggtataatttcacaaagcggaatggtattccttggagagttaaagacattctctttagtaagtgtaaaccaaagggcattttctttattcctgcttctaattccttctagcccagtgaattatttctcttttcactggtaatgtgatgaatgggaattgtttattacattgaagtgacttgaagtgaccttttgtgctttaggtgcaggttgacactgaaaaaaaaacaaaacactgaatttttcacacctatgtctgcattaaaggctgttttactaccggaagttacatagacttcctgcagtcagctgctgtgccccagtgccttactggtcctttgtagatttgccttaatgatttgtacaaatgactgggaggcggggatgctgcctgtgtcctggtgaaccttaatgaaggggccgtcttaggcacagtgcaaaacaagcatttgtcctgtactgttagagccaaaattgtgatgagcaatactgataattgtccagtttatgtcatctttcccagattttaaaatctgttctagatattcttagcttgaaccacttttgattgtgaaatgtattaggtgttgtcccattattactgtaaaatgaagttttgaatcttcttgttaataaactgtggatttcccctctcaatttcttaaacaacaacaaaaaaatgcttgaagattgtctttgagtgtaagatctgccttttcagaaagggagtgttagtttgtaatgttaaaaaataaagacctcattcaataaaagttgaagtcatcttttaa

SEQ ID NO: 757 - protein, 1006 aa, Homo sapiens
MSYSVEVSYMEIYCERVRDLLNPKNKGNLRVREHPLLGPYVEDLSKLAVTSYTDIADLMDAGNKARTVAATNMNETSSRSHAVFTIVFTQKKHDNETNLSTEKVSKISLVDLAGSADSTGAKGTRLKEGANINKSLTTLGKVISAEVSKKKKKTDFIPYRDSVLTWLLRENLGGNSRTAMVAALSPADINYDETLSTLRYADRAKQIKCNAVINEDPNAKLVRELKEEVTRLKDLLRAQGLGDIIDTSMGSLTSSPSSCSLSSQVGLTSVTSIQERIMSTPGGEEAIERLKESEKIIAELNETWEEKLRKTEAIRMEREALLAEMGVAIREDGGTLGVFSPKKTPHLVNLNEDPLMSECLLYYIKDGITRVGQADAERRQDIVLSGAHIKEEHCIFRSSNSGEVIVTLEPCERSETYVNGKRVSQPVQLRSGNRIIMGKNHVFRFNHPEQARAEREKTPSAETPSEPVDWTFAQRELLEKQGIDMKQEMEKRLQEMEILYKKEKEEADLLLEQQRLDADSDSGDDSDKRSCEESWKLITSLREKLPPSKLQTIVKKCGLPSSGKKREPIKMYQIPQRRRLSKDSKWVTISDLKIQAVKEICYEVNDFRHSRQEIEAIVKMKELCAMYGKKDPNERDSWRAVARDVWDTVGVGDEKIEDVMATGKGSTDVDDLKVHIDKLEDILQEVKKQNNMKDEEIKVLRNKMLKMEKVLPLIGSQEQKSPGSHKAKEPVGAGVSSTSENNVSKGDNGELAKEERVSQLMNGDPAFRRGRLRWMRQEQIRFKNLQQQEITKQLRRQNVPHRFIPPENRKPRFPFKSNPKHRNSWSPGTHIIITEDEVIELRIPKDDEARKGNKEESQEKGGKGAFKDPQFPWGSQGMRSQDHIQVSKQHINNQQQPPQLRWRSNSLNNGQPKSTRCQASASAESLNSHSGHPTADVQTFQAKRHIHQHRQSYCNYNTGGQLEGNAATSYQKQTDKPSHCSQFVTPPRMRRQFSAPNLKAGRETTV

SEQ ID NO: 758 - DNA, 4992 bp, Homo sapiens
ttccctagttatgtgaagaactttttgagaaaatcaatgacaactgtaatgaagaaatgtcttactctgtagaggtgagctacatggaaatttactgtgaaagagtacgagatttgctgaatccaaaaaacaagggtaatttgcgtgtgcgtgaacacccacttcttggaccctatgtggaggatctgtccaagttggcagttacttcctacacagacattgctgacctcatggatgctgggaacaaagccaggacagtggcagctacaaacatgaatgaaacaagtagccgttcccacgctgtgtttacgattgttttcacccagaagaaacacgataatgagaccaacctttccactgagaaggtcagtaaaatcagcttggtggatctagcaggaagtgaacgagctgattcaactggtgccaaagggactcgattaaaggaaggagcaaatattaataagtctcttacaactttgggcaaagtcatttcagccttggccgaggtgtcttttcctttaatagagtaaaaagaagaagaaaacagattttattccctacagggattctgtacttacttggctccttcgagaaaatttaggtggcaattctcggactgcaatggttgctgctctgagccccgcggatatcaactacgatgagactttgagcactctgagatatgcagatcgtgcaaaacaaattaaatgcaatgctgttatcaatgaggaccccaatgccaaactggttcgtgaattaaaggaggaggtgacacggctgaaggaccttcttcgtgctcagggcctgggagatattattgatacatccatggggtccctcacttcatccccatcttcctgctcactcagtagtcaggtgggcttgacgtctgtgaccagtattcaagagaggatcatgtctacacctggaggagaggaagctattgaacgtttaaaggaatcagagaagatcattgctgagttgaatgaaacttgggaagagaagcttcgtaaaacagaggccatcagaatggagagagaggctttgttggctgagatgggagttgccattcgggaagatggaggaaccctaggggttttctcacctaaaaagaccccacatcttgttaacctcaatgaagacccactaatgtctgagtgcctactttattacatcaaagatggaattacaagggttggccaagcagatgctgagcggcgccaggacatagtgctgagcggggctcacattaaagaagagcattgtatcttccggagtgagagaagcaacagcggggaagttatcgtgaccttagagccctgtgagcgctcagaaacctacgtaaatggcaagagggtgtcccagcctgttcagctgcgctcaggaaaccgtatcatcatgggtaaaaaccatgttttccgctttaaccacccggaacaagcacgagctgagcgagagaagactccttctgctgagaccccctctgagcctgtggactggacatttgcccagagggagcttctggaaaaacaaggaattgatatgaaacaagagatggagaaaaggctacaggaaatggagatcttatacaaaaaggagaaggaagaagcagatcttcttttggagcagcagagactggactatgagagtaaattgcaggccttgcagaagcaggttgaaacccgatctctggctgcagaaacaactgaagaggaggaagaagaggaagaagttccttggacacagcatgaatttgagttggcccaatgggccttccggaaatggaagtctcatcagtttacttcattacgggacttactctggggcaatgccgtgtacctaaaggaggccaatgccatcagtgtggaactgaaaaagaaggtgcagtttcagtttgttctgctgactgacacactgtactcccctttgcctcctgaattacttcccactgagatggaaaaaactcatgaggacaggcctttccctcgcacagtggtagcagtagaagtccaggatttgaagaatggagcaacacactattggtctttggagaaactcaagcagaggctggatttgatgcgagagatgtatgatagggcaggggagatggcctccagtgcccaagacgaaagcgaaaccactgtgactggcagcgatcccttctatgatcggttccactggttcaaacttgtggggagctcccccattttccacggctgtgtgaacgagcgccttgccgaccgcacaccctcccccactttttccacggccgattccgacatcactgagctggctgacgagcagcaagatgagatggaggattttgatgatgaggcattcgtggatgacgccggctctgacgcagggacggaggagggatcagatctcttcagtgacgggcatgacccgttttacgaccgatccccttggttcattttagtgggaagggcatttgtttacctgagcaatctgctgtatcccgtgcccctgatccacagggtggccatcgtcagtgagaaaggtgaagtgcggggatttctgcgtgtggctgtacaggccatcgcagcggatgaagaagctcctgattatggctctggaattcgacagtcaggaacagctaaaatatcttttgataatgaatactttaatcagagtgacttttcgtctgttgcaatgactcgttctggtctgtccttggaggagttgaggattgtggaaggacagggtcagagttctgaggtcatcactcctccagaagaaatcagtcgaattaatgacttggatttgaagtcaagcactttgctggatggtaagatggtaatggaagggttttctgaagagattggcaaccacctgaaactgggcagtgccttcactttccgagtaacagtgttgcaggccagtggaatcctcccagagtatgcagatatcttctgtcagttcaactttttgcatcgccatgatgaagcattctccacggagcccctcaaaaacaatggcagaggaagtcccctggccttttatcatgtgcagaatattgcagtggagatcactgaatcatttgtggattacatcaaaaccaagcctattgtatttgaagtctttgggcattatcagcagcacccacttcatctgcaaggacaggagcttaacagtccgcctcagccgtgccgccgattcttccctccacccatgccactgtccaagccagttccagccaccaagttaaacacgatgagcaaaaccagccttggccagagcatgagcaagtatgacctcctggtttggtttgagatcagtgaactggagcctacaggagagtatatcccagctgtggttgaccacacagcaggcttgccttgccaggggacatttttgcttcatcagggcatccagcgaaggatcacagtgaccattatccatgagaaggggagcgagctccattggaaagatgttcgtgaactggtggtaggtcgtattcggaataagcctgaggtggatgaagctgcagttgatgccatcctctccctaaatattatttctgccaagtacctgaagtcttcccacaactctagcaggaccttctaccgctttgaggctgtgtgggatagctctctgcataactcccttcttctgaaccgagtgacaccctatggagaaaagatctacatgaccttgtcggcctacctagagctggatcattgcatccagccggctgtcatcaccaaggatgtgtgcatggtcttctactcccgagatgccaagatctcaccaccacgctctctgcgtagcctctttggcagcggctactcaaagtcaccagattcgaatcgagtcactggcatttacgaactcagcttatgcaaaatgtcagacacaggtagtccaggtatgcagagaaggagaagaaaaatcttagatacgtcagtggcatatgtgcggggagaagagaacttagcaggctggcggccccgtggagacagcctcatccttgagcaccagtgggagctggagaagctggagctcctacatgaggtggaaaaaacccgccactttttgctgctgcgtgagagacttggtgacagcatccccaaatccctgagcgactcgttatcccccagcctcagcagtgggaccctcagcacctccaccagtatctcctctcagatctcaaccactacctttgaaagcgccatcacacctagcgagagcagtggctatgattcaggagacatcgaaagcctggtggaccgagagaaagagctggctaccaagtgcctgcaacttctcacccacactttcaacagagaattcagccaggtgcacggcagcgtcagtgactgtaagttgtctgatatctctccaattggacgggatccctctgagtccagtttcagcagtgccaccctcactccctcctccacctgtccctctctggtagactctaggagcaactctctggatcagaagaccccagaagccaattcccgggcctctagtccctgcccagaatttgaacagtttcagattgtcccagctgtggaaacaccatatttggcccgagcaggaaaaaacgaatttctcaatcttgttccagatattgaagaaattagaccaagctcagtggtctctaagaaaggataccttcatttcaaggagcctctttacagtaactgggctaaacattttgttgtcgtccgtcggccttatgtcttcatctataacagtgacaaagaccctgtggagcgtggaatcattaacctgtccacagcacaggtggagtacagtgaggaccagcaggccatggtgaagacaccaaacacctttgctgtctgcacaaagcaccgtggggtccttttgcaggccctcaatgacaaagacatgaacgactggttgtatgccttcaacccacttctagctggcacaatacgaccaggtcatctggcttccgagatcatcagagaagataagtctgtctctttcagctgccag

SEQ ID NO: 759 - protein, 1449 aa, Homo sapiens
MVAALSPADINYDETLSTLRYADRAKQIKCNAVINEDPNAKLVRELKEEVTRLKDLLRAQGLGDIIDTSMGSLTSSPSSCSLSSQVGLTSVTSIQERIMSTPGGEEAIERLKESEKIIAELNETWEEKLRKTEAIRMEREALLAEMGVAIREDGGTLGVFSPKKTPHLVNLNEDPLMSECLLYYIKDGITRVGQADAERRQDIVLSGAHIKEEHCIFRSSNSGEVIVTLEPCERSETYVNGKRVSQPVQLRSGNRIIMGKNHVFRFNHPEQARAEREKTPSAETPSEPVDWTFAQRELLEKQGIDMKQEMEKRLQEMEILYKKEKEEADLLLEQQRLDYESKLQALQKQVETRSLAAETTEEEEEEEEVPWTQHEFELAQWAFRKWKSHQFTSLRDLLWGNAVYLKEANAISVELKKKVQFQFVLLTDTKPLPPELLPTEMEKTHEDRPFPRTVVAVEVQDLKNGATHYWSLEKLKQRLDLMREMYDRAGEMASSAQDESETTVTGSDPFYDRFHWFKLVGSSPIFHGCVNERLADRTPSPTFSTADSDITELADEQQDEMEDFDDEAFVDDAGSDAGTEEGSDLFSDGHDPFYDRSPWFILVGRAFVYLSNLLYPVPLIHRVAIVSEKGEVRGFLRVAVQAIAADEEAPDYGSGIRQSGTAKISFDNEYFNQSDFSSVAMTRSGLSLEELRIVEGQGQSSEVITPPEEISRINDLDLKSSTLLDGKMVMEGFSEEIGNHLKLGSAFTFRVTVLQASGILPEYADIFCQFNFLHRHDEAFSTEPLKNNGRGSPLAFYHVQNIAVEITESFVDYIKTKPIVFEVFGHYQQHPLHLQGQELNSPPQPCRRFFPPPMPLSKPVPATKLNTMSKTSLGQSMSKYDLLVWFEISELEPTGEYIPAVVDHTAGLPCQGTFLLHQGIQRRITVTIIHEKGSELHWKDVRELVVGRIRNKPEVDEAAVDAILSLNIISAKYLKSSHNSSRTFYRFEAVWDSSLHNSLLLNRVTPYGEKIYMTLSAYLELDHCIQPAVITKDVCMVFYSRDAKISPPRSLRSLFGSGYSKSPDSNRVTGIYELSLCKMSDTGSPGMQRRRRKILDTSVAYVRGEENLAGWRPRGDSLIHQWELEKLELLHEVEKTRHFLLLRERLGDSIPKSLSDSLSPSLSSGTLSTSTSISSQISTTTFESAITPSESSGYDSGDIESLVDREKELATKCLQLLTHTFNREFSQVHGSVSDCKLSDISPIGRDPSESSFSSATLTPSSTCPSLVDSRSNSLDQKTPEANSRASSPCPEFEQFQIVPAVETPYLARAGKNEFLNLVPDIEEIRPSSVVSKKGYLHFKEPKNWAKHFVVVRRPYVFIYNSDKDPVERGIINLSTAQVEYSEDQQAMVKTPNTFAVCTKHRGVLLQALNDKDMNDWLYAFNPLLAGTIRPGHLASEIIREDKSVSFSCQ

SEQ ID NO: 760 - DNA, 32625 bp, Mus musculus
  misc_feature (1)...(32625): n = A,T,C or G
ccccaagaatgagcctgaccgtggttaagcatggctgggggagaggctcagggcttctacctctcactgttggactctttgcttctgatagatgtagggaccaccagactccaaggtgtagtatggtcctggctaaattaaatgggtcaggaaacaaaaccgagtcatgaatcagggaaaaggtctggcagggaggaagagagttgatagaaattggagggagattttaaaaagttgatggatgggtgggaaggaacctagacgcctgcacacggaatgatggacacttggtggctcggcttccacccagtcaccaggcagggccttgcaaaagcttctctccgaggaaactgatctcacaagagcatccaccatcagtcctgacgctgattgctggcttgtgtagtcctgtacgcagtgagcccttccagtgtgcaaatggggttagttagtggctgtggtggtgtgactctgaaatgtcacactcggtattgtgtttcaaatgtttgtccccaagtggtggtacacttctgggaggctgcttgaagctttggtaaagtaaggtgtggcgagcagaagtaggtcattaggggtgagggtggtacccctgagttttactgtgctgtctgcttcttggtcagccgtgatatgaacagcctctgctacagacccctgcaagccatgaactagctgatcatgaccatgcctgcctggcagtggtagactgagaccccctgaaactgtgagccaaagtaagtctctccttcctaagtcatttctatgagttattttgttacagggaagtagaagtagctgacacagtacccttacatttgacctggcagccctggatgggcttacatagttaggggcttagtaggaatgacccagacagacagacagaaaaaggaaaccagaagttgccacatttgtttttggtttctgggttttgttgttgttcttgttgttgttgttgtttgtttgtttttcgagacagggtttctctgtgtagccctggctgtcctggaactcactctgtagaccaggctggcctcgaactcagaaatctgcctgcctctgcctcccaagtgctgggattaaaggcgtgcgccaccactgccccgaaccacatttgtttttaaaggagagacaaaatgtgcttgtgcattaaaactaagttaacagggcctgagatatagttcagttggcagagtacttgcctagcatgcacaaagccctggttcaacccccaacactgcgtaagaaaggtgtgtgtggggtgggggtggggcggctcccggaacttgggaggcaggaggatcagaagttcaaagtcattcttagctacacagtgagttcaaggttaccttgagattctgtctcaaacaaaccccagtgggatcagaaataatggttttcttttctttttttttttaagattaatttattattatatctaagtacattgtagctgtcttcagatgcaccagaagagggcgtcagatctcattatgggtggttgtgagccaccgtgtggttgctgggattcgaactcaggaccttcggaagagcagtcggtgctcttaaccactgaaccatctctccagcccaatggttttttttagggctctggttggttgtctttgaactgtctatgcagtctaagatagcctcaaactcacagagatccacacacctcccaagtgctggaattaaggcatgcacagccactgcttggctctgttattatttttagactttgtgtgtgtgtgtgcgtgcgtgcgtgtgtatacgtgagtgtgatgtcctttgatccaggtcagaagcttcagatcctatgggtctggagttaaggtggttgcgagccacccaaatatgtgttctggaagccaaactccgctcctttgcaagagcagcgaggactctaaccacggggctatttctctagtctctggtttgggtttcttgaaagagggtctggctggtctaggaatctttatgtatatcagttagccttgaacttgggacagtcctcctacctctgtttctggacggctaggatttgcagctgtgcatctctgtgcataggtgtctcacaatatagcccaggctggccttgaactcatgaacttcctacttctgcctctttggtgttagggttacaggtatgtaaattttcaaaaatatgacacagaactttttatgtctttttgaggaaatggtggaagaaagtcttccaggaatgtaagaaacagagatggtgagccaggtaccatgcctgtatctctgtactgagtaggctgagactagaggtcaacctgagccacaaagcaagcagaaaaactgaaaccaaagtggatacaatgtacaactgggtctatttctcatttggctttgtctgccaaatcactttcagtgtttcaagtgctctctctgagccttgggaatgtctggaaaacaacactatgttaagttttgttttcaattactataactaaatgcctgtggtcggctacttacaaagaaaagatgtttattcagtctgtagtcttgggggccaaaagtccagggtccagtgactcagttgttggtttggtctccaaacctattgctttgtgggaggaacaagagagatcctagcactaaactggaggccagaggtgggcgggagctacactcacctttcccaagtcatttccctcccagaggatctgggactggtcacctggtttcctgcctcagggttttcacacttgtcctgcctccttctcactacctggtccctgtggggcccgtctttgctggatccttcactccctggagcctttgcttcagtgtggcctccttcatccatggacggtatccaccactaccatcctccatccacaagacacctccctacaagtcctttttgtttcaatccagctctttggctttatgaaatcatcttgttcattctatttcctttcgattttctgtcttcttctctcattagactaaaaattcctaagagcaagggagactgatgcctgtgggcttcctgctgaccgtattggtcagtggttagtgcgaggaaccgaggaacatggctcttcacggcacccttctggggaacctccagggttgtgtcttgggggctttgcacttttgttggcatccagggcaggatgacagtcttaagaatgtcctttcttggagaacatccctagagatttgctgtgaggttaccctttggctaaagcacctttgggctctgtgtaccctgaagtccccatctgtgttggtttccctcctcggctgattgcacctttattcgaagggctgcctgaggttgaggggcttctgccaatagccctctttgaaagccgtgcgaggttcagcatctactccaggtcactgttcacatgctccacaaatgcttttgctcggtgctctccctattcaccattgagacggagaccagtcttaggtcttccagcctgagtttatggactcttagattttgcatagtcaccctctggaagtttctgtgactcagactctcttggactaattaaattgtcatgttgactctgaaatccaggctttagacagatggcttctctgcgggctatagcatgaatgttctgacgctccacagacatgtagagatggctcccaggggaccttgatgctcctcttctggagtgactctgggtcccctttagagcaagcagcatgagggagtatgacgtagctttcccaggggtccaggcctcagggataacgatggttatcatccagacaagggggacacaacttcccttctcgttcttgttgcctgtccccagtgtgtcctgccaaagtgactcatatgtttccataggaggccacttcccaggactcaggactacaggaccccaaagattgcctttgttgacaaaggccggggagctagcctgttcagaattagccatatttgccatggaccccagaaaaaggtggagtttattagttcagagattgtggccactgagagcctagacagaggctcagcagaaaggcaaagaactcctggggaacccagagtttggagcaagactccagccagtggggaccctagctcagggttttcctggcttgcttgcaggcctctcccaagtctcatagggccctgaagcattcctggatgccgatggtagctcagcatgtttgttgaagtctttggagaagttctcctctgggtctatgagtgtgtccatacacatgtacacagatgtgcgcagaagtcaggacaatcgcaggtcttcttcctcgggaaggcttccatatttttgtttgagatagagcctttcattgacctgctaatcaccacctaagctttgctagctgaccagtgagttccaggtttcactgtctcctcctcctgtcccgtggtattacaagcgtataccattgtacccagctttttttgtttgtttgttttctttgtgtggtcctggctgtcctggaactcactctgtagaccaggttggcctcaaactcagaaatctgtctgcctctgcctctcaagtgctgggattaaaggcgtgtgccaccactgcccagcttgtacctagctttttatgtgggttctgaggacaccccaggcttgcaaggcaagtgctttcctggctgagctgtctcaggctaaagaaagctggctggggacattccagaatttggtaaaagggttgataggagactcctaaatctaccacaatgtggtccgatagctgattttgtggatcatgttcaaaacttaagggactgagctgtgtcctgtggcaccttctcagacactttctggataatataggtgcagacagcaaagccaggatgagtgcctgagatacaggtattgctcacagtcctggccttcactgaccttctaagtcattagaagctgcactcctggcttatcacttgatggcggcccagagggcagatattggctgtcagagacagccaatctgcaaggaaagaactttctaaacaagaagtgtctgaaaggctattgcttcattcgtggaaaaggacgctgtctgtgggagacggcagaaaacccaacttgatgcacgttattgggatggtttagtgggcaagagtgagagccaggcaagccggcatctggagtttgggtccctagagcccatgtaaaaagttccatgcagtgggagatggaaagatggggctagggacaacgtggctgggagctcgctggccagctagtttggagtatgagtgacacaaacaagaccagataagtaaatgtaacattttcatcatttatttttatttgtctattattttgctcattggtgttttgtctgcatgtatgcttgtgtgaggagtgtcaggtcccccgggacagaagttagagatatgtgtgagctatcatgtggttgctgggaattgaacctgggttctctgaaagaggagccagcgctcttaaatactgagccatctctctagccccaatttttttttttttttaagacacagaatatctttgtatctacctggctgggccagaactcactatgtcaaccagactggctttgaatgctcagagattcacccacctctaccttccagctaattaaaaattaaaaaagaaaaatcaaagccaggcgtggtggcgcactcctttaatcccagcactcgggagacagaggtaggctaatttctgagttcgagaccagcctggtctacaaagtgagttccaggacagccagggctataaagagaaaccctgtctcaaaaaaaccaaaaaaaaaaaaaaaaaaaaagaaaagaaaagaaagaaagatcaaacctgattcaaatgctgtaaattaaaacaaaatccctgtagaagcccagggaatagatatggctgctggtgtggctggatccaggtgccctggggggttgggggacttggtgctggagaggtagagagctgaccagcagttaagagtggttactgctcttagagaggttcaagttgagtttccatgtgggatgttcactactgcttgtaactccacttctcaggattttggtggctctgccctctaaggggaggtggtcctcgtgtgtttttacctacataccatagccatgctcagcatacccatatatatggatatatatatatccatatatatatatatatatatatagatatatatatggatatatatatatatatatatatatatatatatatatatatatatatatatgcattttttttttcgagacagggtttctctgtgtagtcctggctgtcctgaactcactctgtagaccaggctggccttgaactcagaaatccgcctgcctctgcctctcaagtgctgggatcaaaggcgtgcgctaccattgcccggccatatttttaaaataatattaagagagagagagagagagagagagagagagagagagagagaccttcagtgccctccccatcgctatagaaaccaggaaggatggtggtgcctgaggaagtggagaggaggcagaactccagggaaggacaaggctgcctgcatcatgagggaatcttttcttttgagacaatgtttcttgtgccctaggttggccttgaacttgtgtgtattggctttcattccccgcttccgttgctctgctctgtccatgagattggttgttctcaccagatgtctgtagagtcttccttcctccttgcttccacctgacagtcagtgggaagaatagagtgcgtcctgctgctggcttccacctgacaagtgtccacgtggttgactacaatgctttaaactctcctaattgtgtcttcggctgtgtctgtgttggaggtctgttggaggtctgttgggtatgtgcctgggtagggactatgattgtcttggttccagggcacatgcatgttccactctggatagagccaacagtttacctccgtggctgtaccagtgtgcaatttgggggtcaccctgagtccctgcacctgcttttctctctcttttgtatcttactggaaatggaaggttctagacttcttccaggaaagagagaagtggttccctttctctgggcttgatggtctatgcacaccatggggtcttccccatggttaagtgaagttgtttatagacataattttctgccaccagatgggtaaatgcagctgtgaccttccttttcacgggactgaaagacaagaacacaaaacatctgcttgcctcagacccagacctttgggtagggttcctcagaagcccaagcctgtattcatgtgaccgaaggtacccctgaattcccaagcttggaaagaatgcattgtagatgcaaccctccagattcctgcctattcccctgcccgaattttaaattaaaaaaggaaaactttggccttagaaagaggaaccccaagtaggacgtggtttcacactcagaggaagtaggtaccagcagctactgggggtgggggcggggaggtgagaggtgggggcacaggaggcatgcccggagcagctgctgcccagtgagtcaggcccagcccagttggtaccaccaccaatagggacatctctcataaaccaaatatgtcatttaaatccaggagaatgtgaccttgtggtaggcatggacattttctgttatgttttggtgttgggctccaattcagagcctcaagcatgctgagctgtccttgagctacgcaccccaattcacaagtctttttgtctgtctgtctttctttctttcttttcctcctcttttttttttttttttttgagatagggtcttatgtagtcgaggctggtcttgaacttgcaatgtagtagaagatggcattgaacttctgatcctcctgtctctgcctgctatgagcagggattacagatgtgcagagccgtacccaatgtgtttatgtggtgttggcaagtgaatgcagaggggtgtgtgtgtgtgtgtgtgtgtgtgtgtgttggtaagtactctaccaactgacccacacaccctcagcctagaattctggttttttttaaagaattaaaatagggcaggcacagtggtgcactcctttaatcccagcatttgggaggttgaggtttcacagagtttgcggccaacctggcctacatagtagagactctatttcaaaaacaaaaccaaaaaactaatcaaaataataaagcataaagtagacaaatttgattatatgaacattaaagcttctttcagcactaaatgggaaatctgtgggcccccccccccccgtctccccctcctccaagtctgtgcagttgggggagggggggagggggagggggggaggcagaaagaatgcggaagcccaaggctggtgaggagggttgcaagcaagtgatgttttcttgatatgatgtggctgttgcatccagggactcacagaggcagtaggctccttgcaaaggacctacctgcacaagcctgggtctgtgggtgtcccacagctcggctctgaagagtcactaggcaggcaggttttcaaagctcactgaaaatactaggaattgctcatgaacgcacactagtaataagagtatgaaaacatgcctacagttgattaagtggctagattccaggttgcagtgacctggaagggggaagctggtggcgacggggagggatttggtgactgggagtgtgggtggtgaacacaccctgtgtcctgtgatctgttatgttttgttattgctgtggtgctgtggagggggcagggggtggctgagggttggcatgaccgatatcgtaactccttagataaagtcatgtattctttctccgtgcgtgcgtgcgtgcgtgcgtgcgtgcgtgcgtgcgtgcgtgcgtgcgtgtgtgtgtgtgtgtnnnnnnnnnnnnnnnnnnnnggagggggggaggcagaaagcatgcggaagcccaaggctggtgaggagggttgcaagcaagtgatgttttcttgatatgatgtggctgttgcatccagggactcacagaggcagtaggctccttgcaaaggacctacctgcacaagcctgggtctgtgggtgtcccacagctcggctctgaagagtcactaggcaggcaggttttcaaagctcactgaaaatactaggaattgctcatgaacgcacactagtaataagagtatgaaaacatgcctacagttgattaagtggctagattccaggttgcagtgacctggaagggggaagctggtggcgacggggagggatttggtgactgggagtgtgggtggtgaacacaccctgtgtcctgtgatctgttatgttttgttattgctgtggtgctgtggagggggcagggggtggctgagggttggcatgaccgatatcgtaactccttagataaagtcatgtattctttctccgtgcgtgcgtgcgtgcgtgcgtgcgtgcgtgcgtgcgtgcgtgtgtgtgtgtgtgtgtgtgtgtgtgtgagagagagagagagagagagagagagatctcacggtcatcaagctggttttgaacttactatataaccgaggctggctttgctctcctcctgatcagcccccttcacctcccaactattggaattgtaagcaggtgccactgtgctgtggccagctcgtcagcgctggttttaagctaattggtctctggccagaacatttttaagaactgaagagttttatctttggttttcaagcatctacctgttcttgtttcccactgtgggtcacctgtcggccacagtgcggtcttttggcctatggcatgtccacctgtaataagaagcacctcggcctatagggtggcttaaattggtgggagtcacaagccacctagaggcaggatgctgcctcatgtgtagcaagctttgcatgtcctcctgtggcccagatctggccgtcccattggccaaagccttagttcatcatgcctttgcctttcccacaggaaaacagacctcagagaagtaacacaacaggatgccccctggggtggactgccccatggagttctggaccaaagaggagagccagagcgtggttgttgacttcttgctgcccacaggggtctacttgaacttccccgtgtcccgcaatgccaacctcagcaccatcaagcaggtagagccatggccgcttctcacaccttgatgctcagggagacactgttcacagacacagaatttcagggcaaaaactgtgtgtgggaactgaccagaggcaggcagccttggctgccatttctcaggagcagggcaccttattttcctttccccnnnnnnnnnnnnnnnnnnnnnnnnnnnnnnnnnnnnnnnnnnnnnnnnnnnnnnnnnnnnnnnnnnnnnnnnnnnnnnnnnnnnnnnnnnnnnnnnnnnnnnnnnnnnnnnnnnnnnnnnnnnnnnnnnnnnnnnnnnnnnnnnnnnnnnnnnnnnnnnnnnnnnnnnnnnnnnnnnnnnnnnnnnnnnnnnnnnnnnnnnnnnnnnntcttctctctctctctctctctctctctctctctctctctctctcgatataggatctcactggagtaggctatactagctggccagcaagtcaacctttctccacctcttccatactgggattgcaaaagagtgctattatccccagccacttgttttgtttataatttacttatttttatttcatgcatataggtatccaccatatgtgtgtctggtgtgcaacaggggccacaatagggctttgggtcccctgaaaccagagttacagatggctttgagccaccatattctgccgagaattgaacagaggcagccagtgctcttaactgctgtgtcatctgtccagtccccctctgcctctaaaatgtggattccgaggaactgactctgtcctgatgcttacaaagcacatgtcctacccgctgagcgcttaccctcagctcttaccctcagcccttagatgtgaagtctacaagatacaatttctaagaattgtctcaaaacctgtggtttaaactccacttatcattccaaagtcagcttcccctttaacagtatgcatttccctttactagattgctagattgcgagccagctttggggctgcctctggctgggctcgcatcccgctcatgactgggcggtcattttcggaaccactctgtccacagagcaagggccttgcaagccaactcgtctttagagttgtcaccccggcagtaaacaccattgttagaaagaggtttggggtttgctgaatcattttcagggtgatttactgagtgagcatcgcacacatctggatggcatttggtggtttctgtctatgacttagacagggctctgcaacccactaagtgtgggatctactggattgtgttttgagcgggcgaaggatgagaccttacctcggaattttaaaagccataaatggaaataggaaaaccaactgcaggaacaagaatcatctttgtgcccaccctagatttcctttaatactatttttttcccactatggaagcaatatagactcactaaaatttaggaagataagaaaaaggcaattaggagtatagctcagtcagtagagggcttgcctacaacacatggcttgcctacaacacatggctcacctacaacacatggcttgcctacaacacatgctaccctgggttctatacccagcacatcataaactgggtgtggccatccacacatggaatcctggcactgggagactggagggtcaggagttctgggttctcctaagctacacagtgagttcaaggatattctgggctcttgtctcaaaaaaggagaggaaggcaggctggcgagatggctcagcaggtaagggtgcttccaagcccacaacctgagtgtgatccccaaaaccaacatggtagaaggagaaagccaactcctcagctgtccactgacctctgcacgggcaccagtagatatgtcctccctctaccacaataagtcaacaagtgttgaaaaacagagaaagaaggaaaaccatttgtgattgggctacgtgagataatatagtcaatacctccactagttcctggttttggtttggtttggtttggtttggtttggttttttgagacagggtttctctgtgtagccctggctgtcctggaagtcactttgcagaccaggctggcctcgaaatcagaaatccccctgcctctgcttcccgagtgctgggattaaaggcatgggccaccacgcctggcggttttgttttttaataagaatttttacatttatttattcacctgtgtatgccgtggcatggtttggagatcaggggacaacttggaggagtctggcacccccttctgtcgcttagggatcaagttcagatggtcaggcttggttacctgtgcgtgtgtacctgctgggccatcttgctggggctcccagcacatttcatacctgcactttagtctcgggataaatctgacggtgaacttttatgcctctttttttttttttttaagaaaaaaaattttttttgaaaatgtgtatgagcactttatctgcaaatgtggtcgggagagggtgtgactttcacaagaaactccagtttcagggcatcttgagctgccacgtgggtgctagcagctgaagccaggtcctctgcaagagcaacatgtgctctgaacctcagagccgtccctccagcccccctgtatctctcagaatggacaatgtaacacttgatctcggctataagctttatatagatatactccatgttggtagttcatgcctgtggtcccagcacttaggaagcaggggcagaacaaagatgggtccagcctggtctacaaagggagtaatgatagtggtacccatagtnnnnnnnnnnnnnnnnnnnnattgccctgcccccacaatcgccccctgtctcagcaacgccccccccccacgatgaactgagggcagagacaggaagtttatcgacatggctagtcttccggtgtgcgagcttttgtcttctcggggtctccctctgcccctgtgggagccctgtaagggctaactgtgaccctctctcccaggtgctgtggcaccgtgcacagtatgagccactcttccacatgctcagtgaccccgaggcctatgtgttcacctgtgtgaaccagacggcggagcagcaggagttggaggatgagcagcggaggctgtgcgacatccagcccttcctgcccgtgctgcgcctcgtggcccgagagggggaccgcgtgaagaagctcattaactcccagatcagcctcctcattggcaaaggtatacttaccgggagcaggaggctggccccacgtgccttgacattgtcctgatctcttcctctcgtcccctcgaaaaggtctccatgagtttgattccctgcgggacccggaagtaaacgacttccgcactaagatgcgccagttttgtgaagaggctgctgctcaccgccagcagctgggctgggtggaatggctgcagtacagcttccccctgcagctggagccctcagcaaggggttggcgggccggcttattgcgtgtcagcaaccgagccctgctggtcaacgtgaagttcgagggcagtgaggtgagcccctcccccattccttctcccagtagcatatgagggcatctgccaggtccctgtgcatgccaatgggcttagctaattgtctcatcgggcaaatctggatttatttttagtttactttattctatgtgtatgaatgttttgcttgtgtgtatgtaagtgtctagtgtctacagaagtcagaagaggatgtcagatcccgtagaactggagttagagacggctgtgagccaccatgtgggtgctgggaacccacccaagtcctctgcaagggaagcaaacaatcagaaccgccaatcatcaggcagatctgacactgcagagtgcctccctccctccctccctccctcccagtgtttcctggatgttggttgcatcccttgattagcaaacacctagacatgacttggagatgcggctatctctcataggcagccttaccttacctctgtgccctagaggcctctcggactgcagagcagaaggctgacctccttcttcctacaggagagcttcaccttccaggtatccaccaaggacatgcccctggcactgatggcctgtgccctccgaaaaaaggccacagtgttccggcagcctctggtggagcagcctgaggaatatgccctgcaggtgaacgggaggcacgaatacctctacggcaactacccgctctgccactttcaggtaagccttcccgtctgcccgaatgtggtcccgggaacatcaagggaaccgacttagggaatgagcgggtgcccccccatcagcagctcacccagcccctctcttccagtacatctgcagctgcctacacagcgggctgacccctcatctgaccatggtccactcctcctccatccttgctatgcgggatgagcagagcaatcctgccccccaagtacagaaaccacgtgccaaacctcccccgatccctgccaagaaggtgaggtggtgtattcttggtctgctgggatgaaagcaggagacccatgggttcaggggcctgtgattgggtgaccaggggcctgttgggatctgtgtgaactacagggcagcctccactgtcctcttgtggctcttaggggtattggggacccttgtgcatgtgcacaacaggttttctgataaaaagaggagaggtatcttattctttgccactcactccgtctccctacttccccagccctcctctgtgtccctgtggtccctggaacagccattctccattgagctgatcgagggccgaaaagtgaatgctgacgagcggatgaaggtagggggctccccggtcagatgagggagccactgttttctatacaaacaaggtggctgtggccaggaggggtggcagcggaaggagagtgggaagatgtcacacgaaagccacctgaccacattacccagcctccctgcctggagtggttgtaagctgcttcaaaacaggaagggggagtggggtgggccagccagccagagactgattcgtggaaacccgggcagagcagatttctgtgtatttgactttggtggaggttgtggggatgaaagaggcatccggggaggtgtgagaggtgcaaggaagagcctgctgcagctggtctgggtatggctgcagcctagatgggtagctgccttatcccctggggtctgaagacagtgggcgggagtgaggaggcacatggtaccctttggtttctttaaaaacacttccacacgcatcacatctgccttccaggtgcaggtgttattgttccatctgtggaacaggaagcccacagacagtctggctaactaactccataactttacaaacttggagggttgggtacttgggtatgggatgatgggtaaggttcaaaaaagggcaggcagtcttaggtagagccagggagttgtggaattaccatcttctattgaagaaactgaggtctggatgggaaggggcatgccttgggctatcaatgcactgtggcctcccctgccccatggcttcttgtcctacttgactagtggctttccctctaagaaacacacacacacacacacacacacatcacgagaaagtagattcagacccatttaagaattaggacacttgaggagaaaattgttgtgagtagcctggtgagaagagagaagggatggagccaggggcctctcctcccattaatccaccccgacccccagctggttgttcaggccgggctcttccatggcaatgagatgctgtgcaagactgtgtcaagctcggaggtgaatgtatgctcagagcccgtgtggaagcagcgactggagttcgatatcagcgtctgtgacctcccgcgcatggctcgactctgttttgctctctatgccgtcgtggagaaggctaagaaggcacgctccacaaagaagaagtctaagaaggcggtgagtattggctggctgggagggcctcccttcagtgccccaagccacaggcaggcgggcaggttgaggacaggggtcctgggggaccctaaaccccaagcttctccaccatcttggatccctactcactctagggatagcctgtgaacggcctgcttgggctatctgctctggacctgtaggccagtaggcttttgtaggcagctccctgggtagaaagtatcctcagagggactaaagggcctgggccagcggctgtcttgagtggctgggcccctagtcaccaattccagtatttaaagtggctctcactctcactctgccgatgcatactgggtgtgagccaggagccgagatgcagcctgggctcgttttgtcactagggcaaggcagttggtcctccctcttctcaaacagggtcttcccttgagtctatctgggagtctacccttgaagcccagatcccctccccaattggccttccctccgaggtcagcaaatggggcttttgtgcctggccctaacccgctggtgtccttccccaggactgccccatcgcttgggccaacctcatgctattcgactacaaagatcagctcaagacgggggagcgctgcctctacatgtggccctctgtcccaggtgggcccagccccaggggagcagctagcagggggtagaggtccccaagcaagtgacttgacacacaccgctgcatctgtccctgtgtccagatgagaagggagagctgctgaatcctgcgggtacagtgcgcgggaaccccaacacggagagtgccgctgccctggtcatctacctgcctgaggtggccccccaccctgtgtacttccccgctctggagaaggtcagtgaagaccctttccttctagtcccctgggtctcaatcctaatgctgcgaccctttagtacatgtggtggtcacccccaccatagattatttttattgctacttcataaatgtcattttgctaatttttttaagaattaaaaaaaaaaaagatttatgtatatgagtacactgtatctgccttcagacacaccagaagagggcatcagctcctattacagatggttgtgagccaccatgtgggtgctgggaattgaactcgggacctctggaagagcagtgagtgctcttaaccactgagccatctctccagccccattttgctattgttacgaatcgtcatgtaaatactctatattttcagatggtcttaggtgacccctgtgaaaggtgtgttggacatcccccagagggctcctgacccaggttgagagccatggttctagacttttcctagtagaccctggccaccctgggattcgcctgctgctagggtaatgtcgttctgccaattcagggttttctaagagccctttgagctgccattcggtaacgtttggtgtggaaaggatgttcctggtatgttgtagcttcaagctaggatgctggtaaagactgtgcaaaatacccaaaatacatcctccagtgaggatgacatgttaggtctgaggtgtagcttcctgctttggggcctgacagggactgccctacgcccaggataagtgagagcctcatccattctgcagatcctggagctggggcgtcacggggagcgtgggcgcatcacggaggaggaggtgagctccggtcttggaatgggggagctgggattgggcgtggagcttggaggcctcaccctgtctgcgcccctcagcagctgcagctgcgggagatcctggaacggcggggatccggggaactgtacgaacatgagaaggacctggtgtggaagatgcgccacgaagtccaggagcatttcccagaggcgctggcccgcctgctgctggtcaccaagtggaataaacacgaggatgtggcccaggtgagtagagaggggggttcgggaagacagccccggggcagatggacagttcccgcccacccctacctgaccaccaagctgtcccagatgctctatttgctgtgctcctggcccgagctgcctgtgctgagcgccctggaacttctggactttagctttcccgactgctacgtgggctccttcgccatcaagtcccttcggaagctgacgtgagtcccagctggtgctacccctggggcccacagactccctgctcttccggaaggcagctttgccccaagcatttggaagtgggtgctgggttgggatgaacctggcctctacctcttactctgccaccgcccagctgtagaccaccgactttccttctcttcagggacgatgagctcttccagtaccttctgcagctggtgcaagtgctcaaatatgagtcctacctggactgcgagctgaccaaattcttgctgggccgagccctggctaaccgcaagatcggacacttcctgttctggcacctccggtagttgaacacacaacagcctattccttggaaatcctatgagggtcacggtgaagtgagaactcaggattctgagatcttgctgaactcctgtttccagcaggctcagatgtcctgatgctctgggtcccacctaggctgcaggcagggggtgtgagaccctgactggcaagactcagtaccattttttccccccagctctgagatgcacgtaccatcagtggctctgcggtttggtctcatcatggaagcctactgcagaggcagcacccaccacatgaaggtgctgatgaagcaggtaaggcttggtcagtttctgcttacaagctttagaaggctctccctggaccatcctcccacctgtggctggtacccaccaccacttatcaccaccacccattatcaccaccagggggaagcactgagcaagcttaaggcactgaatgactttgtgaaggtgagttcccagaagaccaccaagccccaaaccaaggagatgatgcatatgtgcatgcgccaggagacctacatggaggccctgtcccacctgcagtctccactcgaccccagcaccctgctggaggaagtctggtgagccccatgcctgaccccaccagggctcctcccagcctccctggcctgcggaggagcccctgtcgaccctactctctggccagcagtgtggagcagtgcaccttcatggactccaaaatgaagcccctgtggatcatgtacagcagcgaggaggcgggcagtgctggcaacgtgggcatcatctttaagaacggggatggtgagcaggcgggctagggagtctgcagaggcctaaccgtccctgtgccatcctgaggggtggtcctgggacctaagaacggatacccagtgggagaagagaacccaccagacactggtctccttcccacactgcagacctccgccaggacatgctgactctgcagatgatccagctcatggacgtcctgtggaagcaggagggcctggacctgaggttggggcccatcctgtaactgttgtgctctgggtcagcccttagaactgtgctttggaaggggagccaaactatcctcctcgtgtgggtgggaaagggctgatcccgggagagacgagggtagggagggcagccaagcatttgtcttgttcccttctgtatttcccggccccttgtgtagaggaagcagcagcagcttccccaaaccctggttatcttgggtaccaggagcctccgagtccttcctcctcctcctcagccacttgagtgtggcatctccaggaacagcctttgatcgtgacgttctgctggcctttctttcacctaggatgacgccctacggctgcctccccaccggggaccgcacaggtctcatcgaggtggtcctccactcggacaccatcgccaacatccagctgaacaaaagcaacatggcggccacagctgccttcaacaaggacgccctgctcaactggctcaagtccaagaaccctgggtaggtttcaagccttctcctcctgggaggtgtgacgtgggaagggttggcctatcagagacaagatgagagggaagggctgtgatctactctgactagttggctctgctgtggggccggcctgaatctgagtcagcatagcggttcttgtgtctcagttgccagtggttgtgtgtgataccactcaaagcttccgaccttagacatctgctgctgtgaatctcgggatactatacatgccttgcttgggacaactcaagtcatctgggacttctcccaaacctggagggtctaagatggagtccactgaatgcccagagcctgaagtcagctatacctctcttcttggcctctgcttgtgcaggctggtcctcagcctttccccacggtgcgcctaggtggtggggacaggctccagatcagagaggtattttaggcctaagctctgggactatatactttacattctgttgagtaaagcacgccaaaaggctagactcagagaaagagaggcagacccccttctggtaaagggttgcagtctggtgtaccatgacctccaatcttccccctcagggaggccctggatcgggccattgaggaattcaccctctcctgtgctggctactgtgtggccacatatgttctgggcatcggtgaccggcacagcgacaacatcatgatcagagagagtgggcaggtaggggcgtgtggctgggtggctttgctatagggctgacgtcccgtctggcctgctggcccctttgctctgggtttggtggccccgagaacgctgtgagccctgctggtgtcttcttcgcctgggtctctcaaggggcatggaagctccctgttctctgctttctcttcctccctgcggctcccggggttggatccctgctcactcgaggctaagggctccacttcgtccccgtcagctcttccacattgattttggccactttctggggaacttcaagaccaagtttggaatcaaccgagagcgcgtccccttcattctcacctacgactttgtccacgtgatccagcaggggaagactaacaacagtgagaagtttgaaaggtgagggctctgcccttgattatctgtccgggatgccaggaactctgggttcaagaacgaggcttgagacggtggtcggccctgctcctgccccctcccctggatgttgatggattgggatgagtgacctccaaacctgtttggcctccttgggccatgggggaggaggtttgtgtctccagcaggaggcagagggaggtcatcttgaagaactagccaacggtggataaccttcaacaacaaccttaagcaacagctcgggggaggtgggggtggggtgggaaggtgaacacccaggacctcacctgccccgcctccctcacctgcaggttccgcggctactgtgaacgagcctataccatcctgcggcgccacgggctgcttttcctccatctcttcgccctgatgcgggccgcaggtctgcctgagcttagctgctccaaagatatccagtatctcaaggtaagtgtccccgtgggggtcccttctgctataaaagccatcaaaagcagcgtgggcagaaaagggtttaattcaacttgtggtcgcagcagtcacatcatgaagggggatcaagggcaggcactgaaccagaagcaatggtttgttcagactaccttcttttacaacccaggaccacttgcctaggggatggcaccacccacagtgggctggacccttctttatcagtcattgatccaaaaaataaaatgccccaagggcttaactacaggcaatctgatgaaggcgtttcctcagttgaggaaatttcctttttcccagatgactccagtttgtattaagttggcagaaaaccaccaacacagtaggtcaagccagggccgagtcagggctgaccccatggctgtatacttcctacagcctgcctgggaggtctggatcctagtagggccccatctggtagactttcaggggtactgatggttgtggggtcctcatggcatccttgtcctagcagtgggcagggccagagtggtccagtttgctgggcctacttatgctgggtggcagatacgtggtaaccttccttagtcaatccatgtgtccctcataggtgtccacgcagcgcgcgcgcacacacacacacacacacacacacacacacacacacacgttcctgctcagtctgtgtgagctaagcttccttgcacattgtgtaaatgctttcatcccacgtcctccatctgtgataactggagcagagagtgacaggccaccagcctaaccagggcatcccctgaaggtcacatgacactctaaggcctctgacatttgagtcaacgggtggaccatctgggtttgggggtctgaatacagagagaatttagcatcctattgggcttcattctggattgcgtaacagagagcaaagtccctcagtgtcactctgctgtgtgtggtttgtccaggactctctggcactggggaagacggaggaagaggcgctaaagcacttccgggtgaagttcaacgaagctctccgagaaagctggaaaaccaaagtcaactggctggcgcacaatgtgtccaaggataaccgacagtaggaggcgccccctggtggtcatacggcggttccctcctggctttcagccctagaggtaaaaggacagtcctggagaccaggcatgtccagtggtcaccaaagggaccccagagcctgaactgtccctcatggggaagaaccacaccactgcttcttgtttacactggtaatttatttatgactcgaaatgtttaaggaacagaatagccataaatggaagtgcatttctgtgcaggggaggggtgatgtcctcatgatgtcatccccggtcagcactgtaacagcaccttgaggatcgaacccctagtcttccaacctgtgggtcttggcccagcaaggacagttcttggggccttcttcccaggctcccagcaggctgcctggaacaagcctggcggtcacctggtgcctccatcctcagctcacctccggccaccgttgtgtggcctacccaaccaagcctccggcagctcttgaggaagccaggagcttccctctagactcaggcacacttgctcggcactgctgaagcgacctcttgggtttgggtacgggaacgccctcacctctcatttgcgggtaagaacacgatatgtagactctgtcccttaccccgatggctggggtaagggacctggcctccactacagttagtgtattccaggccttgaagcactcagaccggtgccccatttagctccgtgtggtcacgaatcaagacgaagggccagccagaattgaagtcctcttcgaagttcgtgtgaggggcacacaaggcagctttatggacggacaggactgatctcttccagagctgaaatcgcagaaggcagctggggagctaggctcgaaaagtgtgagcaaggacgagaacggaattcagtgtagtctgggcagtcagaggaactcgagaaacgcagtctcggcctcctcccagggatccaaacgccagccacccgcccggcttttagagagcccagctcaggggtcgcacatgcttatcgtcccaccccaagcacatctccatgtatcagctgccacctcaggacctggatctcccggtagcattctgagactttgagaaccatcaccgctgtctcgccagcagcccagaacatggctcaaggagccccttcatgttgatgagcccagggtccagcagtgagcggtggtgcctccgcagcacccgctgaacccctagtctgccccaccaactctgaaataggaaacgtgtctgtgtgtgtgtatgtatgtatgccatgttatttattgaaaagagtctaggtgctctctggtgtggctgcagattctgcacaggctcggcctttctgggttgggtgtgtacttggctggaagacgggttttttgttaagttttttcctctcattgatgggggctgagaccagtttgtgcaaccttgacacaacaggtaaagacaggtgaaaagaaataaaaacgtttttatgttcttaagttcttggctcaaataacaaggggacttggggggatacagtgtactggttgagcccttgtctgcgaagtgcaaagcttcaggtacattccttagtaccataaaaattaataatccttgcccggcatggtggacatctgtaatcccagcactgagcaggcagaggcaggaggattgctttaagtttgagcccagcctatcttcataaatccctcaacccctgccccaacccgtacccaacaaacatgacagaatggaccccactcaggctggagttagaaccagaactttattataacgcatacactttctgacctagtgtcgatatacacatcttaaaggggaccctgcggctactgacacgacagtgtccctctcttcgttagcctgtttccatctaagaaagcagctacaggggacaggacatgggagggcggccacagacagcacggcggcatccttcgaactagcagcaacagcagcgaggactggatgtcccagctggagcagtctaaactcttgactgtgaatgaagagctgtgctgtgtgggtggtacctgctgtctcctatctgctgggtcttagatcttagcccaaacccaacagcacgcggcatcccatggggcctctggggaggagagaaaagattgttctggagcattgtagcagtttatctttgggcctcggggtctccttttggtgctgttgtgcagacttgctcagaaccgtggtcttccaagcgaggagcctgaccgcctgcacctttgctgtccgttcccagctacaccatttcaccaacagggaggctcacgttaataagcagaaaccatgtggctgccagtcacaggcgtgtacaggaaaggccaggggctttggcaacatcctggctgttcccagcctctaatgtgtttggaggctcgtggggctggcccccccagacagcacttgaaagccatggccccggccacgtggctgtacggaaaccctagcaagggtgggccccagtgacttgggcctctccaacctggtttcttgggagggaagagggaggaagaggccctcctggccccgcattctgactttacattcctgtcctggactactagcacagaggacacacagaatcccaatttatttacaaaatattaaaaagtcggttggccatctacatattaaccccctctgctctcccactttatacatgcactagtttgggaaaaaaaaataaaaaaacttttaaaaataagagaaatggttactgactgcgtgggagtaatttttcaccctctgtcgacaagtccgctcagtgcggcttctctggaggtcccaggtgctggtgtcctctccctggccgacagggaactccagacacacttggggtctgaggtgctgtggggcccctgccctggggaggaagcgccagcttctagcaaaactgcaatggtgatgggcggggagggtggagccggtggtcccacacaccaagcacgggaggactttgagcagtgggggaagggtctgcagacctgctggtcaaaatgattttgtacatcgtggacccgtggggctgggagagagtctggagagcaggcgctgagtgcgggtttagtagctgagtgtggagtcatcccattccagctgtcgggtggcattctggccgtctccggggcctccttcctcctcctcactgctctcagactcggcactggtgatgtcttcctcttcctccccatcttcgctctcctcctcctcctcctcctcttcctcctcctcactgctgtgctggtcctcatatgtctggcaaagagacgacggcgtaaatctagcctgtggccccatcgcccagtgtctatctactaaaagccacaaaggaaaacacagccaaccccacagtgacagaagggcctgagtggtactgggagtcgcctcgccaaagtgacccggcaggtgacgctctcattagcaacatggataccactcacatgggatggggtgctcaatgcagaggggcggagcttagtcctgtcataccacggacatcttggggtaaagaagccaagagcgtcagttgcctgcctatgctactcacggaggccttcagcaagggcttcctcatctgaaggtgacccccctaatctaatctcactgacccaacctgcaagcacatgaccagggtctgggtctccgtggcgctttgtggttggcccttctgtgcctacctccatggggttgacggtgatggtcaaggcagagtcatcccagtccatctcattctccttccccgtgtcctggtcccgcatcgttcgctgatgtgcagcccggatccgaaacacccccaggatgatcatgaaaaccaggaagctgacacacaccacaatcaccactgtcgccgtgctggggacaactgccatggggtttgaagaccagacacacagcttttgtgacgctgcttacacccaaagagctccccccatcccatccctccttggcctcctcaactactctaggtaggtcaaatggaatgtgtcagagtgcttcctgactcctaaaccctaggaggaagccctaagcctgccttcgctcactggctgctctgtggcagtggtgagcgagcttccttgtgtaagtgacagcattggggtagttgatgggcagtagttgtgagctacgcttgctaccaggtttgtgtgtatgtgtgtgtgtgtgtgtgtgtgtgtctgtctgtctgtctgtctatccatctggaccctacataccacagcatcctgacccacgtgctttcccccgtcctacctgcaaacgggtgaggattggccaggttgtgaccagacaggtccacaaaggatcgatgttcagggtggacgaactgtggctgggcagccatgtggttggcatgttccacggggttggctgtgtggatcacattcacctacagcagagagagtgtcactaggcaccccaagtgtacctgacaggtgaatagacggtcggcagtgctgcttcccagtctcccagctccaggctgggggcaaacagtgaccagaaaaacatcacctgtttacaacagtgtgacagtgtcacatatcccagaaacagtgtgtccgatggctcatttgtagtgtagcttacaaaagaaggcattcacatcagagtaggaagccaccctggccttaggcgacagctcagatcacctcttcccattcttctcaccagccaccctttggctcgagtacatttagtctcctccgcccaccacttggatcaaggtggagatggcgggcgggttgctcagaatttatttcttcagacctcggaggcgctggcccatgaagtcagctgcggcagaggccactgaaggtgtcagggcagagtgtactgtcctttagctgctgtggcctcagagtgactgtggcagtgttggcactcaacaacccgggacccaaatgtccctgtcaacggggccggtggtctgacacagccaccaagaccacttggtttcctgggggctcgttcacagacactctgtcgtcacactccaactctgctcctcaaggcctgtatgtctaccctgtggacacagccagccagccctgctctgagcctaaataagtcgccgccatgaacatctgaaaccttgggagcccgagtcaggacatctgattacttaatgttcgccctttgcggtgggcgccctggactcacctccaccttgaactcattgctgaggtagcgaccatttagttctgagcaaatgagcttgaacttgcgatccagcagggacctggtgtgccaattccgatagcgaaggaggtgcaaaacctcctcgtagcttgccatggtctccacgcctgtagggtgttgagggtgagcagcttaagtctggagcccaggtgggcccttgggtcagccaagctgagggctacaactctgtgactttcagagtcagggaactaaagcaaagcaagcaggcatttctccatcctggggcatgagctgtttgttatgtgcccagccccaccctgcacaaagcactgcccgtgccccctccatgtgcagaagggtgccagtgtgaggcggatgcaccagtgcgcatttgtaggcaatgggcaggccgaagccttcccctcacctgtgaagaccacacccaggtcagagtggcttgcttcgatgcccttctgctggaggcgggtcacgtctacctccaggctctcctgctctgcgttcagctcatccccttccactgtgacctcacaggtgtccaggtcatgcacaatttcctctgacaccagggattcttgcactgcaaaaaaaaaaaaagagagagaccagaaatagcagaggctgcannnnnnnnnnnnnnnnnnnnnnnnnnnnnnnnnnnnnnnnnnnncccacccccaccccacccacccaccgtgctgccacatttcaaaaccacagtcaagtgtaaggaccaagcatgggagagtcatcttcaagacttgggggctgagagtgtagtcagtggtagagtatatgattagcatgttgaaggcccaggcccagtcccagctcagtcaataaatatcacttagtaagttcccggtaagaatggagggatacttcctttgagctggccctcaagctaaatcttaaaacccaacaccagctacagccaagttccagacacagactcaagtgttaaaacattaaaacctccaaaaccagccgagcagtggtggcgcacgcctttaatcccagcacttgggaggcagaggcaggtggatctcgaagtttgaggccagcctggtctacagagtgagttccaggacagccagagctatacagagaaaccctgtcttgaaaaaccaatccaaacaaacaaacaagcaaacaaaaaaaaaaaaaaaaaaaaaaaaaaacccctccaaaaacttaaaggaaaaagggcccaagaggaggctgccagtcaagacagaagaggcaggccctgggggcagctgttacctgtggggtcctcggacccatctgcctcgggctccacctctctggtgatggtgctgatgattctcagctcagggaagagggaaataccctccgcgctctcaaactcagaagctgcgcgggcaaagtggtggacgccactcaggctgatcttaggctcctccggctgcaaaaccatcacgtagccttccaccgggggcacctcgatgcaagccgcctcgttgaaacacctgtcagagaggcaggaagaggagggagaggccgtgagagccttgtgcgagactcactggggacagcgggtggctactccgggaatgctgtggtcagtacatatcccacgcctcattcagcttccccagatcaagtgatgacccaccttcccgagcaggggacgcaaacaggctaaagacctaaaggcacacccatttcccgcccaggggtaggtgacagagatggatgctctgcgacctacttgacggtgctggtgattttgagcctgcggatgcctggtgtggggaactgccttgagttaaggtaggaaatgtgctgcatagccttatccagctctccaacgttgtctccctccaaggtcaagaccgcctggctggagcttgcttggatctgaaatcaacataccagagagaggagaggggaaccaggtcccaactgagagcggccaaaactgagaggcagtggagtcatcagccggggctgagtctcggagaagctgtttagtccccaagaacaagatgctcacatagggtaaagtccaggaccccgtgtccgccctaccctgctggccccactctcagagggcgaggctaggagtaaggtcaggggagctctcacctgcacgcctctgttggcatcttcagggacctgcaggtccagcccctccttgcaggtgtagagacagtcaatcaccttcttatccgccagtttcccagaacggactgtgaggccagccaggttacctcggaaaaactgtgtcatgtgcaggtcgccaccttagggagggaaggaagcgagaggttcgttgggcttgcggcccacaggctcctggttatgtctcatggccgtgttaccagtggtggtggcttgatggatggacatgcaagttagttcagaacaaaccctgttgttagccttgtagtttacatggaagcgcaatgaaaaattaaattgtttatgatcatgcacatggcctgaagaagagaggagcgggagaggggtccctcacccacaccctgaatgctcagaggcccctccaaggtccttatacacctggccattccttgacgacagcggccaaggcagtgccatcaccgaggtgcacagacactgcctccctcctctctacctgctcaacaactggcacctattggccaagtacactgtgggacgctcttcctggctctgaggacttaggagctgggcgtgggggaaagcctggctcatcacacagcaggaactctggatgcttagattctccacataaaaccctctggggccttctacatgtctacgtgtacagtactcacaagtgtatgcgtgttcacacatttgtgcatgtatgtaggcgtgtgtgcgatgcatacatgaacagtatgtatgttcatatatgtttgggtacatgtgtgtgtgtgcatgtgagtcaacctgaggttgactctggaaatcttactcactgagttaggcctcttggtgaacccagagtttgcccatatagctggtctaactagccagcttgttcaggaagtccctgtctttgacttctgatcactagaattacaagtgagccactggggtcactcgctgttcaggtatgtggtagggatctgaactccgggctccatgcttgcagagcaagcaagtcatgcattgagctatcttggcttcccggaagctctgttgagttctatctctgaggataacagtcagggaagacagaatgaagaaagcgaaaccctagaggacagacttgacagaccacaataaccagccacaaactacagctcgcctttatgttaatgaaggccagggccttgtcacgtcaagtcatccctagggaattgctatttctgtttagaatttctgtccactaggacaaaaaaatgtagaaactgctcttctgtcctgtggctcagctaactgatcaccatgaaggggcctcccaaacccagcctgggtaattttagtgggagcctcatgcagtgggcctggggaactcaaggcactaggatccccacaaacgcagcatacaggggtgtgatctgcccgcctctgcagggttgatggggcaggaagggaaggaagtcccaggaggcaatggggaagctcaatgcaggcaagcagctgaaatggtgtctggggtcgaaatgcaatctgctcatctcatgcgacatgtggaatggatcaacgtctcatctttaaaggaaacgctatagtgaatggggaatgcgggtgggggtggggtgatccatcaacctgcagaggccatcgtcgcaggctcagtctcattgccactctccactccctgaatactctggaaaggcaagacagacggcagaaaggaccaagaggttagggccttcacactgtgctttcaaggagcagccgaacatgggccccagagaccaaagtcccccttgactgctgggacacagttcacctgcatacaagcttgcacttggtgacctttccccagaggtcaccaagtgcaatcccccaatgcttcatttggggtttctcttttatacaggcacttcttcttgcagaaacacaaatcggtttaaagtaagataaagacgcaggcacaccaaattcgctgtttagctgacatgacagtgcattcctggaggtctggttgagcgtggcactggagcagacgtaaataaactttcagctcctggacagggtcttcttccctccagacaggaagcagaatgcacggacaaaacgggaggggctcataccaggtccagaatgtggcacatgaaacacgtgagtctgtactgtctgggttttaagtaccagaggaaggacgacgttaagagggacactggctgactgcctacggacctcacggcaggcctgggcactcacagagcacagtctctacagctgcagatcagggtagagaattcaaagcttccctggtgattagacacccatggctgagcacagaacccactccttctgtactgtgtttcggggaagtgcctccccttgtcacactggccactatgctgtgctcgttactccatgcaaccagtgtagagatgccctgggatgaggccagacgtgtgaagcgggttatacctccatgtccacccaccaggatctacagttaggggtgaagcagctgccaatggcccatcctccccactgtgatctatcggggagaggggttccacattcactgaaaggcaaagggcagcttttcccgtgtgaactgaattttaaacagcatgtgttggtaagggctagagagatgggtcagtgggttagagcatgggctattctttcagaggatccgggttcagtt

SEQ ID NO: 761 - DNA, 3132 bp, Mus musculus
atgccccctggggtggactgccccatggagttctggaccaaagaggagagccagagcgtggttgttgacttcttgctgcccacaggggtctacttgaacttccccgtgtcccgcaatgccaacctcagcaccatcaagcaggtgctgtggcaccgtgcacagtatgagccactcttccacatgctcagtgaccccgaggcctatgtgttcacctgtgtgaaccagacggcggagcagcaggagttggaggatgagcagcggaggctgtgcgacatccagcccttcctgcccgtgctgcgcctcgtggcccgagagggggaccgcgtgaagaagctcattaactcccagatcagcctcctcattggcaaaggtctccatgagtttgattccctgcgggacccggaagtaaacgacttccgcactaagatgcgccagttttgtgaagaggctgctgctcaccgccagcagctgggctgggtggaatggctgcagtacagcttccccctgcagctggagccctcagcaaggggttggcgggccggcttattgcgtgtcagcaaccgagccctgctggtcaacgtgaagttcgagggcagtgaggagagcttcaccttccaggtatccaccaaggacatgcccctggcactgatggcctgtgccctccgaaaaaaggccacagtgttccggcagcctctggtggagcagcctgaggaatatgccctgcaggtgaacgggaggcacgaatacctctacggcaactacccgctctgccactttcagtacatctgcagctgcctacacagcgggctgacccctcatctgaccatggtccactcctcctccatccttgctatgcgggatgagcagagcaatcctgccccccaagtacagaaaccacgtgccaaacctcccccgatccctgccaagaagccctcctctgtgtccctgtggtccctggaacagccattctccattgagctgatcgagggccgaaaagtgaatgctgacgagcggatgaagctggttgttcaggccgggctcttccatggcaatgagatgctgtgcaagactgtgtcaagctcggaggtgaatgtatgctcagagcccgtgtggaagcagcgactggagttcgatatcagcgtctgtgacctcccgcgcatggctcgactctgttttgctctctatgccgtcgtggagaaggctaagaaggcacgctccacaaagaagaagtctaagaaggcggactgccccatcgcttgggccaacctcatgctattcgactacaaagatcagctcaagacgggggagcgctgcctctacatgtggccctctgtcccagatgagaagggagagctgctgaatcctgcgggtacagtgcgcgggaaccccaacacggagagtgccgctgccctggtcatctacctgcctgaggtggccccccaccctgtgtacttccccgctctggagaagatcctggagctggggcgtcacggggagcgtgggcgcatcacggaggaggagctgcagctgcgggagatcctggaacggcggggatccggggaactgtacgaacatgagaaggacctggtgtggaagatgcgccacgaagtccaggagcatttcccagaggcgctggcccgcctgctgctggtcaccaagtggaataaacacgaggatgtggcccagatgctctatttgctgtgctcctggcccgagctgcctgtgctgagcgccctggaacttctggactttagctttcccgactgctacgtgggctccttcgccatcaagtcccttcggaagctgacggacgatgagctcttccagtaccttctgcagctggtgcaagtgctcaaatatgagtcctacctggactgcgagctgaccaaattcttgctgggccgagccctggctaaccgcaagatcggacacttcctgttctggcacctccgctctgagatgcacgtaccatcagtggctctgcggtttggtctcatcatggaagcctactgcagaggcagcacccaccacatgaaggtgctgatgaagcagggggaagcactgagcaagcttaaggcactgaatgactttgtgaaggtgagttcccagaagaccaccaagccccaaaccaaggagatgatgcatatgtgcatgcgccaggagacctacatggaggccctgtcccacctgcagtctccactcgaccccagcaccctgctggaggaagtctgtgtggagcagtgcaccttcatggactccaaaatgaagcccctgtggatcatgtacagcagcgaggaggcgggcagtgctggcaacgtgggcatcatctttaagaacggggatgacctccgccaggacatgctgactctgcagatgatccagctcatggacgtcctgtggaagcaggagggcctggacctgaggatgacgccctacggctgcctccccaccggggaccgcacaggtctcatcgaggtggtcctccactcggacaccatcgccaacatccagctgaacaaaagcaacatggcggccacagctgccttcaacaaggacgccctgctcaactggctcaagtccaagaaccctggggaggccctggatcgggccattgaggaattcaccctctcctgtgctggctactgtgtggccacatatgttctgggcatcggtgaccggcacagcgacaacatcatgatcagagagagtgggcagctcttccacattgattttggccactttctggggaacttcaagaccaagtttggaatcaaccgagagcgcgtccccttcattctcacctacgactttgtccacgtgatccagcaggggaagactaacaacagtgagaagtttgaaaggttccgcggctactgtgaacgagcctataccatcctgcggcgccacgggctgcttttcctccatctcttcgccctgatgcgggccgcaggtctgcctgagcttagctgctccaaagatatccagtatctcaaggactctctggcactggggaagacggaggaagaggcgctaaagcacttccgggtgaagttcaacgaagctctccgagaaagctggaaaaccaaagtcaactggctggcgcacaatgtgtccaaggataaccgacagtag

SEQ ID NO: 762 - protein, 1031 aa, Mus musculus
MPPGVDCPMEFWTKEESQSVVVDFLLPTGVYLNFPVSRNANLSTIKQVLWHRAQYEPLFHMLSDPEAYVFTCVNQTAEQQELEDEQRRLCDIQPFLPVLRLVAREGDRVKKLINSQISLLIGKGLHEFDSLRDPEVNDFRTKMRQFCEEAAAHRQQLGWVEWLQYSFPLQLEPSRWRAGLLRVSNRALLVNVKFEGSEESFTFQVSTKDMPLALMACALRKKATVFRQPLVEQPEEYALQVNGRHEYLYGNYPLCHFQYICSCLHSGLTPHLTMVHSSSILAMRDEQSNPAPQVQKPRAKPPPIPAKKPSSVSLWSLEQPFSIELIEGRKVNADERMKLVVQAGLFHGNEMLCKTVSSSEVNVCSEPVWKQRLEFDISVCDLPRMARLCFALYAVVEKAKKARSTKKKSKKADCPIAWANLMLFDYKDQLKTGERCLYMWPSVPDEKGELLNPAGTVRGNPNTESAAALVIYLPEVAPHPVYFPALEKILGRHGERGRITEEELQLREIRRGSGELYEHEKDLVWKMRHEVQEHFPEARLLLVTKWNKHEDVAQMLYLLCSWPELPVLSALELLDFSFPDCYVGSFAIKSLRKLTDDELFQYLLQLVQVLKYESYLDCELTKFLLGRANRKIGHFLFWHLRSEMHVPSVRFGLIMEAYCRGSTHHMKVLMKQGEALSKLKALNDFVKVSSQKTTKPQTKEMMHMCMRQETYMEALSHLQSPLDPSTLLEEVCVEQCTFMDSKMKPLWIMYSSEEAGSAGNVGIIFKNGDDLRQDMLTLQMIQLMDVLWKQEGLDLRMTPYGCLPTGDRTGLIEVVLHSDTIANIQLNKSNMAATAAFNKDALLNWLKSKNPGEALDRAIEEFTLSCAGYCVATYVLGIGDRHSDNIMIRESGQLFHIDFGHFLGNFKTKFGINRERVPFILTYDFVHVIQQGKTNNSEKFERFRGYCERAYTILRRHGLLFLHLFALMRAAGLPELSCSKDIQYLKDSLALGKTEEEALKHFRVKFNEALRESWKTKVNWLAHNVSKDNRQ

SEQ ID NO: 763 - DNA, 138315 bp, Homo sapiens
  misc_feature (1)...(138315): n = A,T,C or G
ttttttttttttttttgatacagggtctcacttatgttgcccgcgctggagtgcagtggtttttcacaggcatgaccacagcacactacagccttaaactcctgggctcaagtgaccctgctgcctcgtcctacgaagtagcccttttctcctcttaatctgccttttatcagttgattttcatcaaaacttcagaggtggaaggagaagtttgccctgggcccatgtagttttggcacagtgagcaggattccaaaaccactctgctcttctagaagctgtagtcaagggaacccaaggcctgagaagccagcagaagggtaagaaattcttaccagccaggttactggcctctctctctgtagagtctggttgagcagatggtaaaaattactgtttatctctttttcctctccaaaatcttgattaatgagagaaaaagatttgtatgattagtcttgggtatagcaaccctgatgtacttttttttttcttttaaacagagtctcactctgtcacccaggctggagtgcaatggtgtgatctcggatcactgcaacctccccctcccaggttcgagccattcccctgcctcagcctcctgagtagctgggattacaggtgcccaccaccatgcttggctaatttttgtatttttagtagagacagggtttcgccatgttggccaggctggtctagaactcctgacctcaggtaatccatccatctcggcgtcccaaagtgctgggattacaggtatgagccaccacgcctggcttggtgtgctttttgctatgaatattcatattgtctgatccttttccccccaggaatagtattttcctctgtctttgtctttctgtcttgttctgtcatagacaagggcaccacagggtggaacacagacttaaaactcctagaagtccactgttcaagctggccctgcatactggtcagttttgctgttctgaccaggtcagcttctatttagacaaatcttttttttttttcttttttttgagacagagtttcgctctgttgcccaggctggagtgcagtggctcgatctcagctcactgcaagctccgcctcctgggtgcacgccattcttctgcctcagcctccagagtagctgggactacaggcgcccgccaacacgccgggctaatttttttttgtatttttagtagagacggggtttcaccgtgttagccaggatggtctcgatctcctgacctcgtgatccgcccgtctcggcctcccaaagttgctgggattacaggcgtgagccactgtgcccggcctatttagacgaatcttgctcagggtccccacaataaaaactggatgagatactgtgttaggcagttctttttttttttttttttttgagactgagttttgctcttgtcccccaggctggagtgcaatggtgcaatctcggctcactgcaacctttgccttctggtttcaagcgattctcctgnnnnnnnnnnnnnnnnnnnnnnnnnnnnnnnnnnnnnnnnnnnnnnnnnnnnnnnnnnnnnnnnnnnnnnnnnnnnnnnnnnnnnnnnnnnnnnnnnnnnnnnnnnnnnnnnnnnnnnnnnnnnnnnnnnnnnnnnnnnnnnnnnnnnnnnnnnnnnnnnnnnnnnnnnnnnnnnnnnnnnnnnnnnnnnnnnnnnnnnnnnnnnnnnnnnnnnnnnnnnnnnnnnnnnnnnnnnnnnnnnnnnnnnnnnnnnnnnnnnnnnnnnnnnnnnnnnnnnnnnnnnnnnnnnnnnnnnnnnnnnnnnnnnnnnnnnnnnnnnnnnnnnnnnnnnnnnnnnnnnnnnnnnnnnnnnnnnnnnnnnnnnnnnnnnnnnnnnnnnnnnnnnnnnnnnnnnnnnnnnnnnnnnnnnnnnnnnnnnnnnnnnnnnnnnnnnnnnnnnnnnnnnnnnnnnnnnnnnnnnnnnnnnnnnnnnnnnnnnnnnnnnnnnnnnnnnnnnnnnnnnnnnnnnnnnnnnnnnnnnnnnnnnnnnnnnnnnnnnnnnnnnnnnnnnnnnnnnnnnnnnnnnnnnnnnnnnnnnnnnnncatggtgctgacatccgcctggcttctgggaggccttagggagcctttactcatgcggaaggcaaggtgggagcaggcacagcacatgacaagagcagacacgggtgggagaaggtgccgcatgagatgtcactcactatcgcaaggacagcaccaaggagatggcgctaaaccatttatgagaaatccaccccatgatccagtcacctcccatcaggcgccacctccagcattggcaattacaatccagcaggagactggggggacaaatagccaaactatatcaggctccctcttgtcttgttttatgtcctcgagagcttgacttgtgacaagggggagcactctctcttagtcttcaccatctggggggcatgattttgggatcacatccagtgtccaatctgaaaagattgggaaccccaagacacatgagattttaggcaggttaccctttgttccgaatgtgtcaagctctcaggggagtttgaggaagtcccatctataaggggactttgtcatctcaactcatgctgcttggttagtcccgggaaaatccaaccccaggaggacctacccagtatcacagagtaatgcgcctgtgactggcagacaccccaaaatgtgcagggtactagaagtaccttatatacaaacaccatccttaactgtctgtggcaacaagagtcttttgccactcaggcacagtggctcacgcctgtaatcccagcactttgggaatccaaggcaggtagatcacgtgaggtcaggagttcaagaccagcctgaccaacatggtgaaaccccatctctactaaaactacaaaaaaattagccgggtgtggtggcgcatgcctgtaatcccagctactggggaggctgaggcaagagaaacacttgaacctgggaggcggaggttgccgtgagccaagatcacgccatcgcactccagcctgggcgacatgagcaaaaatccatctcaaaaaaaaagagtcttttgccatcttagcctattcctgggagtgatcattgagactgcctcttctatgcctgttccggaaaacacctcttgattgtatgataaaaacttattaatcccagcactttgggaggctgaggcgggcagatcatctgaggtcaggagttcgcgaccagtctgaccaacgtggagaaaccccgtctctactaaaaatacaaaattagctgggcgtggtggcgcgtgcctgtaatcccagctactctggaggctgaagcagaagaatcacttgaacccgggaagcagaggttgcaatgagctgagaccgtgccattgcactccagcctgggcaacaagagcaaaactctgtctcaaaaacaaacaaaaaaacaaaaaaaacacaacttattgttaacctggaaaattacctcctgggctttccatgaagaggtggattggactgagtcactattagaataaatacatcattgaaattttaattctccatggctaaaagatgaatattttaaattagaaagacttctatatttgaaaaatattttagacctctctcattccaaacaattgcttatttgaatttatagtggttgaaactttttttttttttgagacaggatggagtgcagtggcacgatcactgctcactgcagccttgaactgctgggctcaggcgagcctcctacctcagcctcctgtgtagctgggactgcaggggcaggccaccaccctcaactttttaatttttttagaggggtctcaactatgttgcccaggctgatcttgaacttgtgggctcaagcagtcctcctgccttggcctctcaaagtgccgggattacaggtgtaagccaccatgcccagcccaaactttttagaaaacacacataataactgggagaggtggctcatgcctataatcccagcgctttgggaggtcgaggtgggcggatcacttgaggtcaggagctcaagaccagcctggccaacatggtaaaaccctgtctctactaaaaatacaaaaattagctgggtgtggtggtgcatgcctgtaataccagctactagggaggctgaggtatgagaatcacctgaacccaggaggcggaggttgcagtgagcctagatcacaccactgcattccagccttaaagagcaagactctgtcagaaaggaaggaagaaagaaagagagagacagagaaaaagaaagagaggaaagaaggaaagaaaaagacaaagaaaagaggaaggaaggaaggaaggaaaagaaagaaagagagagaaagatggtctggagttagaaggttcagttgaattgtttgggatgacaaggcaggagaaactgactctaccaggctatggacccaggttccctgtcctctgccttcccacctatcacagtgggcgaactgtccatgctgccatcccagcccataccccacacctcctacccaccacacctgatcccagtctgctcaaggacccggttacggcagctgcccacccctccctcctctccctcttcttcctcctcaccgcttttcctttttcctgggttactcccaggattactcgcaaacaggccgccatttttccctcccatctggagacaccttttttttttttttttttttttgagaaggagtctcgctctgtcgcccaggctggggtgcaatggcgcgatctgggctcactgcaagctccgcctcccaggttcacgacattctcctgcctcagcctcctgagtaggagtaggtgcctgggactacaggcacccgccaccatgccccgctaattttttttttttttttttttgtatttttagtagagacgaggtttcaccttgttagccaggatggtctcaatctcctgacctcgtgatccacccgcctcggcctcccaaagtgctgggattacaggcgtgagccaccgcgccaggctggagatacctttctttagggtatatgtcttcattgtattttgttttttttgtttgtttgttgggttttgttttggttttttttgagagtttgagatttttctctttttatttattttagagacagggtcttactctgttgcccaggctgaagtgcaatggcacaatcagctcactgcctcaaactcctgggctcaagcaatcctcctgcctcagcctcctaagtagctaggaccacaggtgtgcaccaccacacccagatagtttttaaaatcttttgtagagacagggtcttgctatgttgcccagactggtctcaaactcttggcctcaagcgatcctcccacctaagccttccaaagcgcagggattacaggcctgagccagtgtgccaggccacaaacttttttttctttttttttttttttttttttttgagatggagtttcgctctgtcacccaggctggagtgtggtggtatgatcttggctcactgaaacctccgccttctgggttcaagcgattctcctgcctcagcctcccaagaagctgggattacaggcatgcgcccccacacccggctaatttttgcatttttagtagagacagggtttcaccatgttggccaggctggtctcaaactcctgatctcgggcagtctgcccacctttgcctcccaaagtgctgggatgacaggcatgagccaccacgcccggcagatttttcaagatataatatcaagttgagggacagctctccctctttgcctttcatttctttccttcccttccttggaaattcagtccaaaaggcactgggggagttacaagccatggagcggcccccctgggtggccaggtgtgcccatcagacctccagccaggtgagggtggaagtcacccaggagggcgacctgctgggaggtatcagagcctggcaggggtggagaggagggagtcctctcagggagtcagagtggagtgagaaaggcaattggtggggtgtgggagcccgagtggggtgaggcggcacctgggacatggcactggtgaccaagggccctaccccactttactcttctccctagcacttaccactgtgcaagatgttaggaatgtacttgtttgtttctgtatcatcagccgcgcccacccacccaccagaagatcctccagggcagggacttggtcactgctgtatcctcagggcatactggtggcatttgataaagtgcagaatgaatgggtgtaacttgtagcccctatcccttgaccatctcagacagcaagacttggcaacacctgcatgaggctgcgggcaagagagagaagtgaaccctgttggggatttctgctttgaccacagaggagagaggggataagctttcgctgaggcagaaaggaagagtgagccaggggcagatccgggtggccagggagtcgggttggggcagattccgtttgcaggggcctgcaagtgcctgggtggggacgcccccaaggctgctggagagggggtccggggcacagggtcgcagagctgggcagggaggaagggagggtgagctccaggctgagctgccagtaccaaggctgcggcaagcagctctagaacaatctgccacttgcaatgcaggaattaagaaaggaggccaggcgcggtggctcacgcctgtaatctcagcactttgggaggacgaggcgtgggcggatcacctgaggtcaggagttcaagaccagcctggccaacatggtgaaaccccgtctctgctaaaaatacaattagctgggtgtggtggcgcacgcctgtaatcccagctactcaggaggctgaggcaggaggatctcttgaacccaggaggtggacgttgcagtgagccgagatcgcagcattgcactccagcctgggcgacggagagagactccgtctcaaaaaaaaaaaaaaaaagaaatgggaggtttggagggacacaaaacacagtttcaacaaaatgagctttgctgactcagtacctgccccaggaccccagcagcgccagggtttacgctcatttctccatccctggaggaagcgggcaggagagaaagtgaattccgctttcccagtcccgagagtgcggcggaaaccacgcggcgccgccgggcgggcagcagggggagccgctgagccaggggctgagggttgcaggcggctgtggccttggccaggcatcaccaccaggtggcgccgcgcgcttccctggcgcccaacccggaggccgcgaggtcggggagcggatgcccgggggagacgccggctgggcgacctaaggctccgggcacccgggctccgtggcggcctctttgcctcctgcaggggtggcggcagcacagaggtgtgcacctccacagctggcttcacacccgcggagatggaaacccgtgcacgaggctgagagcacgagcatccaacaggctggggtttgaatccctgcgcagctgcctgcacgaaggcgtgggcctcgcctctctccacctcagacttcgcgcccgtcagtgggagcatgacgctgatctcacagggcggctgtaaggattaaattaggtgacagtggtgatgatgatgatgataacatgtgtactgagttctcatccaggtctggcatggttctgggcactttacagatattaacttatgattctagttccctgtgatgttggggtggctgaggaccaggggctgagtctcctgcacaaagggaagggcggccaggcctcccttatcgcggccaccttccctgctggccccgggtgctgttggtgctgagggatgactgctgcccaaaggcagtagagagaggaggggccttcgatgctaaaggccagggggcctcttgtttctagttccgcagccccgcagcccacggctacagggaacagaggccgcgggtggcagagccccactgttgatctgagaacaatggaggaaccatggaggcagatggcacctcccgcaggagccagggggttgaggctgcagtgagctgagatcgcgtcactgcgatccagcctgggcgacagagcgagacgcctgtagtcccagcactttgggaggctgaggccagtggatcacctgaggtcaccagtttgagaccagcctggccaacatggtgaaaccctgtctctacgaaaatacaaaaattagctgggcgtggtggcgcattcctgtaaccccagctactcgggaggttgaggcaggaaaatcgcttgaatctgggaggcggaggttgcagtgagccaagattgtgccactgcgctccagcctgggtgacagagtgagactccatctcaaaaagaaagaaagaaaaatactcttagcgcagaaacatccagtctcacaaagcccaaagatgccattctagaatatactagaaggatagctcaaacactcacattttatgggggttcactctgtgtcaggcacgattataagcatttttacgtatatgaattatttatttccaacagcaattctaaaagttgagcaccggcctccgctgtggtctaagcaacgccagagccttctgggaaaggcgcccctgccgtggagggaggatgggccagtggtgggtgagtggaggccacagctcagctctgaggtttcagcctcagtgaccgggcagactgccttctttgccttcctcacacggaggtggcccagagttggtggccctggtgagattggttggaggtgtgttgagtttgagggctctgtggaatgttggggggatttccagaggcagctggaggggaagagctggtggccagggtggaggagtgggtggtgaaggaggagtgggtggtgaaggacagacgagctgcggtcaagactagggagacactgggcagtaagggtgatcccgaggactcagatcccccaggaccctcggaaggaaaaggttgggcggtgggaactccatgggaaggtccccagaagcccccgtttgccgtctgtggtctgccctggggcaggcagggcgagggggcttcatgacccaagtgaggggcgggcctgggtggggagtattttcagcgggttctctccccactgtcaccccagtgaggccacctgaggtcacctcttcccctgggggtctcgggccactgacgcctctaaggactggggctgctgtgagttgcggccccgggaggaaagggtgagtctgaactcacttgaagctctgagtcctggggcttcaaggccacacctacctgagtttgtgttgggggttggtgccctccctctgcggttgtcactggggtgccttccccccaggctccttctcctcttctccgagaaagaggccggggcacctgtcctcccagctcacacattccaggaacccccaggggaggacggtcctcagcagctgaccctctcccctttcttaccaccagccgagaatgaggatgtgctgagaagccagaaacagcactccctgcccccccacccccgcccccacccaccacgctcagaggcctagaacaaaaacataccacaaatagaaatcaaagcctgagaaagaatcgaggagccacgaccctgccgtgggaaaggctgtgtgaccttggccaggtcacttcacttctctgagcgcacttgcctgtctgtaaaatggggtcatggtctcaaccttggggagctgctgggagaaggtgagctaagatgtcagaggcagggtgcaggtgtgaagttcggtctaaaacaaagcccctcgccacagggtactcgccggactcccagctcgccctaaggctcccccacccctgcagtcgggccgggaccgcccctgagcacttccccgtaaggctgcggtgcacgggctggggagcacttctgcaccctcgctctccacttcctgtttttctccccaacgaattttgcgccattactctttcatggggtgaggggggagtgggggcggaggcggaggcctgcctgggaaggaagcccgggggtcagaggcgcccaggacaccacgaggttgggagaggagtgtgctttgcactctgcactctccagctcagagtagctgaggatgctagggagactgggggctggcccacggggggagcagaggagtcctcagtgcggtcctcactctgaaaacagcatttttccctaggcttgagaatgcctccgggattggactgatccaggctggacccacgtctgtctggtgataccaggggcagagggaccactctgacaggtgagtctagcctccctaccccccggaggccgtcaggccttggatcatggactgcagggtcactcggtgtcaggcccctccttgaagggtgtgaaggggctgttcctgcactggctaggatgtggacacttgtcctttctcttcctcggctacagccccctggcccctgggcaaagcatcaccttgtcccttcatgaccacatcactcatgtattccttcattcagcatttctacagactcactggtgatgccctctgggtgccagacacaggggagcagcccaggagcctgtccagatccatgtagagtccctgctcccaggagcagctgagcgaataggcaatcatggttgagtagaccaagagctgggaggggatgatatagccaggagtatgatgaagggccccttcgggcaagggggccaaggcaggtaacatctgtgctgggcccgaattctactgagtagttagcaaagaaagtgagtgtgtgtgtgtgtgtgtgcgcagaagagggcagaaggaagtgtggggaagggcactccaggtaaagggaacagcatgtgcaaacgtccagagtcagacagcaagcctgggatgttctggagctacaagtcccggctcctggcccagcagggagggcagagagggggaagtgatgggaggtgaccctgggaggctggctgggttggctccattcagatgattggtcatccatttgttctcaagctatagcctcaccctgcacaccgggacagagttcatgccccagcctaagctcagaaaccagctccctttcgctcaagcaggaaaggggactgactttacagcagagatgcagggtgctcttatcagacccagagttgcagacagcccagggacacttctcagtgccactcacctgtctgcccccatctgcccgtctgcatcacacctgtcaagctgctacatcctggatcccttcacccaaagagaactatgtgtggtcccaagcccacctccctgggaaggacttgattagcctgtgttggatccaggcctcccttccagtccgttcagctggctagtggtcaagtgtgaacgctaagcatctgtcctcatgggtacatgacaaaggattaccaaaagggggtcagactggccgggtgcagtggctcatgccagtaatcccagcattttgggaggccaaggcaggcagatcacttgaggccaggagttcaagaccagcctggacaacatggtgaaaccccgtctctactaaaaatacaaaaaattatctgggcatggtggcagatgcctgtaatcccagctactcaggaggctgaggcaggagaatcgtttgaaccctggatgcggtggttgcagtgagctgagatggcgccactgcactccagcctgggtgacagcctgggtgacagagcaagactccaactcagaaaaaaaagggaggggggcaggtcggcctaatggcctaaaggccagtggtgtccattctagttcattccattctggtcctgcccagcacagaggcccttgcccagctcctttggcttttcccagatatcctcattccagttgtccttgctttacctcgtcctgccacacctcaaagtcaatctcaaatacctctcccccgtcaaatgaggtgatccaagccatctcaccatgttaaactgttgcatcgagggctctattctcagagctgccatcttcatctgatatccatccttcttccctccctccctccctcccttccttccttcttctatctttcttttttttatttttgtttttttgagatggaattttgctcttgttgcccaggctagagtgcaatggcgtgatctcagctcactgcaacctccgcctcctgggttcaagcaattctcctgcctcggcctcctgagtagctaggattacaggcatgcgccaccacgcccagctaattttgtatttttagtagagatggggtttctccatgttggtcaggctggtctcaaactcccgacctcaggtgatctacctgcctctgcctcctaaagtgctgggattgcaggcgtgagccaccgcacctggcttcttctttcttttttttaaagacagagggtctcaactatgttgccaggttggagtgcagtggctattcacaggtgcaaggataatgcactacagcctcaaactcctgggctcaagcgatcctcccacctcagcctcccaagtaactgggactgcggccatgtgccgtcatgcccagctgccctctgtttctgctgaatctcttccctggtggctctccaggatcctctcaacagaggaacagatcaatttaacctctcctaccatacttgatctatagagcaaaaatgtggatgcaatatacaaagcacgcgctgcagcattccaggtgggttgggtcaattgaacattaggaacaaggtatcacttggggtttgctctgtggctaccttccttggcccctttgttgacaaatgtgactaccccaagttctgcccattgagaaggaatctctagatcccttctagtctagagcctctcagacccacccttgagagtttcttgggaaggcggcttctaggaggtgatataattaccttagcaacctgattcttttttttttttttttgagacagagtctcgctctgttgcccaggctggagtgcagtggtgccatctcggctcactgcaagctccgtctccagggttcaggccattctcctgcctcagcctcctgagtagctgagactacaggtgcctgcaaccacacccggctaattttttgtatttttagtagagacgaggtttcaccatgttagccaggatggtctcgatctcctgacctcgtaatccgcccgcctcggcctcccatagtgctgggattacaggcgtgagccaccgtgcctgatcagcaacctgattcttgttggtgctggtactttggcttaggaattctccaggtgggggtgagagatcacaaaccccaatttgtcaggcgtggtttcctggttttcaactctcgtaaaacgctagttggttgcctgtaacttttatttgggatcatgccatttaccaataatcaatgtcgctcttgtcgcccaggctggagtgcgatggcgcagtctcggctcactgcaagctctgcttcctgggttcaagtgattctcctgcctcagcctccctagtagctgggattacaggtgctcaccaccacgcccagctaattttttgtatttttagtagagacggggtttcactattttggccaggctggtctcaaactcctgacctcaggccatccacctgcctcagcctcccaaagtactgggattacaggcgtgagccatcgggcccagctaatgtcatgaaatcttatgcggttgaacattcagccttagactaggtcataggtcatgtccccgaggtttgggtttcttagcagcaaatgtgagggctaatttcttctttcagcctaagagtgaaaagaggaaatcatcgtctggcttgggatagaaagaaggttttttttctctaatttctcttggaatgctacctctgcctgcccttctaccactggacaataggagataccatcatgtttgtctgggaagaggaagttcttaagagggaccagagacctgtaatcccaggaggttaagggttgtgtgctcctgtggctctttccagatattcccattccagttactaggctcacagacttttcctttttttcttttttttagacagggccttgctctgttgcccaggctagagtgcagtggcgtgatctcggctcactgcaacttctactccagggctcaggtaatcctccctcctcagtttcctgagtaactgggaccacaggtgtgtgccaccacacctggttaatttttgggttgttttttttttttttttttttttgagacaaagtctcactctgtcactcagactggagtgcagtgacatgatctcagctcactacaacctccgccttccaggttcaagcgattctcctcagattctgcctcagcctcctgagtagctgggattacaggcgtgcatcagcaggcctggctaatttttgtatttttagtagacacggggtttcaccatgttggctaggctggtcttgaactccttacctcatgtgatccaccagcctcgccctcccaaagtgctgggattacaggcgtgagcttccatgcctggccctaatttttgtattttttgtagagatggggcctcgccatgttgcccaggctggtctcaaactcctgagttcaagtgatctgcccgccttggcctcccaaagtgctgggattacaggcatgagccactgcgtccagcctccaagtttcttaacacttcagcctttgagtcccatgaggtcactgaaaatagtttaactcatctgttaacacaaaacaagaactgccagtgtcccatccaaaaataggaaaacctcattgcccctcactctgcctcgagtcagctagtttcatactttctttgaaagtaacttgaaacttaacaccccacttctgacaccaatatgtgtattatttgggatttttttgttttgaataacaatatccaactcaagagagtttatactgagctgactattgtctccccaaaatttgtgcttacccagaaactcagaatgtgatcttaattggaaataaggtctttgcagatgtagttagttgagatgaggtcacattgaacttgggtgtccttataggaagagggaaatttacannnnnnnnnnnnnnnnnnnnnnnnnnnnnnnnnnnnnnnnnnnnnnnnnnnnnnnnnnnnnnnnnnnnnngaagagggaaatttacaccagacgaggtggctcacgcctgtaatcccaacactttgggaggccaagacgggtgggtcacctgaggtcaggagtatgagaccagcctggccagcatagtgaaaccccctctcttagccaggcgtggtggtgcactcctgtaatcccagttactcaggagactgaggcaggagaatcgcttgaacctggaaaggggaggttgcagtaagccaagatctcaccactgtactccagcctgggcaacatagcaagactccatcctgaaaaaaaaaaaaaaagctacaggaaccaggagctgaaaagatgagaattttctttctcatctgtgtccctctcttcctctctgtgcatctgctgcatgattctcccccactctctcttcctctgcatatccgctcctctgatttctttagtccttttgagggcaaaagaggccctgcagctcgctggctccatgttagaccacccacgctccaggtgtctaaagaacactaactctattcccttgattccaattccatattcccagggaaatcactgattggctcgccttgggtcaggtgatacccctggtcttatcaacttggatagggtcaagggcatgctgggcagtcacacctgactggagactgctggtgtagccatgtggatgcgtgggggatctcctagagccggagctgggcatccattgccatagcactgtgctcttgccatcttgcaattgcctggattacagctgcaactggttgaggctctgctgtccactgacagacttactcccatgccaagtgnnnnnnnnnnnnnnnnnnnnnnnnnnnnnnnnnnnnnnnnnnnnnnnnnnnnnnnnnnnnnnnnnnnnnnnnnnnnnnnnnnnnnnnnnnnnnnnnnnnnnnnnnnnnnnnnnnnnnnnnnnnnnnnnnnnnnnnnnnnnnnnnnnnnnnnnnnnnnnnnnnnnnnnnnnnnnnnnnnnnnnnnnnnnnnnnnnnnnnnnnnnnnnnnnnnnnnnnnnnnnnnnnnnnnnnnnnnnnnnnnnnnnnnnnnnnnnnnnnnnnnnnnnnnnnnnnnnnnnnnnnnnnnnnnnnnnnnnnnnnnnnnnnnnnnnnnnnnnnnnnnnnnnnnnnnnnnnnnnnnnnnnnnnnnnnnnnnnnnnnnnnnnnnnnnnnnnnnnnnnnnnnnnnnnnnnnnnnnnnnnnnnnnnnnnnnnnnnnnnatggagcaggcagacatgtgagcatctggctgccacaaatagggcctggagcccagacagatgaaacacttgcccatccaaggtcctggtatgagcagcaagagggattcgctctgacttgggaaaggaagtaaataaataaatacccagctttttaatcttacatttatgtatttttattacactgttagcaaaatgtgagcagacagacaaaaatggagataaaacatttgaagccccacctctctctcagcttccattgttctaagtcccctcccactgtgcccatgtgtgtatgtcacacacagttgtgacccaggtacaaacaattctgcatttttttggggggggacatggtctcactctgttgcccaggctggagtgcagcagtgcaatcttggctcacttcagcctccacctcctgggtttaagcaattctcatgcctcagcctccccagtagctgggattacaggtgcccactaccatacctggataatttttgtatttttagtagagacagggtttcaccatgttggccaggctggtcttgaactcctggcctcaaatgatccacccaccttggcctcccaaagtgctgggattacaggcatgagccacctcaccaggctttgcattgcgttttttcagcggaagacaccatcagttcccatgatgctgtgggtcttcagaattgtcattttcagtggctgcttgctcttccattgagtggatgtaccatgcctttctctggacggttccagccatagggagaaggcagcggctggccctccaggtggtaatgtgacacattttcttcctcccatttttggttcatgggccaacttaatgttatcgcttgtccaataagccctatgcccctcctcctacccggcttcagggttgtagaaaggccaccaaggagggcgaagcgcacagcttagggcttaggtggatagagttcatgaacctccacctatcaagttggtgatcttggcaagttacctatggcatggtttcttttttttcttttcttttctttctttttttttttgagacggagtctctctctgtcacccaggctggaatgcagtggcccgatctcggctcactgcaagctccacctcccaggttcacaccattctcctgcctcagcctcctgannnnnnnnnnnnnnnnnnnnnnnnnnnnnnnnnnnnnnnnnnnnnnnnnnnnnnnnnnnnnnnnnnnnnnnnnnnnnnnnnnnnnnnnnnnnnnnnnnnnnnnnnnnnnnnnatggtggtgtgcacctacagtcccagctactccacaggatcacttgagcccgggagatcgaggctgcactgagccatgatcacaccactacactccagcctgggtgacagagcaagaccctatcttaatagataagtaaatacacaacagccagtttattctcttccagttcaggtggtcagaagtctgaagtctcggtggagacagggccacactctctctggaggctgtagggaaggatccttcctagcctcttccaccttctggtggctccaggcactccttggcttgtggccacatcactctgtgggagactaaaatctaccaccccaaaatatatttctttgcatattttgagatggctctttagataagctgcagacacgggaatacctctgaaaagttgttcttctgtaaaaaccatacacctgtaaagaagttctaggctgggcgccatggctcccagcactttgggaggccaaggcaggcggatcacttgaggtcaggacttcgagaccagcctggccaacatggtgaaaccctgtctctactaaaaatacaaaaataattagccagccatggtggcaggcgcctgtagtcccagctactcgggaggcagaggcaggagaattgcttgaacccgggaggtagaggttgcagtgagttgagactgcgccattgtactccagcctgggcaacagagcgagactctgtctcaaaataaataaataaataaataaataaatgaaaaaataaaggagctctacgtgagtaagcagtggatgcaagcagaggctttctctaaggctccttatcaacctaaagatgggtctaggaaagatcctatcagaggaaaagagactcacaggcaaccgcccagatagattgccacagaccatcacctgttctgctgagggcagttccaaaattacctgagagccgttatctgcagcttttcactccctgtgcactcatgcctccctcacctccccatagcttgtcacccctccctgcagaacctccaaacccgcttccgatgctataaaaacttcaatcatctaggccgnnnnnnnnnnnnnnnnnnnnnnnnnnnnnnnnnnnnnnnnnnnnnnnnnnnnnnnnnnnnnnnnnnnnnnnnnnnnnnnnnnnnnnnnnnnnnnnnnnnnnnnnnnnnnnnnnnnnnnnnnnnnnnnnnnnnnnnnnnnnnnnnnnnnnnnnnnnnnnnnnnnnnnnnnnnnnnnnnnnnnnnnnnnnnnnnnnnnnnnacagagtcttgctctgtcgcccaggctggagtgccttggtgtgatctcggctcactgcaacctctgctttctgggctcaagtgatcctcccgcctcagcctcaggaggagctgggactacaggtgcccaccaccatgccctgctagtttttgtggagatgggattttgccatgttgcccaggctggtctcaaactcctgggctcaagccatctgcccaccttgtcctcccaaaatgtcgggattacacgcgtgagccatcgcctccggcctgggattaggatttggacgtatctttttagaggccaccattcaactcactacatgtgggaaatggtttcttctaatcctaaaccttctccctctcctgcatgtacactttttcatccttgtctttctgtcctgggaaaaagtaaccatctctattccttctcatagaggattttggggattcacgtggggttactcctcacactaggtgcttttcaagatagagggctaactaccgagagtgggtatttatctagagagatagaggcttttggagcaggagcaccctaggtagtggtggatggggcagggcccagctccatcctgctgagcacccccgagagggtaacctatttgcaaagcttttactcgtctctaaaccacttttgctaaaacgtctatttttagcctcacaacttctctgaagttggagtaacaaacctcatttttacagaagaaacagactgaagggttgggggcagggctgcatttcagggcccccagaaggggaggctgagccccccaccccggccccaaggacagaatttccagggcagggctgggagaataaggcctcgctttctggagttttgcgcctccctcttctggggctctgcctctgcctgcccctcaacctcaaccgttatcttcagggtttttgtttgtttgtttgttgtttctttgagacagaggctcgctctgtcatccaggctggagtgcagtggcgcgatcgtggctcactgcaacctctgcctcccgggttcaagcgattcttgtgcctcagcctcccgagtagctgggattacaggcacccaccagtatgcttggctaatttttttgaatttgtttttatttttagtggagacgagggctcactatgtttacctaggctagtcttgaactcctcagtgtagacaatcctcctgcctcatcctcccaaagtgctaggattacaggtgggagccaccgtgcccgacctcctttactttctttctttcattgctcaagttgnnnnnnnnnnnnnnnnnnnnnnnnnnnnnnnnnnnnnnnnnnnnnnnnnnnnnnnnnnnnnnnnnnnnnnnnnnnnnnnnnnnnnnnnnnnnnnnnnnnnnnnnnnnnnnnnnnnnnnnnnnnnnnnnnnnnnnnnnnnnnnnnnnnnnnnnnnnnnnnnnnnnnnnnnnnnnnnnnnnnnnnnnnnnnnnnnnnnnnnnnnnnnnnnnnnnnnnnnnnnnnnnnnnnnnnnnnnnnnnnnnnnnnnnnnnnnnnnnnnnnnnnnnnnnnnnnnnnnnnnnnnnnnnnnnnnnnnnnnnnnnnnnnnnnnnnnnnnnnnnnnnnnnnnnnnnnnnnnnnnnnnnnnnnnnnnnnnnnnnnnnnnnnnnnnnnnnnnnnnnnnnnnnnnnnnnnnnnnnnnnnnnnnnnnnnnnnnnnnnnnnnnnnnnnnnnnnnnnnnnnnnnnnnnnnnnnnnnnnnnnnnnnnnnnnnnnnnnnnnnnnnnnnnnnnnnnnnnnnnnnnnnnnnnnnnnnnnnnnnnnnnnnnnnnnnnnnnnnnnnnnnnnnnnnnnnnnnnnnnnnnnnnnnnnnnnnnnnnnnnnnnnnnnnnnnnnnnnnnnnnnnnnnnnnnnnnnnnnnnnnnnnnnnnnnnnnnnnnnnnnnnnnnnnnnnnnnnncaggctttttcacatgtgaatcacagtcccgccactccccggctcagcctggaaccttccctctgcttttcagtgctcttttggtcaaatccaaatcctcagctgccccctcccgcatcctccttgctatctgcacccaacttgggcctccctgcctccagcatgccaccactgcccagggcctttgcaccatttcttcccaaagcctgcgatgctctggccttcgagacccacgcggcttctcctccgtcagttcatccaggtccgtgctcagctccagtgtcctgacctcaaggaggccttcctagttctgtagtcccccttcccctgtctctcccctcctatcttacatttttcggcagcacaacactgtatcttatttttattcttcttagtttctcttccttactgagtataaactccagggggttgcgggggcggcaggcctggggcttgtccagtgctgcatctccagagcccaactgtatcaggcacagcttgctgcaagatacacacttgctggatgaatcagtgttgcaaagcccgggtcacctccagtgtatggagggcatgaggttgaatccaggtgcctgaccccaaactctgctgcttccccacttcctccaccacctcttgaactttgtatcagaagcaggactagggattcattgaaccctcccccagccctgggtcagagggtacattattgttcccttgtgccagatggggaaactgaggcagaagtgactcttcaaggtcacacagccgacagatggtggggcagggatgtgaaccctaggtagcctgggttttgagtatgtgtgttttacagaaagaatttctggggagcccccatctagctggacccagaaacacaatcttcaccagccctggagtcctggagcacctggccacctctgcgctgtctgctctggcccagaatcaagtataaggggcaccatcccctccacctgcaaaacccacaacccctgaccctctaagtcattctccagcccatcggtcacaacctggggatggagggcacaaggccagagactcccagctccttttccccaggtattcccacctggccacctctcagccctccttggaacctgagttcttgcaagtcagactttctaggagtggaatctgaccttggccttgttctctaaccatctgctccaccctttctttgccatcaacttcacgtgatccagggcagcagctttctagttgtgttgactggaacctacagtaagaaatgcatctgacatcttgacttcacacacattcacacctaggaatggaaccaaagcctggggaagcaacacccgcccttactacagggagtgcagcctgacactgtctttctgttctattttttaatttaatttaatttaattaacttgtttattttgaaccagagtctcactctgttgcccaggctggagtgcaatggtgcgatcttggctcactgcaacctccacatcccgggttcaagcaatgctggtgcctcagcctcctgagtagctgggactacaggcatgcaccaccatgcccagctaatttttgtatttttagtggagacagggtttcaccatgttgcccaggctggtctcgaactcctgatttcaggtgatccacttgcctcagcctcccaaagtgctgggattacaggcgtgagccgctgtgcccagctctgttctattttttaaaannnnnnnnnnnnnnnnnnnnttgtcatgtgtgccttggaggaagctacctcaagttccctttgaattgtcaaaaaaaatgaactagttgcagtggagaatggacagcaatcctagaagaaaaatggccccttagctgcaagaaagtcaaccaacatgcattacttacatcagctctggggccttccgctcctttctcaggaaattaatactgattgggaaatactttggccccatttgatggaagagaaaagaggtgttagtcattaaagggtggggctggtcagtggagaacaggcttggacgggcagaagcacactgcaggcccttccgcagagcttgcccagatctccaggcctatttttcttttcttttcttttcttttcttttttttttttttttttgagacggagtcttgttctgtcacccaggctggagtgcagtggcgcaacctcggctcactgccacctccgcctcctgggttcaagtgattctcctgcctcaaccggtagctgggattacaggcacccaccaccacacctggctaatttttgtgttttagtagagatgaggtttcacctgttggccagtctagtcgcaaactcctgacttcaggcgatccacctgcctcggcctcccaaagtgctgggattagaggcgtgagccaccgcttgcccagcttgaatgttaaatttagcttaagcttcctggcaccccaagcaaaagagagggtcatgataagtccctagggtcacggtttcaaaaaggaagtgtatcaggttttcaggaaagtgaaacttctattttattttatttatttatttatttatttttttgagatgaagcttcgctcttgttgcccaggctggagtgcaatggcatgatctcggctcactgaggcaattctcctgcctcagtctcccaagtagctgggattacaagtgcctgccaccaggaatggctaatttttttttttttttttttgagacagagtttcgctcttgttgcccagactggagtgcaatggcatgatcttggctcactgcacctctacttcctgagtttaagcaattctcctgcctcagcctcctgagtagctgggattacaggtgcccgccaccatgctcagctaattttttgtatttttagtagagatggggtttcacctgttggccagcatggtcgtgaacccctgacctcaggtgatccacctgcctaggcctcccagagtgctgggattacaggcatgacactgtgcctggccgtatttttattttttattttttatttttttatttttatttttatttttagtagagatggggttttgtcacgttggccaggctggtctcaaactcctggcctcaggtgatccgcccacctcagcctcccaaagtgctgggattacaggcgggagccaccgcacctggccgaaagtgaaacttcttaggacagaggcctaacgagacccatggcatggtgaaagtagcaaggatctggaagaagttattataatagatatttatagactgtgtggccctgaaaaaggactcaactttcctgagcctcagttttctcatccgtaaattggggataagatttaccttgctgggcggttgtacgtatcagggagaaaatataacttctcctcagccccggtaagttcatagttgggacagcccgccgtaacaaaagacagattcacgtgaaaaccaagcaagtttattaacagatgcagtgcacatcacgaggcagaaacctcaatgaaaggtgacccgaagcagtggctcagaactctggcttacccagaatctttgacaaagaagaatgaattttcaagaagtgacaagacaagggaaagcagttttaggcttccagaggtggggaactgtgggaaggtaaacatatgggagaaaaggaatggaggaaggtttgtttgtagactcttctggtgtctccgagctgataagcgttgtctccagtaaagtagaatttatgtcctgtatttaggcatgtaaaaagtcaagactgagccaggtgtggtggctcacgcctgtggtcccagcactttgggaggccgaggcgggcggatcacctgaggtcaggagttggagaccagcctggccaacatggtgaaaccctatctctactaaaaatacaaaaattagggccgggcttggtggctcacgcctttagtcccagctactcagaagactgaggcaggagaatcgcttgaaccagggaggcggaggttgcagtgaaccaagatcgcaccactgcaccccagcctgggagactccatctcaaaaaaaaaaaaaaaaattagctgggcatggtggcgggcgcctgtagtcccaactacttgggaggctgaggtgggagaattgcttgaagatgggaagtgaaggttgcagtgagccgagatcgtgtcattgcactccagccttggttacaaaagtgagactctgtctaaaaaaaaaaaagtcaagactggcagggcaggatggttcacagctgtaatcccaacactttgggaggctgaggctggcagattgcttgagtccaggagtttgagaccagactgggtgacatgacaaaaccctgtctctacaaaaaaattagcccatgcctgtagtcccaactacttggcaggctgagatgggagggtcacttgggcctgggagacagaggttgcagtgagttgagactgcaccaccgcactccagcctgagtgacagagtgagaccctgtctcaaaataataataaaacaataatcatcttttaaaagttaagattacaacaaatctagtttacagatcttaacttttattcatgattctaattattattattattattattattattattattattattagagacgtggtctcactttgtcacccaggctggattgcagaggtgagatcacagctcactgcaaccttgaatttctgggctcaagggatcctccttctacctcagcctcccaagtagctaaaactacaggcacatgccaccatgcctggctaatgttttattttttgtaaagatgaggtctcactatgttgctcaggctggtcttgatcctctagccccagcctcccaaagtgttggaattccaggtgtgagtcatcctggcctactaatgagtctaaaattgggagtccctcagaaccaggacaggttcaaagggcttcagccagtaacacagtcagagtgtttatggatgtaaaacagaagtaagctatagagcttaattggttacagtgtttgctttgtttgaatcagttggccacctaagatctactaaagctcagctgctataactgacaaaaactcagctatttgctacatgtatatactcttaagttaattagtttcatttaccatgaatgactccatattggtttggtctgttggacccggtacaggggtcttgtcccaatcaatggcctcctgcaaattttatttaacaggcagaaaaggggagatgatagaaagatctcttcatctgcctgctgcttcttaattgccttaagttcaaaaatatttacgtcaaagaggtatattttggggggacatattctggtttccttcatggggatcaaagagaacaatatgtaaggcacatcttatcgcttgacaacttggcatgcctccattctcccggcagcatcttgcatagtaaaaagcatgatttgaattgctgtcagcaaatacatattcaatgaagaattcctttggaagatgcaaaaccattcgtcatctggctgtttcttgaaacaaactctaaagaccagagggcagcgttgaaagtgcagcctagcaaaagcatggttaaggccaggtgttaggaaaccttaggacgggccgctccctcaggacaggctgctcactcggccgtcagagttccttctgaaacgtccatttgtcttctggctcttggcatccttgaaacaggctagagaccgctgctaaggctcagtaatctgagcctggggtaagcaagaggctgtgagcctcagacactccactagaaaggatatactagtgtgcattcctggggacaggcccaacgttccttccaaaagggacctgtggtccttcctggctcctctgcaagtgtccactggagaacacagaatctgcagcctgcatcttagaaaacctggaccaggccgggcgcagtggcttatgcctgtaatcccagcactttgggaggctgaggcgggcagatcacccgaggcctgagtgtgagaccagcctggccaacatggtgaaacnnnnnnnnnnnnnnnnnnnnnnnnnnnnnnnnnnnnnnnnnnnnnnnnnnnnnnnnnnnnnnnnnnnnnnnnnnnnnnnnnnnnnnnnnnnnnnnnnnnnnnnnnnnnnnnnnnnnnnnnnnnnnnnnnnnnnnnnnnnnnnnnnnnnnnnnnnnnnnnnnnnnnnnnnnnnnnnnnnnnnnnnnnnnnnnnnnnnnnnnnnnnnnnnnnnnnnnnnnnnnnnnnnnnnnnnnnnnnnnnnnnnnnnnnnnnnnnnnnnnnnnnnnnnnnnnnnnnnnnnnnnnnnnnnnnnnnnnnnnnnnnnnnnnnnnnnnnnnnnnnnnnnnnnnnnnnnnnnnnnnnnnnnnnnnnnnnnnnnnnnnnnnnnnnnnnnnnnnnnnnnnnnnnnnnnnnnnnnnnnnnnnnnnnnnnnnnnnnnnnnnnnnnnnnnnncctggccaacatggtgaaacctcgtctctactaaaaaatacaaaaattaaccagccatggtggcacgcatctgcagtcccagctacttgggaggctgaggcatgagagtcgcttgaacccgggaggccaaggtggcagtgagccaagatcatgccactgcactccagcctgggtgacagagcaagaccctgtctcaacaaacaaacaaacaaacaaaaaaagcaaaaacaaaaaaaactggaacaattgagcaagccactccatcttacccaagccctctcccctttcctggctggaataacggcctctgggcctctctctcgctctttttctttttttttcaaagcagaatctcactccatcacccaggctggagtgcagtggcacagttatggctcactgcagtctcaacctccagggctcaggtgatcctcccacctcagcctcccgagaatctggaactacaggtgcacaccactaaacccggctaattttttctatttttttgtagagactgggttttgccatatcacccaggctggtctcaaactcctggcctcaagggatcctccagcctcgtcctcccaaagtgctgggactacaggcctgagccatcatgcctggcctgggcctctgcttattgcagcctctggagccagcacggggcccaaggtggtcctgagaggcccaggcatctcttgggtagaaaaagtccttctctaagcctcagatccctcatctgtccaagggaccaataacagctgctttacctcccaggctggattgaagagggtcctttaagccattgtttcactaagcaattgactggctcacccttcaccctatcctgggagggcatgaagccactgttgtaatctcaggggtgggctcacccaccacccccatactcttggtccaccaaagcctggaggtcgctgctgtcaacccagggctgagcaaggagggacttaggccctgggctgtctccccgagcctctcagtcatgcctgctgtaggggaggagagagtggcctccctctaccctctaaattccttggctgggctccacattaaatttacataaggcagattaacaagagaaaaaccatgtgtaactaagacctatgcatgggaatcccacaaaatacaagactggatgaaggctcagatgaataaagctcatataacatcctacaagggacaggaaacattccttcagaaaggaatagggcttgggtcaggtgtggtggttcacgcctgtaatcccagcactttgggagcctgaggcgggtggatcatgaggtcaggagttcaagaccagcctggtgaacatggcgaaaccccacctctactaaaaatacaaaaattagccaggcacggtggtgtgcacctatagtcccagctactcaggaggctgaggcaggagaatcgcttgaacccaggaggctgaggctgtggtgagccaagatcacgccactgcactccagcctgggcaacagaacaagattcctcaaaataaacaaaacaaagaaacaaaacaacaaaaaacaaacaaaaaaacatgaaaatcagctgggtgtcgtggcgtgtgcctataatcccagctacttgggaggctgaggtaggagaattgcttgaacccaggatgcagagattgcagtgagccgagatggcgccactgcattccagcctggacaacagagcaagactgtctcaaaaaaaagaaaagaaaaaagaaaaagaaagaaaagaaaagaaaaaaaggaatagaggcttgggatcctggggaggtggtacacaagttaagggagagtgaggggagagagggtaaggtgaatgaagcttgtcttcttatgcggataaaatttctcaggtaagaaaagttagctctgagcagccctccgcctgatataatactttaccaatggagatttttccttttcttttctgtttttgagacagggtctcactttgtttcccaggctggagtgcagtggtgccatcatggatcactgcagcctccatttccctggctcaagccatcctcccacctcagcctcccgagtagctgggactacaaggtgtgcaccaccacgactggctaatttttaatttttttgtagagacgggggtttccctatgttgcccaggctggcttgaattcctgggctcaagtgatcctcccgcctcggcctcccaaattgctgggattgcaggagtgagccacagtgccaggcctggagattttctttatagatagaaatcattttacaaaaggacagcttttcagatctactcctgtgcctgcagtttctaagaataatcccttcaaaatatggcgaagaagtatattttggggtggcacacgctggtctcccatagtcacattttgggtgtgtgtcctgagccccaacactggtcacctcgcaatggcgcttggggtccctgggtgcctagagctgcaggttaccccctcttcttctcctgctctcagcctttctcccgctcctgctgaaattctttcctgcgtgaaggcggagcgcttaaaggcgcctaggacctttatttcgttgttttcctttgcataaaaagaaaacttgttttgtagaagggcaagcaaggtgcagcttccagaggcacctgggatgatgcccctctagcggtaggcgaactggggagtgtgggcggcgggggaaggcgaggccctgggggacctgttgtttttcctgttgcaagtgaaaaggaaacaaagtgggaagtggagtgtgcgggctggcggcaggcggggcgccccgccgcgccccgcctccctnnnnnnnnnnnnnnnnnnnnnnnnnnnnnnnnnnnnnnnnnnnnnnnnnnnnnnnnnnnnnnnnnnnnnnnnnnnnnnnnnnnnnnnnnnnnnnnnnnnnnnnnnnnnnnnnnnnnnnnnnnnnnnnnnnnnnnnnnnnnnnnnnnnnnnnnnnnnnnnnnnnnnnnnnnnnnnnnnnnnnnnnnnnnnnnnnnnnnnnnnnnnnnnnnnnnnnnnnnnnnnnnnnnnnnnnnnnnnnnnnnnnnnnnnnnnnnnnnnnnnnnnnnnccctgcgctcacagcggcggtgcggcctccggtgcgccggctgaggcgcgaggatactggaagcgctcagcgcgtgcgcccgctccgagcgctgactagaggaccaggggcctcctctgtacggcagcggggtccacagagagcgcgctggtgatgtcgcccgagtgccctggcgcggagagagggctgcgcacagttcgccggcgcccgggtcctgtgcgcccttcccagcctgggcaagtggggagcggggctgcagaggggccggggtggaagttttcggggcttcctcccggctcgtggacccgcgccccgcctcccagtcccgggcctcccgcgttgctcgccgcgtttgctgcagcggcgcaggcgagatcagctccggatctgcggccgagccggggttacgccggcaaaaccgcccccagctttgcatttccggactttttaaaaaaatactcttacccgtaattcagcctgaatgaggctttttaaaaaaatcgagtttcctgtttttatttaggcttcctcatttgcacctcctcctttgaggtagagaagaggggaactgggacgacctttcgtgggcaccaggatgggggcgttgcagggcggggagacgggggtccagagaaccggggaagggccgctgggaggtcccgaaaagtgcgctgtgggtggggcgagggtgaagcaggtaggggcgagatttccggggtcgcgggtggggggcgccctggagcggccaaggtgcagggtcctcgcgtggcacccttgggatctgcccagtttgcggatggagcgcggggctgatcgggcaggtctcacttgtgcaggtgttccctggaaggtgggacctgcagatcttgaaccccaccagactccatcaagggggcttcttcccgccgattcctgagaagtcctacctctgagatgctgggcacagccgcacgtggatgtgggcgggtgtgccgtgggttggagtgggaaggggcaattattcctctctcagggctctcggaggggaaggtttactgctccctagggactttgaaaccaagggctaaccccctgctctcttccaggagagtgggataccgcccgggtgcctgacggtgccttggtgttcttgacaattgaatggtaccatcgggacattactccccaaagaactggtcgttcttacctaggtgatttcagttggacaactgtaggagctgagtggtgttgtcttcattttacagttaaggaaacgaaggctcagaaaagttaaataactcaccaacccacacagtttacaagtagtttctccaggatcccagctctttccgacgccagcgcgtttaatcatctgggggtgccgttgcttgcgggggaaggagaatgtcctagtaattctcttgggggggatttggaggggacgactgttcagagaggcaccctctaagatacccttgagactcctctgtaacacccgctgctgctgttcacaccccctccccaatttgattgatgtgttgagtggggcggaaggttcttttggttgatgaggctgcgaccaaacgcaaggagatataaatagagctttctctttggctctctctagagcagaaatgccaaccccttagcatttccatggcctgctggagtttcatttcttgatattaggattccagccatcttggctggtgagaggcctgctggcggcttcctgggcttggtcctcttttggtgctttcacagaatgatggaagacactggagtgggctggaggagtgctcttaaaacccagttgtggctgagagcggtagctcatacctgtcatcccagtgctttgggaggcccagacgggaggatcacttgaagccaggagttcaaggttgcagtaagctattacagtgccactgcgctccagcctgggtgacagagcaagagcccatctctgagaaacataatacaacaacccagttgcctgctccagagacaactaagctagcctccttctgagccccacttcccccgcccttcagcccctgttcagaaacagactacattggccacactactcacttagatgtttctggaattagggcacgtgccccagaggtactcccgaccacgcagatgtccccttctggcaggaaaagcgcgtttctgcgtttctgcagcctcagtccacgccgccaggtctttgcactaagctgtgggctccgtttctcctccgataccatgtttagcaagtgtttcctgagatcacacggggtgccaggggctgtgctaagaacagggcaggcagactgggagggcatcagcccctggggggcttacaggacagacagtccaccaatggttgtgcgaaagccagcccgctttcgcacaactgtccgatggaattcatggaggtgggagtggggatggtgagagtcggttcctgcttcatcttgttttacttaaattgcacagtgaaagggagaagtgaatgtgcaacggatgaagcaattcccctttggctgggttattttcaaaaccatttttgtgtagagagcagttcccgccctccctgaggccagctgccggtgtgggcctgatggtggggtttggggccccagcaaatgtttccttaacgtgggaccttcagaaggctctttcaggctgggcgcggtggctcacgcctgtaattccagcactttgggaggccgaggtgggcggatcacttgaggtcaggagttcaagaccatcttggccaacatggtgaatatctgtctctacgaaaaatgcaaaaaaaaaaaattagctgggcgtggtgatgagcacctgtaatcccagctacttgggaggtggaggcaggagaatcgcttcaatccgggaggtggaggttgcagtgtgctgagattgtgccactgcactccagcctgggcaacagagtgagactacatttcaaaaaaaaaaaaaagaaaaaaaagctctttcagccaggagggtggcttcagctactccccaggggacaagtgtgtttttcagcaaagctgttagagaagatggtctagaagcagtaccccgggatggaggagacaaggaagggccctatccactggaggatggcagagcctggcttgtttgaaagggaggaaaatattgtcatcttggtaccggtgacagtgtttcataaatagcgaaggtggcaaaacgccacctctctccctacagttaacgctaagactgagttgtctttagtttggttggtggaaatccccggcaatcatagcagaaatgctgccagtttcaagatggaaaaaataaaaaacccaggaaccccccgccccccccccttttttattgcagctaaacactgtgacttgctgtgggtcctaccaaaataacggccattctcccctccctgagggccagcacagtccctagggcctgtgaaagttccccttccagctgcactggctggatatgcgtgaaactcccctccctccccagaagtcacaaccttaccacctcggataagggtcagggctcctggaaatgggtcccttttcctattactttctttcttttttcttcttttttttttttttttttgagacggagtctcgctttgtcgcccaggctggagtgcaatggtgtgatctcggcccactgcaacctctgcctccaggttcaagcgattctcccacctcagcctcctgagtagctggaattacagatgtgcgccactatggccagctatttttagtatttttagcagtgacggtgttttgccatgttggccaggctggtctcgaactcctgaccttaggtgatctgcccaccttggcctcccagagcgctaggattaaaggcgtgagccaccatgcgcggccttcctattacattctgagcacagggggagtgatcagagtgaagggtgtggcatttccaaagtggtatttcggttggcttctgtttcactcatattgggggaaattgcttccacttagagaaaatgccggaagagtgggcggtgccaggagtagggtgggggaggaggagatgcagaaagggatagacctatttgggatttttggtcctggagggatgctgtacgggttaagtatcccttatccaaaatgcttgggaccagaaatggggtggagtttggattttggaatatttgcattatatgcttaccaactgaccattccaaatccaaatatctgacatctgaaatgctccaaggagctttgtatttgatcatgatggcactcaaaaattttggattttggaacgttgtagatttcagatttgggatgctcaaccagtgttaacctcctgtggttgctgtaacaaatgacctcaaactttgtggcttaaaacagaaacgtgcatgcttatagtttcagctacttgggaggctgaggtgggaggatcacttgtgcccaggagtttgaggctgcagtgagccatgattgagcctgtgagtagccatggcactacaacttgggcaacattgcgagatcctgtcactaaaagaaaacaacagcaatgggccgggtgtgatagctcacgcctgtaatcccagcactttgggaggctgaggcgggtggatcacctgaggtcaggagttcaagaccagcctggccaacatggtgaagccccgtctctactaaaaattcaaaaattagccaggcgtggtggcacgtgcctgtagtcccagctattcgggaggctgagacaggagaattacttgaacccaggaggcagaggttgtagtgagctgagattgtgccactgcactccagcctgggtgacagagcgagactccatctcaaaaaaaaaaaaaaaaaaaatgtattctctcacagttctggaggccagaagttaaaaattaaggcatcagcaaggcctcgctccctctgggggctgtagggggagaatcctgctttgctcttccttctgggggctccagcgtatcttggcctgtggctgcatcactccagtctctgcctccgtcttcacaagggcatctcctccgtgtgtctgggtctccgtctgtctcttttaaggacacttcttgttggatttagggctccctcagataattcagatagaaatcatttcaagatccttaacttacttacatctgcaaagacccattttccacattattatttttccagataatgtccaggtcctgggggttaagacctatctttgtgggggccaccaatcagcccgcttacagataaacaggaatgtctttctgtattttctggggacggtgggaagtgcggttatctttgcagggaagccgccctgttctgccactttcccctgggtgactttaggcaaagatgtcagagtccctggtggtctctgctggaccattgaccccagcctccttcctgctttccgttccccaacttttatgaactggcagtccccacctcacccccaacctcctggggtcccaggagcagaaaacttctggagctcaggaggagaaatgcttctcttactttccctccccaacaaactcctccctctttatcttcaacaacagtccctgccctccgcagcccattcccagcccagggctactctctctctctctgaggtcacacagcccctcacattttgaaatttcatctgttgggcagaggtggggggagggctcagatggtgacacagacactgctctgttcccacctcttaccccaggacatggtatggggctggtggcactgggaggggtttggggagccccattaatcattgaagtttgtaggaggggtggataaggacatgggagaatgattgggtgaggtgctccagggctctctggaagggctgggccccccccttgcatcagccacagtgggggcattgctcttttctatgttggtcatgaaatctggaagaagtgctttcttatcaatagagaagcataatcagccttgtttttgaaactttggaaaaccatttatggctgggcatggtggttcatgcttgtattcctaatgctttgggaagctaaggaaggaggatcacttgaccccaggagtttgagaccagcctgggcaacatagtaagacccccatctctgcaaaaaataaaaataaattagctgggccttgtgatgcacgcctgtagccccagctatgtggaagactgaggtgggaggattacttgagtccaggagtttaaggctgcagtgagctatggttgcaacactgcactttagcctgcgtgacagagcgagaccctgtttcaaaaaaaaaaaaaaaaaaaagtcatttatgtccaggtgagggtggggctgggtgaggtggtggttttagggggattgccacgtgggagaaaatgtactgtctttggagtcagctgaactgggttttttcccagccacatttttttttttttttttttttttggtgaggcagagtctccctgtgtcacccaggctggagtgcagtggtgggatcttggctcactgcaacctctgcctccaaggttcaggagattctcctgcctcagcctcccgagtagctgagattacaggcacatgccactatacctggctaatttttgtatttttagtagagacagggtttcgccatattggccaggctggtctcaaactcctgacctcaggtgatctacctgcctcggcctcccaaagtgctgggcctggccaccaagccactttttatctgctgggtgaccttgggcaagtcacttaacccatcagaacctcagagtccagttgtaacactgagacagcaatacctacctgttagtcttgaggattttgtatattatcctgtgtaaagtgccaggcacatagcaatccatgcagtgtctgcaaaggagctggtgtggagtggattagaaacagaagtcatgtatcatcatccctctagcccaacacagcggttgcccatttgggtatcctttccattaacttcttttggatgtgcattttaacttagttgtaattatgagaacacatggacacagggaggggaacaacacacactggggcttgtgagggtggggtagggggtgggagagcatcaggataaatagctaatgcacgcggggcttaatacctaggtgatgggttgataggtacagcaaaccaccgtagcacacgtttacctatgcaacaaacctgcacgtcctgcacatgtaccccagcacttaaaataaaaaataatttagtcgtaattagtaggcatatgctttttatcttaattttcatgttttaattgtaaaatatacataacataaaatttaccatcttaagcatttctaagagcgcagttctgtgggatttacactattgtgcaaccgtcaccaccgcccaccctcaggcatttttttcatgttgcaaaattgaaattcttttccccttaaacactaactcccctctcctcccagccctggcagccattctgctgtctctgtgcttttgacaactctaggtactgcacatgagtggaatcctacagtatttgtctttttattactggcttcattaatttagcatgtttcttgaagcttaatccgtgtgggggtatgtatcagaatttctttcattttttaaggctggacattccactgtgtgtaggtactacattcttttctttttttgagacagtgtcttgctctgtcacccaggctagagtgcagtggcatgatctcagcctcactgcaacctccacctccctgattcaagcaattctcctgtctcggcctcctgagtagctggaattacaggtacgcaccaccacacctggctaatttttgtatttttttgagacggatttttgctcttgttgcccaggctggagtgcaatggcgcgatcttggctcaccacaacctccgcctcccaggtttaagtgattctcctgcctcagcctcccaagtagctgggattacaggcatgtgccaccacgcccagctagttttgtactttcagcagacgggctttcaccatgttggtcaggctggtctcaaactcctgacctaaagcgatctgctcgctcggcctcccaaagtgctgggattataggcgtgagccaccgcgcctggccaggaccatgttctttcgttccattcacccgatggacacttctgttgctcccactctatggcttttgtgaataatgctgcgttgtgaacatgggtggacagagacctgttgaagtccctgccttcagttctctcaggtatatacccaaattgctggatcatatggtaatccaatttttaatttttttgagcagctaggcatgtgcttttgtagtttgctttttttcacttaacattggctcattaacagttttccacattgcttcataacctacgcatcctttttagtggcagtgtaagtgccattgagctgctattgggaagcaagaaaaaattacagtcattataccagtcttagcaagaattatagtcataccatcgtccttcccacccttcttgcccagatccaccgggaaaacagaggaatagcacatggggatactccttggtgcctcccaggctgagcgtgggcacacactcgggaaggcagctgagccaccccttcatgcctttgtctccccacttcagacagccagcctttcagtcgccagttctacttttttgggtttttttttccactttagcagttttaaggaacatttgtatataaaatgactttattcttgcatcttgttaattatttcttccttgtattttcccctttcatttcctacatggtgagatttggctttccattcaaggatttgttcttgctttcttttttctttcttttttttttttttgagacagagtcttgctctgtcgcccaggctggagtgcaacggtgtgatctcggctcactgcaacctccgcctcccgggttcaagcgattctcctgcctcagcctccagagtagctgggattacaggcatgcgccaccacgcccagataatttgtgtatttttagtagagatggggtttcatcgtgttggacaggctggtctcgaactcttgacctcaagtgatccacctgcctcagtctcccaaagtgctgggattacagacctgagccaccgtgcccggccacgcccagctaatttttgtatttttagtagagatggggtttcatcatgttggccaggctggtctctaattactgacctcaggtgatctactcgcctcggcctcccaaagtgctgggattacaggcctgagccactgtacccagccaaggatttttcttttcttttctttttccttatagggtctcattctgttgcccaggctagagtgcagtggtgcaatcacagctcactgcagcctcgactatatgggctcaagtgatcctcctgccttagcctctggagtagccgggactgtaggtgcatgctaccacccctggctcatttaaaacattttttttagtagaggccgggtgtggtggctcacacctgtaatcccagcacttttggaggccaaggcgggtggatcacttaggatcaggagtttgagaccagcatggccaacatggcgaaaccccgtctctacaaaaaaatacaaaaattggccgggcgcggtggctcacgcctgtaatcccagcactttgggaggccgaggcggacggatcacgaggttaagagatcgagaccatcctggctaacacggtgaaaccctgtctctattaaaaatacaaaaaattagccgagcttggtggtgggcacctgtagtcccagctacttgggaggctgaggcaggacaatggtgtggacccaggcggcggagcttgcagtgagccgagattgcaccactgcactccagcctgggtgacagagtgagactctgtctcaaaaaaaaaaaagttagccggacatggtggtgcatgcctgtagtcctagttactcaggaggctgaggcaggaaaatcacttgaacccttaaccagggaggcggaggttgcagtgagccgagatcatgccactgcactccaacctgggcgacagagcgagactcgatctcaaattttttttttttgagagacaaggtcttgctatgttgcccaggctggtctcgaactcctgagctcaagagatcctcttgtcttggccttccaaagtgctgggattacaggcgtgagctaccacgcctggcccattcacggatctttttgtggtcattgtccagtgttagcctaatgataacagcctggctgggatgaatgccagcgtggacagtcgtgccattagacttttccccctgcactcgttcagtgtagatgacgtatttcttcctttaaacctggacccgctttgctggtttgctggcctctgtggtgtcctcacacaacctgaacttaggcttctgcctcagctctttggaaagagggaaagacaatctctcttcctgcgaatatgggaaggtgcatagaaatgccttttgtggttcttgctgtggttctaagtcacgaaggtattgaacttcattttggccactccggcttcggtgatggccacaaaagtgaagagcggttccattacttttttctttcttcttttttttttgagacagcatctcgctctttttcccaggctggagtgaagtggcaagatctcggctcactgccatctctacctcccgcgtcctagcaattctcctgtctcagccatctaagcagctgggattacaggtgcatgccaccacgcctggctaatttttgtatttttagtagagacggggtttcaccatgttggccaggctgatctcgaactcctgacctcaggtgatccacctgccttggcctcccgaagtgctgggatgacaggcgtgagccactgcacctggcagcggttccatttctttatcaaactattgctctgcggaggctgtctctctgtccagcccatagctggacattatgggctgtacagcgtgttctgtggtctgaagaaatgacagccatccaaacccacacggtgtcttctgttctggtttggctctggcgctctgagcatttgcactttccactgggtaagcaaagcccactccaagtcagcgtctattcaagacccagtcgtagtccccagggctaccagcctcagtttcacttgccagccatgttcagggcctcccaccagggaagctaccccacagccctgtgcagtgtctgtctctctcactggcacacaggacagttcttcctggcattatgtgcccgagagggtgcggaggaacatgctagatccagcccatctctgcaccgctgtggggcccgtatcccctcatttcacggacccagatggccatctcaagggagcatgtgggatatctacctgttgatatctacctgttgattcctgtcaccttccaaacctagaaggctcttctggtgggcattaagaggtctgactttatttactttatttttttatttttatttttttaatatttttttattatactttaagttctagggtacatgtgcacaacgtgcaggtttgttacatatgtatacatgtgccatgttggtgtgctgcacccattaactcgttatttacattaggtatatctcctaatggtctccctcccccctccccccatcccaaaacaggccctggtgtgtgatgttccccttcctgtgtccaagtgttctcattgttcaattcccacctatgagtgagaacctgcagtgtttggttttttgtccttgcgatagtttgctgagaatgatggtttccagcttcatccatgtccctacaaagcacatgaactcatccttttttatggctgcatagtattccatggtgtatatgtgccacattttcttaatccagtctatcattgatgaagaggtccgacttcaatgcacccctcgttttctttctttctttttctttttctttctttcttttttttttttttttttgagacggagtctcactctgtcgcccaggctggagcgcagtggcatatctcagctcactgcaacctccacctcccgggttcaagtgattctcctgcctcagcctcccaagtagctgggactacaggcagacatcaccatgctcggctaatttgtgtatttttagtagagacagggtttcaccatgttgcccaggctggtctcaaactcctggcctcaggtgatccacctgccttggcctcccaaagtactgggattacaggcgtgaaccactgcacccagcctaccctcattttctatagggctgtgtcccaaagaaatatccgtttaataggtcaggtttgcattgccctcctgtctaaatgtatggccaggctgttgaccaccacccacaaggggagggtgaactggcacccaaagccctgcacagatacagggggttttaccactgttcaagtctcccatcactgctgggaaaacagcatgcaattcgacccttagagctgatttgtttttaccatctttgatcagattggcatctttgcaaacgaggcattgttcaccttggaactgctagccaccaccccagcagctctcgtttggtcagggagagttgtttgttgggcgctacagaatccagctgctcatcatagtgccagagtcagtcctaggggaaaagaggatccctgctcatgtgagtatctcctccttgccttccccaggtaatgccatcgtgtataaatgatttctgttttattagggaactcttctgggcattgtcatccctgttagagtgtttccttgacatcacctgagatgtcctgggtatttcagtcttaagattattttatgtcctagctgggtgcagtggctcacacctgtgatcctagcacactgggaggccaagatgggaagattgctagagcccaggagtttgagaccagcctaggcaacgtaagggagaccctgtcctacaaaaaataaaaacagttagctgggtgtggtggtgtgcacctgtgattccagctacttgggaggctgaggcaggaggattgcctgagccctggaggtcaaggctgcagtgagccgtgatcgcactaatgcattttagcctgggtaacagagtgacagcctgtcaaaaaaaaaaaaaaaaaaaaaacctgaaaaagtaatttcatgttcttcagtcatatccatcataggggtagctttggtgaatgtcccatggcaaggtagtaaatgcctctcaagaggaaatgctctactccaaagccccagtagttacctcatctctgggagatttgggtgccagttcaccctcccctactacaggcgcacgccgccatgcccggctaattttttgtattttggtagagatggggagcgctcacaagctcttgccgtagctctggtttacattccgcacagggctgtggaacagaattcgctcatgccagtacatgccggcactgcagcttctattctacactgtgtgggcttggtgtggacattgacatgtccaattaatactgcttgaggaggggatttacacgcttcctggtttccaatagtaggcaggggaaatattccgcagccagatattatatccattctcataaaatatttaggtaaaggagacttctttctgtttaaacatttcagctttcgtcatcctataaaccctttcattctttttttttgtcccccaagacggagtctcactctgtcacccaggctggagtgcagtggtgcgatctccactcactgcgacctccgcctcctgggttcaagctattcttctgcctcagcctcccaagtagctgggactacagctgcccaccaccatgcccagctaatttttgtttttgtttttgttttttgacgcagagttttgctcttttgcccaggctggagtgcaatggcacaatcttggctcactgcaacctccttctcctggcttcaagcgattctcctgcctcagcctccagagtagctgggattacaggcgcccgccatcataccctgctaattttttgtatttttagcagagatggggtttcaccatgttggccaggctggtctcgaactcctgacctcagttgatccacccacctcagcctcccaaagtgctaggattacaggcatgagccaccgcgcccggtctttttttttttttttttttttttttttttttgaggtggagtctcactctgtcaccgaggctggagtacagtggtgcaatctcggctcactgcaacctctgcccccccaggttcaagtgattctcctgcctcagcctcttgagtggcagggattacaggcacccaccaggctaatttttgtatttttgtagagacagggttttactatgttggccaggctggtcttgaactcctgagctcaagtgaaccacctgccctggcctcccaagtgctgggattacaggtatgagccaccatgcctggccgtattcaaagattttctgattggcaactcgttgaaagagttaagctttgtcttgaaatcagtagaaataaatgcttgaggtcaggtgtagtggctcacacctgaattcgagaccaacctgggcaacatagtgagaccctcccccatctctacaaaattcttttttaatttttatttacttatttattttttgaggcagagtctcgctctgtcgcccaagctggagtgcagtggtgcgatcttggcttactgcaacctctgcctcccgggttcaggcaattctgcctcagcctccccagtagctgggattacaggcttgcgccaccatgcctgctatttttttttttttttcagagatggagtctcgctctgttgccctggctggagtgcagtggcatgatctcggctcactgcaacctctgcctcctgggttctagtgattctcctgcctcagcctcctgtagctgggactacaggcgtacaccgccatgcctggctaattttttgtattttagtagatacggggtttcaccatgttttccaagctggtctcgaactcctgagctcaggtaatctgctcgcctctgcctcccaaagtgctagcattacaggcatgagccactgcgcccagccaaaaattgtttttaaaaattagctgggcacagtggcatgcacctgtaatcccagctacttgggaggctgaggcgagaggattgcttgagcccaggaattcaaggttgccaagggtgatgatcacaccattgaactccagcctgggtgaccaatttatcccagtgacatataatagtttcataacatccttgccagcattgaataatattgaaagaatttttttttttttttgagatggaggctcactctgtggtccaggctggagtgcagtggcgcaatctcgactcactgcaagctccgcctcccgggttcaagtgattctcctgcctcagcctcccaagtagctgggaccacaggctcacgccaccacgcccggctaattttttgtatttttagtagagattgggtttcaccgtgttagccaggatagtctccatctcctgaactcgtgatctgcccgcctcggcctccgaaagtgctaggattacaggcgtgagccaccgtgcccggccgaaataatgttttgctaataggctcagaggtaattatttaaaacatatctttcttttctttttctttttttttttttttgagatagggtctcactctgtcgcccacactggagtgcactggagcaatcacagcttattgcagccccgacctcctgggctcaagtgatcctcccaccttagcctcccaagtagctgggactacaggtgctgccaccatgcctggctaatttttgttttttttttttttttttttttttagtaaagacagggtttcgccatgttgcccatgatggtctggaactcctgggctcaagtgatcttcccgccttcgcctcccaaagtgctgggattacaggagtgagccaccacgcctggtgtaaaacctagttcttttattgccaatgagtttaaatagctttctttctctttactggctggatgtatagcatgaggtctgcacttccttagttgtccagtgaaccaactccccgggagttggattcatcttgaaattcagtaatgcagtagttaaacccatgaactctagtggtgggcagattcagattcaaaccgtagctcttccacttcccagctgtgtgactctgaggtgcctacttaacttctctgatcctctatttccttgtctgtaaaatgaaccttaatgggcccattcctaggtttgtctgaaggattaaataaggtaaatagataatgaacatcaccttccacatagttgatgctctgtaaatattagctgttcttattcttttttttttttttggtttggcaaatactttatttttatttttatttcagtagtttttggggtacaggtggtttttagttatacgagtaagttctttagtggtgatttctgagattctgatgcacccgtcacccaagcagtgtacactgtaccaaatgtgtagtcttttatccctcaccctctcccatgcttcccctcattcttattatatattaatataaattaacaagtctctgttctccctcaagattgattttgttttaatctatagcagattgatttttctgccttagaggtagatggtcccagaaggggagctgacaacctctttctgtccaaatagactgtgtcctcggctggctgactggatctgggtgtgagcctccctgagcaagccggtgaacctctcccatgtggtcttagctccctgagcagatgagtaggggctgacggggctgtgtctccaggactctgagtctgctgtggtcctgcagcctctggagcatggaaatgggggctaaggactcactaatggtttcattcaagtccagaatttgtcttggtgactgttcgctgctcacatccagatgaccctatatgctgtttgggaaactgaggcagccaggtggattcctcaggtatttcaggggacagaatctggggctttgactccagcttgggttgctgcccataatgcctgctcttgaaaccttttaattatttttatttctaattaactttttttgagacaaggtcttgctctgtcacccagggtgcagtgcagtggagctatcatagctcattgcagcctcagtctcctgggttcaagtgatccgcccacctagtagttgggacaacaggcatatgccaccacacccgggtaatttttgtagctttttgtagagatggaggtctccttttgttgcccaggcttattctgagtcaacatgagtgaccatggcccaagaaacagtctcaagaggtcctgagaaagtgtgcccaagacgattgggttacagtttggttttatgcattttaggaagacaggaattgtaggtaaaatcataaatcagtacatgaaaagtatacattggttcaggtctcaaactcctgggctcaagcgatcttcctgcctcggcctcgcaaagtactgggattacgggcatgagcctgcgccagacctcttaaacccttcagagtggccttggcattcgttttgagggggcttcagggagccttaagggaggagaggaaagtcacgcaaacagggtgtgcttgatgcctgcattttcctctttactgctgacctgctgttgaggaggaagttaagaacatcaggatattggtctcaaatgaactacttcatgagaattttcttctaggaggaaaaacaaaaacctcaactttctcgttacacatccttctaaaaaagtccattaaaaatgtttcttgccaggcgcggtggctcacgcctgtaatcccaacactttgggaggccaaagcaggtggattacctgagatcaggagttcgagaccagcctggccaacatggtgaaaccctgtctctactaaaaatacaaaaattagctgggcgtggtggtgggtgcctataatcccagctaattaggaggctgagacaggagaatcacttgaacctgggaggcagaggttgcactccagcctgggtgacaagagagaaattccacctcaaaaaaaaaaaaaaaaaaaaaagttcctcatattcagagccaaggaaaggagatgtactcccagaccacaacttctgtttctgatggtttcaagcatccaggagccatgaccaggtcatgaatctttttttccctattgtgtggtgtgatgagtatttgaataatacagcccatctgctgtcatttggaaaccggtgatgatgtgtggtctatttgtaaattgagtgcagcacatctaatatgtgatagtttcctaagatgtgaatggctccatttctccagcaggaccgtgttttgaaaatgaataaaaggttagcttcagattagcattaaaagcaagagttttagaattacaggcttcatatcttggctttgacacttaacatgtaggggaccttgacaagttatttaagtttctgggttctcatctgagaattaggatgatagtacctctttgactggattgtcgtagagatgtcgtaaagattggaaataatgaaacacctggaccaagttatgggtacccaaaaagttgcagtttttaccattggatgaatgaatctttgaggcccacactgtggtagggagtggatttttaaaaaacaatttgtttttggtttttttttagatggagtctcgctctgtcaccgaggctggagtgcagtggtgcgatcttggctcactgtagcctccaccttcctggttcaagcgattctcatgcctcagcctcccgagtagctgggaccacaggcgcccaccaccacacccagctaatttttgtatttttggtagagatggggtttcaccttgttggccaggctggtctcaaacttcttacctcaagtgatctgcccgtctcaacctcccaaagtgctgggattacagatgtgagccaccgcgtctggcctaaaaatttatttatttagaaacgagtctcactctactgtccaggggctggtctttttttgagataaagtctcactccgtcgcccaggctggagtgcagtggtgcaatcatatctcactacatccttgatctcctgggctcaagcgatcttcccaccgcagcctcccaagtagccaagagtacaggttcatgccatcacaccccgctcattttgtatttcagtggaagacagggtttcaccgtgttgcccagactggtctccaactcctgggcccaagagatccacccaccttggccttccaaagtgctgggattataggtgtgagccaccaggcctggcctgtccgggctgctcttgaactcctgagcacaaatgatcctcccacctcagcctctcaagtagctgggactatgggtgagccctgctcagcctagctgagtggattttaatgacaggtgttcctgtcatgagttcttgaggtttgcagggtgtagtaagctttattcatccattaccttatttgatcttcccatgaatgactcagatggaatgcacagagcatgtgtcaataaataccccattttgctatgttgcccaggctgctcttgaattcctggactcaagagatcctcccgcctcggccccccaaagtgctggaattacagacatgagccactacatctggccttgtcagcgttttctagcctttcaaggtaggaaggagcttgggtatctgaggcaaatactgctggaagtgagatcttgagcaggccattttcttcctctcccagggtggtggcaagagccgcccctggccccactcaaggggcctggactggaaggtatggcagctcacagtgcggtctgccctcaggtgaccttggccacagcagtggattctggtgtcacctgtgaggctcacaaggcagcaccccaggagcccttgtgctgcgggttcccagggggagtgggtaggagatggccgggcagctggcagtaaccttgaccctgatgggctgtgtttctccaactttcccaccatccctccagcctgaagagatgggatgtgcagctcttgacctgcagccgcccaccccaactgcgacctcgctttgaagcttcaacttctatttttaaagctaatgttaattttacattcgattccatgatatatccatgtttattttactataaagcatattttcccctaactttagagtcaaatgggtgctctgggaagatgtttatgttttttctgtggcttccgctactcccagcacagcgactccaaccagttttaaaaatgtggattagtaccaaagaggatgatgaaccattagacacaattaggatgagaaatgccgagattatttatttatttatttttagagacagggtctagctctgtctcctaggctggactgcagtggtgccatcatagctcaatgcagccttgaactcctgagctcaagtgatcctcccgcttcagcctcctgagtagctcccaagtgcacactgccatgcccagctaatttttttcattttcggtagagacaggggtcttgctgtgttgcccaggctggtctccaacttctgggctcaagcaatcttcccacttcggcctcccaaagtggtgagattataggtgtgagccaccgtgcctggtggagaaacgaatagtttaatagcacttttatccaatgtgctttgttggttgagtaactgactttggttcaggtagagaattattaagatgcattacctcaaatgtaaacattttattttatttttttccgtggctagccgcacagagtcctatatacctctccagcagcactcacctggagaagctgctatggatgccagctactgttatttctcccttcccaataaatatttcattttcacttaaaatatgtcagtgtacattggttccctgatctgctctcagatggccaagggcttatgtttgagtaggtcacaggttcatctttctgtatgaggcgtacatgcaacgtataatccacttttttaatcctactttttttttttttttttgagacagggtctcgctctgtcacctaggctggagggcagtggttcactcacggttttctgcagccttgacctcctgggcttaacccatcttcctgcctcagcctcctaagtaagcagggatcacacacacctggctaatttttttatttttttaattttttgaaacagagtctccctctgtcgccccggctggcgtgtaatggtgcgatctcagctcactgcaacctctgcctctctggttcaagcaaacctcttgcctcagcctcccgtgtagctaggattacagtcgtgcacaacgccacatctggctaatttttgtattttagcagagattggttttcactatgttgttcgggctgatctcgaactcctgacttcaagtgatccacccaccttggcgtcctaaagtgctgggattacaggcatgagccaccatgcctggccttggctaatttttttgatttttagtagagacgaagtctggctatgttgcctaggctggtctcgaactcctgggctcaagcattcctcccagctcagcctcccgaagtgccggaattgcagatgtgagccacagcgcccggccttccttctacattttaataattcctgctgagattttacagttgtcttgcctggtctaattccataattctacaggaagtttgttttattgggtgacttgtcttttactaggtttctgaagcactcagctttgttttcttcatggaatcagctcctttcacacccagggtgcaccctcttatgtaataattacattatatgattacacaggtaaacaactgccatccgattggagcaggcatggcgacctctgtgggcatgcagagacaggaaggaaggctcgactccatggcaccccgggggtggtcagcacgtagaggccattggccagggtgtttggtaagggcatggagagcgccattcacccctgattctgctaggtaggagtcagggtaagtcgtagggatcacagagcctgggccagaggcaggttcaacttagaaatccctccgggactaggggaagccctcactctgagaatgagcacatgctccagaaagggggcatcaggtaaagtttcttttcccgtgggtcctgtcagtagcatttgtacttaggagctttgccgtttgccagctgaaagttgccattttcattaacgtagcttgccgtttctgtatctaataacaacaaacacttttgtaatatgtaccctgtgccaggcagtgtactgggcactttgaaaatacgaaggttggccgggcgcggtggctcatgcctgtaaccccagcactttgggaggccaaggcgggtagatcacctgaggtcaggagttctagactggtcaagaccagtctgaccaatatggtgaaaccttgtctctactaaaaatacaaaaattagccgggtgtggtggtgggtgtctgtaatcccagctactcgggaggctgagacaggagaattgcttgaaccggagaggtggaggctgcagtgagctaagatcatgccactgcaccactccagcctgggcgacagagcgagactccgtctcaaaaaaaaaaaaaaaaaagaaacaaaaagaaaagagagaaaaggaaaatactaagctagccggacactgtggttcatgcttgtaatcccagcactttggaaggctgaggtgggcagattgcttgaactcaggagtttgagactagcctgggcaacatggcaaaaccccatctctacaaaaaaatacaaaaattagccaggtatgatgatgcacacctgtagtcccagctactccagaggctgaggtgggaggatcgctgcttgagcctgggaggcagaggttgcagcgagccgagattgcaccactgcactctagcctgggcaatgtaaaaaaaaaaaaaaaaaaagagagagagagaaagaaagaaagaaagaaatgctaagctaattagccttatgacaaccctgtttgaggccgggcgcggtggctcacacttgtaatcccagcactttgggaggccgaggcgggcggatcacgaggtcaggagatcgagaccatcctggctaacacggtgaaaccccgtctctactaaaaatacaaaaaaattagccgggcgtggtagcgggcgcctgtagtcccagctactcgggaggctgaggcaggagaatggcgtgaacctgggaggcggagcttgcagtgagccgagattgcgccactgcactcccacctgggccacagagcgagactccgtctcaaaaaaaaaaaaaaaaaaaaaaagacaaccctgtttggtaagtactactgtgattcccactttacagatggggaaactgaggcacagaaaggggaagtaacttacctaagtcttacccagccagaaagtggcagaggctgctcctaaccctgcaccatgctgcctccaaacacgggcttgttcccaggaagaagtgctgggttgggggaggggagtccagatcccagggaggaggactcaggaggcctctgggagtcaggcggctatgcaggaggggcttcctggctctttttcacttgtcccctcacccccaccccccgtccccaccttcccaggacttagttggacttccaggcagagttccttgtttgtttttgttttgttttttcctttttttagaaacagggtctcgctgtgtcacccagtctggagtgcagtgctgcgatcatagtttactgcaacctcaacctcttgggctcaagcaatcctcctgcctcagcctcctgagcagttaggactactgtgtgcaccgccacaccaagctaatttttttttttttttttgagacgaagtcttgctcttgtcccccaggctggagtgcaatggcacagtctcggcccactgcaacctctacctcccgggttcaagcgattctcctgcctcagcctcccgaatagctgggattgcaggtgcccaccaccatgcccagctaatttttgtatttttactatacatggggtttcaccatgttggccaggctggtcctgaactcctgacctcgtgatccacctgccttggcatcccaaagtgctgggattagaggtgtgagccaccgcacccagccacaccaagctaatttttagattttttgtagatatggggtcttgctaagttgcccaggctggtctcaaactcctgggctcaagtgatcctcccgcctcagccccccatagtgcgtaagccaccgtgcccagcctagttccttgctcttgaaggtccttgtgtctgatggagttggcgtcttggactctgatcctctacagcaagagtgggcagaaggacgcagctctggtgcctggcccttccccagttggcctggggtggtgcccattctccccaatgccaggggcaagcaaggcctggcctctacaatctcaatggcctccttgcccaacccctaggcctcttttgggaagttgacctaggtgtccttgagctggcagttgataccatctggctccagtgcactggcctgggagaggcagtggtacggtggtaaagagcaggctccagaataaacctaaacccacttccttccccgtcacctccttgagtcccactttcctcattcataaaactgaatggctgccttcggggcttgtcacaatgtttaatgagaaaatggacatcaggtgcctagtcatgggggctggccgctgtagccttgaagatgagcctgttgaaagatgaagaggctgtgctatgggacagagtctgaaccgatcccagaggctccaggggcaggagtggcccagagacctgctctgagaatggaagcattgtcacgggccccctgccaaggagagagtgtgaccaggacaatgactggtgggatgaggtgtccagagccctctatgtcatccccaggatttcttcctctttggttcagagcttacagggttgtctgcagatctcacgaggataggtggaggaggacccctaagctgacagccgggtagggaaggagggcctgagtgccgagtgcctgggcagagagccagctgcagatctcaccccaggagaatggggcgaactaccacatagctgacacttgacggggggactgccatgagtgtgtgtgtgtgttttgggagggaggttgtttgtttgtgattaagttgaggtcaggacagaagaaggaaagtggaatttgtagttttaagagatattatatggccatcttaagattgcagcagcagaccaggtgcggtggctcacgcctgtaatcccagcactttgggaggcggaggcaggcagatcacttgaggtcaggagttcaagaccagcctggccaacatggtgaaaccccgtctctactaaaatacaaaaattagccaggtgtggtggcgtatgtctgcagacctagctacttgaggagatgaggcaggaggatcgcttgaaccagggtggtcaaggctgcactgagccaagatggtgccactgcattccagcctgagtgaaaaagtgagaccctgtctaaaaaaaaaaaaaaaaaaaaaattacagcagaggctgcatctgggaattataggccgtgatcttccagatcgtgcatgcggatgttttaaatatatatgccatatgttttataaatgtgtttattcatgcatactgtacgtttttaattacatggaatcaacacaagttagttattaaaagtttataaaatatagatttggcagagtaagaaaaaaaagaatctgggccgggcgtggtggctcatgcctgtaatcccagcactttgagagatccaaggcaggcagatcacctgaggtcaggagttcgagaccagcccatggtgaaaccccgtctgtactaaaaatactaaattagctgggtgtggtggcgcctgcctgtaatcccagctgcttgggaggctgaggcaggagaatcacttgagcccgggaggcggaggttgcagtgagccaagatcgcgccattgcagtctagcctgtgcaacaagagcgaaactccatctcaaaaaaaaaaaaaacaaaaacaaaaaaacaaaaatccggccgggcactgtggctctcacctgtagtcctagtactttgggaggccaaggcaagaggatcaattgagaccaacctgggccatatagggaaaccctgtgtctacaaaaaacagcaacacaaaaactatccaggcatggtggcacacacctctagtcccagctgctcgagaggctgaggcgggaggatcgcttgagtccgggaggttgaggctgccatgagcctattatggcattggactccagtctgggtgacagagccagaccctgtctccaaaaaagaaaaagaaaaaaactccatcttccacctaccccagaaccacgtcacccagtggttcctaacctgtctcagattttaaatccctttgaaaacctgcagaaaagcatggactctctccagaaaaaggctctttcatccacagactctgttggtgtgcagggaaggactgtttaggtccaacctctagcttctctgtcgtatgagattctgactctgaaaccaacctcaaaggggcaaatcattctgaccctgtgacacctctgtaagacacacttgccagcaacctattcaaagtctgtcttgaacctgtttctattttctttcttgaccacctcttaaagaagacattgcacaagtttgcccctgccatttaaatcctttgtcctaaatttacagcccctttctggggctttcagcaaggatcgactttcctgcgtctttgggtgactctccactgtatcatcggctcatttctggaagaggaccatcctttggggcatgtgtaaggccccttttgtgggaagggccttggcttaggcacatggggaagcatgcctgcgagagctgggtgtgtgaaccttctttccgggtagtcaggagaaacttttttttttttttttttttttgagatggagtcttgctctgtcgcccaggctggagtgcaatggcacgatcttggctcactgcaacctccgcctcccaggttcaagtgattctcctgcctcagcctcctgagtagctgggattacaggcacgtgccaccatgcctggctaatttttgtatttttagtagagacggggtttcacggtgttggccaggctggtcttgaactcctgacttcaggtgatccgcccaccttggcctgccaaagtgctgggattacaggcgtgagccaccgcgcctggtctgggggaaatttctatagaggatgagaagtcagggatgttgacttctcatgctgggcctcaggtgcttgagaccagtcaggctctccctgtgaaattagcaagaactcaccctttggccaagtaggctgagcgccccacacccacatcgcctgtttacctctcaatattctcccaggccttggttagccgcccttagcccatgtcctgtttctcaggcatgaagaaggcccctgatgtcagcatcacagagctctcccagccctacaggtggccagccttcctggagaccactcctggtgccattccttgggcaccagtgactttgcctcttctcctcctcctcttcttcctcgtcatgttttagcataagaagctttattgagctagaattcacataccatacaattcatttaatgtgcacaatgcaatggttttttgttgctgttgttgttattgttttcgtttttatttttgagatggagtttcactcctgtcacacaggctgaagtgcagtggcgtgatctcggctcattgcaacctctgcctcccgggttcaagtgatccttctgtttcagcctcccgagtagctgggattacaggcgcccaccaccacaccgggctactttatgtatttttagtagagatggggtttcaccatgttggccagcctggtctcgaactcttaacctcaggtgatccacccgcattggcatcccaaagtgctaggattacaggcatgagccatcatgcctggcctaatggtttttatttttatttttaaattttttgtagagatggagtcttgctatgttgcctaggctggtttcaaactcttggtgtcaagtgatcctcccacctcggcctcccaaagtgctaggattacaggtgtcagtcaccaaaccccgcctcagtggtttttagtatattcacagttatgcaaccatcagcatcataaattttaagctgtgcatggtggctcatgtctgtaatccaagcactttgggaggctgaggctgaactcacttgagcctagaagttcaagaccagcctgggcaatatagtgagaccctgtctctattaaaaaaaaaaaattaaaacattttcatcactccaaaaagagatttcacaccattagcagttactctctacttttcttccatctctcagcctctggcaaccactaatctgctttctgtctctatggatttgcctgttctggacatttcatataaatgggatgatacactatgtggtcttttggggttgagtttgcaccttagcatattgcctttagaaacctgtctgcctcataccattacagaggagctgttgtttgtactgaccatttagtccatcacaggtattgatggagcctctaagcatggaatagtgctggccccacagcaggaacgcggcagccatgggtggcgtattagttactggttgctgtttaacaaatcacgccaacacttggcagactgaacagcaagcatttatgatcccgtagtttctgtcaatcaggaatacaggagccgcttcgttgggtggttccggtccagggtctcatgaggctgccattgagctttcagtggaggctgcaggtgtctggggctggaggtacctgccacagcgtggttggcaggctcagtgactggctggctgttggccagatatctcagttcctcttcatgtgggcttcttcatagggtggcttgagtgtccttatagcatggccactggcttaccccagagcaagagatgagagcactggagagagacagagagagagagagaagaggggaggggaggggagggggtgtataagcccaagactgaagccccagtgatgtttcataacctaattttttcattaattaattaattaattttagagatagggtctctgctgcccaggctgaggtgcagtggcacaatcagagctcactgcagcctccagctcctgggctcaagcaaccctccagcctcaccctctcaagcagctgggactacaggtatgcatcaccatgcctggctgctgctgctgctttttttgtttgtttgtttgagacggagtctcactctgtcacccaggctggagtgcagtggcgcaatctcggctcactgcaacctccccttcccgggttaaagcgattctcctgcctcagcctcccgagtagctgggactacaggcgtgcgccactagtttctgtatttttagtagagatggtttcaccatgttagccaggctggcttgaactcctgacctcaggcaatctgctcgcctccccgcctcgggctccaaaagtgctgggattacaggtgtgagctaccaaacctggcccggattcttttataatctaatgttaaaggtgctatcccatcactgtgccatattctttaggtcacattgactgtgaatgtgggtgggggctacacaacggtgagaatctcaggacggaagtaactgaatgtagtttcatatggagagtgatccagcttgttctggaagggactgcagtctccccgggacttagctttggagaatgagccagcttgttctggaagggatttcagtctgcccaggacttagctttggaccagctatgagttctctgtgatgaaatctcagcttttcccaactgcagcttcaacctcctgagttcaagtgatcttgttgcctcagcctcctgagtagctgggactaccaccacgcctggctaatttttgtattttttgtagaaatagggttttgccacgttggccaggctggtctccaactcctgagctcaagcgatctgcctgccttggcctaccaaagtgctaggattacagacatgagccaccacacctagccaaggctgcgtttttattttttattttattattagtattatttgagacagagtttcactcttgttgcccaggctggagtgcagtggcgccatctcagctcactacaacctccgcctccagggttctcctgtctcagcctcctgagtagctgggattacaggcatgccactacacttggctaatttttggtatttttaggagagacgaagtttaaccatgttggccaggctggtctcgaacttctgacctcaggtgatctgcccacctcggcctcccaaagcgccgggattataggcgtcagccaccacgtctggcctgggtatttatttatttatttcgagacggagtctcgctgtctcactctgttgtccaggctggagtgcagtggcacgatttcagctcactgccatctccgcctcctgggttcaagcgattttcctgcctcagcttcccgagtagctgggattacaggtgcacaccaccacaggtggctaatttttgtgtttttagtagagacagggtttcaccatgttggccaggctggtctcaaactcctgacctcaggtgatccaccctccttggcctctcaaagtgctgtgattacagtcatgagccaccactggggttttaaatgtgtaacaatggatgtccattttagtgggannnnnnnnnnnnnnnnnnnnnnnnnnnnnnnnnnnnnnnnnnnnnnnnnnnnnnnnnnnnnnnnnnnnnnnnnnnnnnnnnnnnnnnnnnnnnnnnnnnnnnnnnnnnnnnnnnnnnnnnnnnnnnnnnnnnnnnnnctgttagatggtgtaacccatcataggggtgacccagtgccatggtgggacgtgtcaaacgctttccccactgggattgggccctggaccttttttttttttttttttggggggctgggtctcgctaagatggcaccactgcatgccagcctgggtgacaaagggagacattgtctcaaaaaaaaaaaaaaaaccaaaaaaccaaaacaggctgggcatggtggctcatgcctgtaatcccagcactttgggaggcagaggcgggcggatcaccaggtcaggagattgagaccatcctggctcacacggtgaaaacccatctctactaaaaatacaaaaaattagccgggtgtggtggcgggaacctgtagtcccagctactcgggaggctgaggcaggagaatggcgtgaacccgggaggcagagcttggagtgagccgagatcgcgccactgcactccagcctgggcgacagagtgagactctgtctcaaaaaaaaaaaataaaaacaacaacaacaacaacaaaaaaaacgagccttgtgccttatagcagtgggacaacttggtgttagaagcagttttaggtggtggttccaggtgggttctgattcctgctctgtcacttcctgcacggcttcggcgtcagtttcctcatgaagatgactattgtaactatttagtggggttgttttgaggattttatgagatcttcagagttctagggatctcttgctacataacagcctgtcccaagctcagcggtataaagcaacactgtgatgctcacggtcccaggggccaggaattccgacagagctcagcaggacggcctggctctgctcccatgatatctggagtcagctgggaagactctcaaggggttggtaacaacttgaacaggtggggtctggaatcatctggaagtttcatcactcatgtctggtacctgggtgggatgacgaaggttgggctcaggtgggactgtcaacttgagtgccttcacatggtttctccttctggcttgcttgggttgtgtcactgcatggcagcgtcagggtagtcagacctctaacttaatgctcagaattccaagagccagcattctaaccaaggaggaagcggcatggcttctcatggcctcacctctcaagtcacttagcatctctgctgccatactctcttggcagtcacaagcccactagatttaagaggaggggacacagaggccatctctcaatgggaggagtccctgcaaccacgagccacacgtgctttttggctgatacttgaaagaatgagcaatgcaggctgggcgcagtggctcacgcctgtaatcccagcactttgggaggccaaggagggtggatcacctggggtcaggagttcgagaccagcctggccaacatgatgaaaccccatctgtactgaaaatacaaaaattagctgggcatggtggcaggcccctgtaatcccagctacttgggaggnnnnnnnnnnnnnnnnnnnnnnnnnnnnnnnnnnnnnnnnnnnnnaatcgcttgaacccaagaggccgaggttgcagtgagctgagatggtgccactgtactccagcctgggcgacagagagagactccgtctcaaaaaaaaaaaaaaaagaaaaaagaaagagcaatgcagttgggtgtgatggctcacatctgtaatcccaacactttgtgaggctgaggcaggcagatcccttgagcctaggagtttgagaccagcctggacaacatagcaagacctcaagacctcatcgctacaaaaattaaaaattagttgggcatggtggcacacacctcagctactcgggaggctgaggtgggaggatcacctgagtccacaaggtcaagcacctgtgatagcgccactgcactccagcctgggtcacagtgtgagaccctgtctcaaaaaaaaaaaaaaaagaaagaaaaaagaaaaaagaatgagcaatgcaaacccaagctttttttttttctctctctgcttatatccccaacccctcaactcctgccccaggtcacaaactcaggaagcctcaattaagacagacttttagtctaagcttggagaattgaggaaggaaagaaggaagtgccagatgctaattaactttgctttttaactacagatgagccactttttgagttacccaggggtgagagtctcaaagataaatgaaaatatgtaaggatggcaggagagcatgggcctcttataattaggtccctcattcttgtgctttgagaataaaaatatcaagggtggaatatgtgagtaaatatggaaactcctttgaggatttttttggagccctcctgtttattctaatagaattaaaagcaaacatgtaactggtttttttgtttgtttgtttgtttttggttgttgtctttagttgcttttttttggttatacttaatttatttttttattttttgagatggagtctcgctctgttgcccaggctggagtgcagtggctcgatctgggctcactgaaacctccgcctcccaggttcaagcgaatctcgtgcctcagccttctgagtagctgggatcacaggcatgcaccaccacacctggctaattcttgtatttttagtagagatggggtttcaccatgttggccaggccagtctcgaactcctgacctcaggtgatccgccctcctcagcctcccaaagtgctgggattacaggcgtgagccactgcgcccagcagttataattaaaaattttttaaagagatgagtatctcactgtgttgtccaggctcgagtgcagtgactattgacaggtgctatcaatagcgcactgcagcctcaaactcaagcgatcctcctgcctcaaactcaagcgatcctcctgcctcagcctgtgagtagctgcaactacaggcgccctcagtcgtgcctggctttgcctctgatttttttctgactttagccttcctggtcttgtccccactcagcagtggtgtcttacctgaccacacctagaaatgctgaatgccaatttgagttagaaagagaatagcagaattccagccaggttggaggctaggatattggtgagcatttgggagaagctgagatttcatcacagcaaaagtgtgatgaaatcacacatcacaaagtgtcaggagagggagaagtgactgatgcagcaaatactcttccatcttctagggctccttgaagggaacaagggctccaatgagtgggagcagaggctcatttggtttcctgccttatgttttgggatttaacaagaggattggcccttttagtagcaagtagaggagcaggaatctaatttcttggctccatcatagctcaccgcagacttctgggccaagcaatccttctcccttggcctcctaagtagctaggactacaggcaaatgccaccatgccaggctaattttcttttttttttttttttagtagagacgaggtctcactgttttgcccaggttgttcttaaactcctggccttaaatgatcctcccacctcggcctcgcaaagtgctgagattacaggcgtgagccaccgtgcccgccttaatttactctgatttttcttttctttttaaaatagagacgggggtctcactgtgtggcccaggctggtcttgaactcctgggctcaagtgatcctcctgccctggcctcccaaagtgctgggactacaggcgtgagccactgtgccaggtctactctgatatttaacagtggtaaaattcatttatccactaaatgactttatttatactctcacttaatttcagaaaggactgaaggtacctgagctgtgaacaaagaatcagagactggtttttcctccatctctgccactaactagttgtgccacctggggcaagtcacttggtctccttgtgtctgttatccatgtgtgagagccaatacttaatatgagtgccaggcactgttctagagattttccatgcatctgtattcactcttttaattcttctctacacaatttattaaggtctctatctttttagagtttgtcagggcagttccagttcatcgtggcaatacaagaaagtcacttttgggggcttttgccatttcaaagaatcttggatttttctctgggctccagagacacccgtgcctgacacccccaatttgaacccccagcggatcattgggttccattgctgatggggaccttgtgtttgagcttgactttccctccatccatgctggagataaacggaagtcttcgcgcagggggacgattgcaggacggggccgctagggaggagggctcccacacgtggggaatgggggtggaggaaccgctgaagctcgtctgccctttggaaaatctcgttggtgtcctagccctgggatcattgtacttaccaggttggggggctctgcacccagaactcctcccagcctctgtctgcccgtccaaggtccggcgtgacttccggtggctgatttctcatcttggggaaatccccgccctgggggggtccggtgtggcctgcagggagcctgactcacccgtcggctgagtcagggggtcccagctgccctcggatgtctgctgcaccgctcccctccctcaggcgggggacggcaggaaggagggagagatgggagggnnnnnnnnnnnnnnnnnnnnccccggcccgggctccgccctctcccgggatctgtgaaagcacagccagggtgcgggcgggtgagtgcccacctggtgcagggtgtgaagagcgagagcgcgtgtatgagcacgagcgtctgtggtctctgtgtgtccgtttacatgattgcgcctgtgtctgtgtgtgcgcatctgcatgcgtgtctttttgagtgaatgtctgtgtgtgacttctagggacggccagggaagaggagtgtcccctcccaccctggccccccgtcttctcatcctggactccctctcttctctctcctccttggggggtgctctgggcatccgggacccctggcaaggctgccgggtgctgggaggacgcagaggccgccgagggcggagggaagcgtcaggcctggctgcgcgcgccctggctagggagctccgagtcccggccgcctggtcctttcattctgggcttcttcgagattctcgagggcttccagccggcagtgttttctccttgccgtcttctcaggcacgaggaaggctcctggagctcatctgcctgggatgggcggccctgccttgacctcacgtgcagcaattaggaccaccaaggagtgttcttcaaaccaccttctaccaccccgcgggacacgccagggctgattctggtgctcgcaccccgcttcctcctctgcgttcccctgtggcaaaggtttgtcttgggctgtggacccgaaagaatattctaaggggagatgggctcttgcagagcaagaggggtatggtttcagcaccaaactaaactggtgccagcgctagctctgcccaagaggctgtgcagacagtgtttgtgtgagtacgtgagggtgagagtccctgcccgcctagcttcggcttccccacttacaaccaagggagaacaacatctatcttacagtgtagatgcctggataaaaactggagcgcctggccgagcactttgggaggctgacgcggtaggatggcttgagcccaggagttcgagaccagcgtaggcaacatagttagacccccgcctctacaaaaaattttaaaaaattagctgagtgaggtggtgcgcacttgaggtctcagctacacgggaggctggggtgagaggatcgattgagccagagaggtagaggctacagtgagctatgatcgcaccactgcaccccagccagggcaacagagcaagaccctgtctcaaaaacaaaaacactggagcgcccagagttttttttaagtgcgggacaaggattgtctcggtgttgttactgcacgcacaccgcccgttgtaatggatagatgcattagtgaaagtgctaggtacactcatttattttctaaatctcacatataagggaacccccgatggaaaggcccatcagctagggaacagccagcaggctggatttgagcccagagcccgggctggccaattactcgagtgagtctggctccggctctgtgacctgggtccagtaccccgccctttctgcggatgccttgcaaagcggggagcggaaagcagtttggtggacgaccagccctcccttgctttgcaggtggcgctttctatttattgattgtaaggtgaaacctaggccagagccagcgtgcgcgcgccgtcggggtcccgcggctgctctggggctcagggtgcgaaccccaagggccccgcctggcagcgtcctgggcctccgggcgagaacagcgggggtcggggaggatttgcagcgtccactcctctctccgccgcccgtgtgagctcgggcgcttctcccggctgggggtgtgagaatttgccgacggtgcccgcgccgccgccggccccggccccgccccagccccgaggacgccccgcccccagccggcgccccgccccgcctgccagtagtcccagccccgccccgggccgcgccctccgccgagccccgacttgcctgcactcgcgcggcgggnnnnnnnnnnnnnnnnnnnnnnnnnnnnnnnnnnnnnnnnnnnnnnnnnnnnnnnnnnnnnnnnnnnnnnnnnnnnnnnnnnnnnnnnnnnnnnnnnnnnnnnnnnnnnnnnnnnnnnnnnnnnnnnnnnnnnnnnnnnnnnnnnnnnnnnnnnnnnnnnnnnnnnnnnnnnnnnnnnnnnnnnnnnnnnnnnnnnnnnnnnnnnnnnnnnnnnnnnnnnnnnnnnnnnnnnnnnnnnnnnnnnnnnnnnnnnnnnnnnnnnnnnnnnnnnnnnnnnnnnnnnnnnnnnnnnnnnnnnnnnnnnnnnnnnnnnnnnnnnnnnnnnnnnnnnnnnnnnnnnnnnnnnnnnnnnnnnnnnnnggggttgcgttcgcggtgggattctcagctatgggccgcgcgacgctctcctctcctaatctggttgcttccttttgtgccccccgggggtcaggaatcccaggtttctccgctgccgcccttgatgggatccgtgaggcctccagcgggcttcgcacgaggacgcgcctgttcggggcaggctgtttacttgtcggggacccagcagtggctgtgcgcgtcctcccctccccctgccccctattcgggacggagcctcctgcgctctgtccctcccgagctgtgcccttgagcccaagggggctagagggtggcagacccagatcctgaggtcctgcggcttcctccccgggggagcgccttctccctggccgccctcttgtggattttgtcctggctccttatttcctgacccgaattcctgaggatgaattctctccttctcttccttctcggctccctctgcttttggctttgtttttcctgttttgaaagggctttccttacgatcctgtctcatttccctgtgccagagctactataatttgtcgtggtaacgggtattggccagtcacttaattggtcagcaatggaagggatttcttccttagcctttggtgctgacctcctgtttctctggtggcagtgccttgcgaagtgcttgccactgtcccctggattttgagggaagggagcatccgagcccgcatgcctgggctcccgcagcagggtccccggagcatctttgcagggatagaggccgcagggaggactccagcttggtccttgggagatgtgttcctgcaacccatgccttttccagcgggttcctagggctctgctgtttgactcatggagaagccggtggttttggtgttgtgctaaatcgaagcccacctagtgggctctgggccgaaggctcccagctgtggaggtagctatgcccagggcctggggttgggagaaggggttgggtctttagactgggctggagctctagtgtcttttttccctctttggggttctgttatttcctggagcggctgaggtgggggaagaagcaccacagatgcaaggagtgggcggcccctcccctcacactcttcctttttatctccagcccaatagggcatgaattttcctttagacctgggccttgaaaacagatccacatggggaataaagatttcaagttcaccaacctgctttttgcatccatcgaatggaactcgaacccaggcttggctcagatcaattactttgctttcaaaaaaccaaacaaaaccaacaaacagctctaaaaacgatctgagtcatctgagtgcacattcctgctccaggcactggaaatgctcctgtggttggtttcagtaccaccaaagggagctgggggtggcattgacgcagatggcaagaaaggccgatcaagtggaatgtgattggtttgcaaaaaggagagacctagatgaagcagttgattttgagctaacgtcctgtaagagaatgcacaggtttctgaaattctctcttgttaaaatagttttctttctttctttctttcttttccccaacagataaggagtcaggccagggcgggatgacactcattgattctaaagcatctttaatctgccaggcggagggggctttgctggtctttcttggactattccagagaggtaggttgggggaacgggccaagtgtgtgggggaagggaaaggagatgttattttgtagataggttaagaatgtgaacaaacccatcctccccgactctccagccaaaggaagacttctctgtaggactagcacacccagaggaagagagtgacccaaattggtgctaggagcgaatgaatggggaagtgaactagacctcagccattcccaggagagagatgctgctgcctgggaaaagaaggaatggctttgctttgaggagtcctggagcccattactaagctgcagcatttggtatttgactcacactggccacggtagcgttggactcgcctgactggggagagaaatattaaaagttttctggaggaaatggattgaatttttataattcagtgttgcttctcaaggagtccctaggtggggccgttctgtgtnnnnnnnnnnnnnnnnnnnnnnnnnnnnnnnnnnnnnnnnnnnnnnnnnnnnnnnnnnnnnnnnnnnnnnnnnnnnnnnnnnnnnnnnnnnnnnnnnnnnnnnnnnnnnnnnnnnnnnnnnnnnnnntagctgggtctggcttgggagctccatgactgcgagacctgccggtccccttgcaagctctctgggtgcataacatattctgtgtgtacccagaattccactggagacgctactgtcatttcaggatggaaaggggcaggggttagagcgcggtggcgtccttaaaggctttttccccaacctcagcctcattttctctagatcttcattggtactttccaaacttgtttgatgattgcggatctctttttaaaaatcaaaatataggccgggtgccgtggctcatgcctgtaatcctagcactttgggaggccaaggtgggcgaatcacgaggtcaggagttcgagaccagcctggccaaccaacatggtgaaaccctgtctctactaaaaatacaaaaaattagctgggcgtagtggtgggcacctgtaatcccagctactcgagaggctgaggcaggagaatcacttgaacccaggaggcggaggttgcagtgagccgagatcacaccactgcactccagcctgggtgacagagtgagactccgtctcaaaaaaataaataaataaaataaatcaaaatataaagcagaattttaacctataaaccagatcaaaacagccactgtaagagaaactagcccagaactccttctgctcagcaccctgtcccactcccacctacctctgaaggcctggggtgcttctttggaaccccagcgctcccctgcacataagcaaaagccatagatcatgtagacccctgttggaggattagaatttcttccacacatctatttatactgacttgatctttgtctcagaaaatgccttttaataatatttttaatcctcatgcttttttatttataaaaataggaaattagtgtcaagtttggaaaataccaaaaacatacaagcatactcgtctatcatcttaccgccaccccaccccgcaccagagaaaaccactgtttcctcgttggagtatcctcccccaaacccctcagagagaattctgtctgtagcttttatttattatttatttatttacttaatttttttgagatggagtcttgctctgtcacccaggctggagtgcagtgatgcaatctcagctcactgccacctccgcctcccggggttcaagcgattcttctgcctcagcctcccaagtagctgggactacaggtgtgcgccaccatgcccagctaatttttgnnnnnnnnnnnnnnnnnnnngatccacctgcctcagcctcccaaagagctgggattacaggcgtcagcctccacgccctgacctgtgtctgcaccttttaaaacttgacttttatttattagtaagtattattatagactttgacataaacataccaatcgaacatatatgtatttctctgctctgtttcaaaatcccactaaaatgaaagtaaaggaataagaaaaaatgtaaattcttaaaaaaaaaaaactagaaaagtaaatggttgaggagggtggtatgaacaaaacctttgcaggacaggaaaccgataggcgagagggaagctgagtggagaatgtccaatgtcttgggccatgggggaggcaggtggaaaaggcaaaggaatgggggctctggggatggagtgcttcgaaaggtggtgtgtgcagggtgggctggaagcaggaagattacttgaaagagcatggtagggtgacagaccacccccccaggccacatagccagatggttcccttccccaccccagcaggtggcaggtttccggcaggcagtgttttcagagaggttggcccagcccagggcagcagaggcactgcatggagaacgaaagggtcaagcgagttagtttgccaagcagtgagaccatatcctgggtagctccccgaacaccgcagcttccatacagcctctgggcagacccttggaggacttctgtctgaccagactgatctcacgagaaaaataactgtcacatattgacattgagggggaccttgttgaaaagccagcttgttgctaggcacggtggctcccacctgtaatcccagtcctttgggaggccgaggcgggaggatcatcacttaaggccggagtttgagaccagcctggccaacatggcgaaaccccatctctactaaaaatacaaaaattatctgggtgtggtggcgcgtgcctgtaatcccagctacttaggaggctgaggtaggagaatcgcttgaacctgggaggtggaggttgcggtgagccaagatcacgccactgcacttcagcgtgagcgacagagtgagactccgtctcaaaaaataaaagtcagcttattgctttgtcatttcacactgaagcctaccgagcagctagccctacctgtgtacaagcagggttagtgcctttcccttagatttgaatgggcagccaagggccatcccacatggaatgagatttacaggctaaatgtggtggctcatgcctgtaatcccagcactttgggaggctgaggcaggaggatcgcttaagcccaggagttcgagaccatcctgggcaacgtagggaaatcctctctctacataaaataaaaaacaagccaggtattgtggcacatgcttgtgatcccagctacttgggaggctgaggtgggaggattgcttgagcctgagaggttgaggctgcagtgagccatgatcataccagtgcactccagcctgggtgacagagtgagaccctgtctcaaaaacaaaaaagagagagagagagagagtcagagagagacttctagtgtgaaagacagagacccaaatgaacagaaaaaaaaatttgagaagtcacaaacagggtcgtatggggaaaaaaaggcacattcataaaataataagctgttaggtattaagatagcagaagtaaaaatagaagaagtaaaaatttcaacagaagagttggaagagtgaaaaacaaatttccagaaagtagaacacaaagacttaaaagatggaaaataggaaagaaaatatagaaaaatttgacttcagtccaggagacccagcatgcaccacataggagctcaagaaaaaaaggcaagagaaacggaggaaggaaaagtatgtaggaaacaattctagaactgaaggcatttctacttttaaacagtctcgaagtagtacccaataccatgaataataaaaggcccacgctataggacatcatcatgaactttcaaactccagagatagagagaagttactaaatgtcatcagagaaaaaaaggccacatacagatcagagaatgagatggctttagacttttcaaaagcaacagtagaaactacaagacaggccaggcgcaatggctcacacctgtaatcccggcactttgggaggccgaggcgggcagatcactaggtcaggagttcaagaccagcctggccaacatggtgaaaccctgtctctactaaaaatacaaaaattagctgggcgtggtggcatgtgcctgtaatcccagctacttgggaggctgaggcaggagaatcgcttgaacccgggaggcggaggctgcagtgagccgagattgtgccactgcactctccagcctgggtgacagagcgagactcagtctcaaaaaaaaaaaaaagaaaagaaagaaagatactacaagaaaatggtcagtgcttttaaatttctgagaattaattaattctgagggaaattaattctgtaattgtcattcaaataaaaagtacattaaagacttttttttttttttgagataaggtgtttctctgttacccagattggagtgcagcagtgtgatcatggctcactgcagcctcgacctcctaggctcaagcaatcctcctgcctcagccccccgagtagctgggactacaggtgtacgccaccatgcccagctaatttttatcctttttgtagagatagggttttgccatgttgcccaggctggtctcaaatttctgggctcaagcaatccacccaccgtggcctcccaaagtgctaggattacaggtgtgagccatggcacttggcccacaaactcattttctaaggtaagaagttaaaatttgacagtggggtggctcgtgcctgtaatcccaacactttggagcccaaggcaggaggatcacttgagcccaggagttcaggaacagcctgggcaacatagtgagaccccatctctacaagaaataataataataaaatttaaaaatattaaaagaataaaattggctaggtatggtggcccacacctgtaatcctagcactttgggaagctgaagcaggagaattgcttgagcccaggagtttgaaagcagtctgggcaacatagtgagaccccatctctacaagaaataaaaagttagctggcgtggtagcatgtgcctgtagtcacagctactcgggaggctgaggcaggaggattgcctgagctagggaggttgaggatttcaccactgtactcagcctggatgagaccctgtcccaaaaaaaaaaaaagagagaagaaaaaaataagttgaaagttgaaaaccaagaaatattaccataaaactgttatttagaaatatcaaggtcaggcatggtggctcatgccttgtaatcacagcactttgggaagccaaggcaggaggatcgcctgagcccaggagtttgcatccagcctgggcaatgtactaagaccttgtctctacaaaaaatttgaaaattagccaagtgtggtggtgcatgcctgtagtcccagttactgaggaggcggagattgcagtgagctgtacttgtgacactgcactccagcctaggggacagagtaagatcctgtctcaaaaaaaaaaaaaaaaaaaaattgtaggctgagcacagtggctcatccctgtaatcctagcactttgggaggctaatgtggggggatcacttgagcccaggagttcaagactagcctgggcaacatagcaagaccctgtctctattttcataaaagattttttaaaaattttgcctgaggtataaaaacacacaaaaattttaaataaaaaatggaaatatagagataaatacttaagcaactgaaatttattgggtgtggtatatatgtggaagtggaggtcggaggactgctactttgtactgtaagagttttagttttaattaattttaaaaatcatggacttgtggccaggcacggtggctcatgcctgtaatcccaggactttgggaggccaacatggaaagattgcttgagccctggagtttgagaccagcctgggcaacatagtgagaacctatttcaagacaacaaaattgtatttcattattatttaaaaaaaaaaaaaagtttttttttaattagctgggtatgtggtgtgcacctgtagtcccagctactggggaggctgaggtgagaggatcacttgagctcaggagttcaaggctgcagtgagtcatgatcacgccattgcactgtagcacgggcaacaaagtgagaccctgtctctaaaacaaaaaaaaagtgctgagcgcggtggctcacacctgtaatcctggcactttgggagactgaggcgggtggagcacttgaagtcaggagttcaagatcagcctgagcaacatggcaaaactctgtctctattaaaaatgcaaaggagtatctgggtgtggtggcgtgcacctgtagtcccagctatttgggagctgtgatgagaggatggcttgagcctgggacgtggaggttgcagtgagccgagattgcaccactgcactccagcctgggaaacacagccagaccttgtctcaaaaaagaagaagaagaaaaaagaaagaaaaccacgtacttgtataactttcctagaaattaaaataataaagttattatgacatccatattcattcataacatttcattttttctatgctttttttttgagacggagtttcgctcttgttgcccaggctggtgtgcaatggcacgatctcggctcactgtaacctccgcctcccaggttcaagcaattctcctgcctcaccttcccaagtagctgggattataggcatgcgccaccacgcccaactaattttgtgtttttaatagagacggggtttcaccacgttggtcaggctggtctcgaactcccaacttcaggtgatccacctgcctcagcctcccaaagtgctgggattacaggcgtgagccaccatggctggcctttctatgctttctaaaatgctttatcaacaagcatatgtcacagtgataaatgtctgtgcacttaatgtgtggaatatttgcagtgttgtgtagtgtgcccaggtgtcattttgatgactgcattcagtttcattgagttaatgcatcatttagccatttccttatcactttcacaaacaataccacattgaatatctttgtgtatatagcttttttgacttttgaattgcttctttaggataattcccaaattcccaaagttaccaggtctgagaccatggatgtttctttctcttgattttgatgtgtagtatctgaggcctccacctgggtgcaggcctgtggcctccctggtgggccgtgacctaggatgatgatgagatggtggggatagcattttttttcagggtagttagcttttttctgatggcagcagtagaggtcagaaatctttgttgcggaggccaggtatggtggctcatgcttgtgatcccaacactttcagaggccgatgcaggaggattacttgagcccaggagtttgagaccagcctgggcaacatagggaggtcccgccccctacaaaataaataaataaataaacaaagctctgcacagtgatgcacagtgcagtgatttgtgtcatattcccagctacttgggaggctgaggcaggaggatctcttgagcttacgaggtcaaggctacagtgagctatgatgatgacactgtactccagccagggcgatagaatgagaccctctctgcgaaccgtgccaaaaaaagagtaggctgctgggatgagttcgggcatttcggggcatgtgagcccagcacttcccctcatcaacccagccctgccagctcttgctgtacatgtcctgcacacgtctcctcattgctttcctacttccattctggcctcgccccttccattttcccacagcagccaaagccatctttataaagcataaaatcaggccgcctcagtcctctgcttaaaaccctccagtgatttctccttgtaatgatactggactcctcaccatggctacggggccctgcagggtcagactcaccgtctctcccagtcaccctctcccagtcacgcccttgacttcaggcacctgcctcctgcctcagggcctttgtactttctttttttttttttgagatggagtttcactcttattgtccaggccgaagtgcaatggtgcaatcttggctcactgcaacctctgcctcccaggctcaaggattctcctgcctcagcctacttgggattataggtgtgtgccaccacgcctggctaatttttttgtattttttaaatagagacagggtttcaccgtgtgggccaggctggtcttgaactcttggcctcaagtgatttgcccgcctcggcctcccaaagtgctgggattacaggcgtgagccaccgcccccggcccaggcctttgcactttctgtccccactgcccggaaccctattttgtggatttttgctggatccttctctcacttgagcctcaacttcagaatgatctcacccgaggacccttccctgacccaccatccaaaggaaacgctgcctgcaagcccctttttattatattccagtgcttttactacctgaagcatcttgtttatctatttgttttctttttaactttgtatttaatttttaaatatttatttattgatttttgagacagagtctcactcttgcccaggctggaatgcagtggtgtgatctcggctcattgcagcctccccctcgcaggttcaagtgattctcgtggctcagcctcccaatagctgaggtcagatccctcagacgttcacagctgggacgccgttcttccaccttgggctccagaaagagcaccaaggagaacatttcaggacagactgtaagggtggcgtggtgtcctggccagaaccccatgtgcgggagggctccgctttgcacagctgtttctgtggatcatgctggccaggaggtgggaaggtgaaaggaattgtgttcttatcctgtttccttggatattttatgagtgacttagatgtggacacaactcatgcctcaggattctggatgagtaagtgaggagggattggtcaccgtccatcactgggtgacgcgaccccagctccccgctctgtgtctaggccgtctcacctgcccctccccggctccacatctgtctgtagcctgctgactccacagatctgtcccccgccctcccacctggggagtttgcccctggcggtctttacgtggctattcattaagcagctgagattcatttggtctaaaatggggctccggctgtcttatcccaccagaaatctcttcctttcctgtctcagtaaattcccaccaccactcccatctcccaagcccaaacctggctgtcatcctcacttcctcctgcaccgtcccccaaggtccctctgatttaagtatgtctggattccgttgctctccagtgctgtctccttctgggtcaagccactgtcattagtggcaccggcctccttcccctgccccctactccccttcctccctgcttctccgcagtccttccacaccgcagccagcagcatagttgtggatgaaaatcgcatccctcactccctcacctaaaatcctccagggctgtccatccgctcagcacaagccccaggtgccagcccttgttctgaaggctctgcaagacccagcccagttgaagtcttcaacttgctcatgccacaccctcccctccgtgcccaccaccccctgctccagctgtagtggcccgttctagaagacttgagtccctttcccacgagatcccctgcacctcgtgtaatttctggcacttaatcaggctccatagatactggtgggataaatgaatctacctcggactgaatgatggagacaaaacataaaatcaaagccgggcgcggtggctcacgcctgtaatcccagcactttgggaggccgaggcaggcagatcacctgaggtcaggggttcaggaccagcctggccaacatggcaaaaccctgtctctactaaaaatacaaaaaatcagccaggcacagtggcagacacctgtaattccacttacgaggctgaggcaggagaattgtttgaacctgggaggcggggattgcagtgagcggagattgtgccagtgcactccagcctgggcgacagagcaagactctgtctcaaaaaaaaaaaaaaaaaaaaatccaataagatatgagagccaattatgttcacaagatgaaactaccaaggataattgtgaattccttcatttagatcaggaaattcatgttcctgtacaggcagggagaacctggcttactgtgaaaaatccctggagggctggcagccaatgagttcatgatgtggccaccaaaaatctgcctggggtgagagtaggggagcatgaaatactctcaggctaagcaaatagnnnnnnnnnnnnnnnnnnnnnnnnnnnnnnnnnnnnnnnnnnnnnnnnnnnnnnnnnnnnnnnnnnnnnnnnnnnnnnnnnnnnnnnnnnnnnnnnnnnnnnnnnnnnnnnnnnnnnnnnnnnnnnnnnnnnnnnnnnnnnnnnnnnnnnnnnnnnnnnnnnnnnnnnnnnnnnnnnnnnnnnnnnnnnnnnnnnnnnnnnnnnnnnnnnnnnnnnnnnnnnnnnnnnnnnnnnnnnnnnnnnnnnnnnnnnnnnnnnnnnnnnnnnnnnnnnnnnnnnnnnnnnnnnnnnnnnnnnnnnnnnnnnnnnnnnnnnnnnnnnnnnnnnnnnnnnnnnnnnnnnnnnnnnnnnnnnnnnnnnnnnnnnnnnnnnnnnnnnnnnnnnnnnnnnnnnnnnnnnnnnnnnnnnnnnnnnnnnnnnnnnnnnnnnnnnnnnnnnnnnnnnnnnnnnnnnnnnnnnnnnnnnnnnnnnnnnnnnnnnactttccttttttttttttttttttttttttttgagcagagttttgctcttgctgcccaggctggagtgcagtggcgccatctcggcccactgcaaactccgcctcctgggttcaagcgattctcctgcctcagcctcccgagtagctgggattataggcatgtgccaccatgcccggctaacttttgtatttttagtagagacggggtttcaccatgttggtcaggctggtttcgaactcctgacttcaagtgatccacctgcctcagcctcccaaagtgctgggattacaggcatgagccaccgtgcccggtcagggaaagaactttctaaacactagaagcttctaaaaatggaagtgcagctgcagtaatgaaaatagatgtttttagctgtaagcggccaaaaactcagctcaaactgctgtaagttaaaaaagaaaaaaggctgatgagactgaagagtccagggatagactgtagcttcaggcatggctggatccagggaatcaaagttcgtcctcaggacccaggcttgtactgtctgctttagccccactttcctctgtgttggtctcttctcaagttctgcccctaaagacagcaaacagttgctagcagctctaggtagacagtctgtcgtttctgctaccccaagaagaagtcccagagaagcctagatgtcaaaacccactggactgacttgatagtcatatggccatcctggaatcctatagtcagggagataacgtgtagtgataggctgcgcctaagtctcattcccacctccaagccaatccccatggcctgggcaaactcaggcccctgattggctgtgtctgagtctcaggctatccagggagctaggggtgaagtcagcttatccgaaccacttggactgagtgtgttgagtttttgaaaagtccccagctcccagattaaaaaaaaaaccaacaaaaacgtaaagttactagcacccagaagcctcccatgcgcccttctagtcactcccccaaacctggggtaacccctatttcttttgccaccatagatttattaattctgcctgtgtttgtttctttgtacagttggaatcatgaacacatattttttttgtgggcagctgcttttgcccagctttatgtgtgtgagagtcatcgatactgttgtgtggacttgtagactgctcattctcattgctatataacattctgctcagaaagagtatcacacattattttgccattccccattctgttgatgtgcatttgggaagtttccactttggagccatcatgaatagtgatgccatagacactcttgcccgtgtcttttgataaatatacatgtatttgcatttctctggggtgtgtactttggagcggaattgctgggtcctagggcataggcatgttcaactttagtagatattgtcaaacagttttccaaagcagttgtactggtttgcgttcttggggcatttctgaagtccctgtactcactggcatctctgtcctgtacatatcagagagctatggttctgggcttcattcagggaagagttagggctggttggccactgtgctagagagaggttcttagcccagagagacggaaggcacttccactttctcctgtcctgtctcactggtgacaggacctggcatttgatgtcctgtgcagaccagtctgatactttctgtattaggaatgaggttttctgtgaaagtatttccctacatcccatttaggtaaggtgtagttgaagacttcatttccagagtgctaaggggcaggagagtgaggggtgtattttcctggaacccaggctgtgggttggagtccctgggagctcatgcctcatgtgctcatcttgggcctcaccagactgagtggccaaagatacccctgactttcaaagcccatggtcaaagcccatttcatgtcataagtggattctccaggattcctgactctctcccaagttgtttttttgttttgctttgttttgttttgttttgtttttgagacagggtctcactctattgcccaggctggagtgcagtggcacaatctcagctaactgcaacctccacttccctggctcaagcaatcctccagcctcagcctcccaagtagccgggactacaggcgtgagccaccatgaccggctaatttttgtattttgtgtagagacagggttttaccatgtttcgcaggctggtcaccaatgcctgagctcaaagtgatccactggcctcagcctcccaaagtgctgggattacaggcgtgagccaccacgcccagccggtcccccaagttttgaaacaaaaggaagactttggcttggccattctcagcaagaggaacccaaagtaggatgtggttttgcaattggaggaagtggcgaccagcagtggcagtgcctagagatgtgcagctctcgctcctcagggcagctggggtccagctgacggtgaggcctgggcccagccggcgctgccacccaatcaacacctgccttcaaccaaatatttcttttcaactgtttttacaagtctttaaaatccaagagaatgtgatctttaagtagagaagtctttgcttaaagaataaaaatcataaatcataaaggcaaagattgataatttgaccgcatcaacattaaaaacttctactcaccaggctgggcatgatggctcatgcttgtaatcccagcactttgggatactgaggccagtggatcacttgagcccaggagtttgggaccagtctctactaaaaacatatatttttttaaagtctctattaaaaataccaaaaaaaaaaaaaaaaaaggaaaaaaaaaagggtgtagtggcatacgcctgtagtcccagctacctgggagcctgaggttgggaggatcacctgagcctgggaggttgaggctgcagtgagctgtgattgcgccactgcactccagcctggatgacagagtgagaccctgtctcctaaaacaaaacaaaacagcaacaacaaaaaaccttctactcaccaaaaagacaccataagcaaagcaaaaagatgactcagattagaaaatatttcccgctcattcaaccaacaaaggaatggaatctagaatatataaagaaatcctacaaagcattaaaaaagattaagtaaccccacaggaaaatgggcaaagtttatagtaagtaggctatttgtagaaaataaaggttttatggaaaatcagggaaatgcaaattaaaacgagataatttcattcacatcaaattggcaaaaatgagtaaatttgacaataccaagtgttgaccaatatctggagattgatctccataccacagttctgagattgctgacgggcaccaccgtcttgaggacagtgtggtgatatttagtaaagttaatggtgtggttataccgatcgtaggttatgccacatgtgtctcttgagcacttgaaatgtggacagtgtgaggaatggaattttaaaacatttaatttaatttaaaattgctgttgattcatttattggaattgttttttttttttttttttttttnnnnnnnnnnnnnnnnnnnnnnnnnnnnnnnnnnnnnnnnnnnnnnnnnnnnnnnnnnnnnnnnnnnnnnnnnnnnnnnnnnnnnnnnnnnnnnnnnnnnnnnnnnnnnnnnnnnnnnnnnnnnnnnnnnnnnnnnnnnnnnnnnnnnnnnnnnnnnnntgccatgttgctcaggctggtctcaaactcaagcaatccacctgctttggcctcccaaagtgctgggattacaggcatgagccactgcgaccagccttaagtgtgtttagaacaaactgggtctggctaggagctcacacctgtaatgccagcacttagagaggccgaggtgggaggatcacttgagcccaggagttcgagaccaacctgggcaacatagcaagaccctgtacctcaaaaaaaaaaaaaaaagttagcagggcatggtggcacaagcctgtagtctcagccactcaggaggctgaggctggaggatcgcttgagcccaggagttggagggtgcagtgagctatgattgtgccactgtactccagcctgggcaacagagtaagaccctatctcaacagaaaaaaacaacaaaaacctgggtctgtgaacctacttttcacctgtagattggataaaatctacattcagatcaagtatttctgatgataatctagaaatgaaattgcagtacacactaaatgtaaaacacacaccagatttcaaagattcgataccaaaataaatgtcaaaatatctcattagtaattttctctattgattatgtgttaaaatgactatcttgtggctatattgggttaaataaaatacataatgaaacttcattttatctgtgccttttcactgtttttggctttttttgatttcttttttttttacttttttcttttttttttgagacatgattttgctgtattgccaagctggtgtgtagtgatccatcatagcatctcaaactcccaggctcaagtgatccttccacctcagcttccaagtagctgcgactacaggcacgctccaccatgcttggctaatttttaatttttttttttttttgtagagatgggctctcactatgttgcccaggctggtctctaactcctggcctcaagtgatcctcctaccttggcctcctaaagcactgggattacaggcatgagccaccatgagcccagccttttcacactttttaaagtggcttctggtaacctggacgttacctatgtggttcccgttgcctttctcttgggcaacactcagcactctccgatgagcacaaggggatggattcaagaacatacattgtagcatcattaaaagtaactaagaaaagtagaaaccagccttcatcttcatcaacaagagagagggtaaattgtggtttctttttttttttttttccttgagtgttacatttttcttttttttaatttaacttttattttaagttcaggggtacgttgcaggtttgttatataggtaaacttgtgtcgtgggggtttgtcatacagattatgtcgtcacccaggtattaagcctagtacccatgagttattcttcctcatcctctcccgactcccaccctccaccctcaggcccccgtgtgtgctgttcccctctgtgtgtccatgtgttcttatttagctcccacttataggtgagaacatatggtgtttggttttcttttcctacattagtttgctgaggataatggcctccagctccatccatgttcttgcaaaggacatgatctcttctaattgtggcttctttacacaatgaaatattgtgcaagagataaaacgaatgaactaaagccatgtgtgtattcgcctgggtaaattttttttttttataattttgtttttttttttgagatggagtctcagtctgtcgcccaggctagagtacagtggcgcgatctcggctcactgcaagctctgcctcctgggttcatgccattctcctgcctcagcctcccaagtagctgggactatgggtgcccgccaccacgcccagctaatttttttgtatttttagtagagaaggggtttcactgtgttagccaggatggtctcgatctcctgacctcgtgatccactcgcctcggcctcccaaagtgctgagattacaggcgtgagccaccgcgcctggtcccgcctgggtaaatctaaagaacagcacaatgagtgaccaaagcaggtcgcagaagactccgtgtgtacatacaggctttttgtttgtttgtttgtttgtttgtttgtttgagacagtctcactctgtcatcccaggctggagtgcagtggcgcaatctgctcactgcaacctctgcctcctgggttcaagcgattctcatgcctcagcctcccgagtagctggaattacaggcatgaatcaccacacccagctaatttttgtatttttagtggagacaggatttnnnnnnnnnnnnnnnnnnnnnnnnnnnnnnnnnnnnnnnnnnnnnnnnnnnnnnnnnnnnnnnnnnnnnnnnnnnnnnnnnnnnnnnnnnnnnnnnnnnnnnnnnnnnnnnnnnnnnnnnnnnnnnnnnnnnnnnnnnnnnnnnnnnnnnnnnnnnnnnnnnnnnnnnnnnnnnnnnnnnnnnnnnnnnnnnnnnnnnnnnnnnnnnaaaatacaaaaattagttggacgtggtggcaggcgcctgtaatcccagctactcgggaggctgaggcaggagaatcgcttgagcccaagagctgagattgcaccactgcactccagccttgggctacagagtaagactctgtttcaaaaaaataaaacaaaacaaaaaacatgtatggaaatgataaacaaccagactccaggtactgctaacctgtagtggagtaggctagaggcggggaagggagaaggggacctggaagagggggaacaccaggtcctttgtgtttgtaacattttgttactaggggtgggtatgactggagggtttggtatgattcaaattttttcttttttttttgagacggagtttcgctcttgttacccaggctggagtgcagtggtgcgatctcggctcactgcaacctccaactcctgggttcaagcgattctcctgtgtcagcctcctgggtagctgggattacaggcatgtgccaccatgcccggctaatttttatatttttagtagagacagggtttcatctagctcagttcatcatattggtcaggctggtcttgaactcctaacctcaggtgatctgcctgcctgggcctcccaaagtgctgggattacagatgtgagccactgcacccggcctgactggaatattttaacaaattattggatgaccaaagccatttttaagccttttggtttctagtcagaaagtttcagagaggctggatatggtggctcatgtctgtaatcccagcactttgggaggccagagtgagaagatcccttgaacccaggaggtcaagaccagcctgggcaatatagtgagactgtctctacaaaaaattaaaaaattagccaggtgtagtggtgtgcacctgtaggcccagctacttgggagggtgagatgggaacatcgcttgaacctaggaatttgtgttacagtgagctatgatggcaccactgtactccagctggggcaacagagtgagaccctgtttcaaaaaaaaaaatctatttcacagctgggtatggtggctcatgcctgtgatcccagaactttgggaggccgaggtgggcggatcacttgaagttaggagttcaagaccagtctggccaacatggtgaaaccctctctctacaaaagtacaaaaattagccagatgtggtaacgcatgcctgtaattccagctatttgggaggctgaggcaggagaatctcttgaacccaagaggcggagattgcagtgagccgaggtggtgccactgcactccagcctgggtgacagagcaagactccggctcaaaaaaaaaaaaagaatgtatttcaaagaactgcagccttcggcctctcaggtctcagggcacctgaccagctgtcctgccatctcccttctgtgccagctggtggccatgactggctttcgtggatgtgtatgttcctgaggaaagatgatttgctgtgcgtgctcctgtggggaggacatgcagtgtctgcctgggagaagaggcagctgaggccgtggcccggagtagtaggagccacaagccaccctgggcaggacgaggccctgagggaggtgagctttttgtacccgcaggtcgggaactcactcctgagcttcctgctgtccaaggaccccactgttttccagggagtcccttccaaaggtctcacccagctcagctgaggtaactcattttgccatttcttcatttttaggacaactgtcatctgggaagtaacaacgcaggatgccccctggggtggactgccccatggaattctggaccaaggaggagaatcagagcgttgtggttgacttcctgctgcccacaggggtctacctgaacttccctgtgtcccgcaatgccaacctcagcaccatcaagcaggtatggcctccatccggtcctcagaccttggtgctcagagagagagagagagagagagacacagatagacagacagacagacagacagatggacaggtggacagacggacagacagatggacagatgcactgcttttcagacttgggatcctcagatgagaattttaaaagataaataatggtttgtttgtttgtttgtttgttttgagacggagtttcgctcttattgcccaggctggtgtgcaatggcgcaatctcggctcactgcaacctccaactcccgggttcaagagattcttccgcctcagcctcctgagtagctgggattacaggcatgcaccatcacgcccgactaattttgtatttttagtagagacggggtttctccatgttggtcaggctggtctcaaactcccgacctcaggtgatccacctgcctcggcctcccaaagtgctgagattccaggcgtgagccactgcatccagccgataatggtttttttggtttttgttttttgagacaatctcgctctgtcacctaggctggagtgcagtggcatgatctcaggtgactacaacctctgcctcccaggctcaagcagttctcgtgcctcagcctcctgagtagctgggactataggcgtgcaccaccacacctggctaatttttgtgttttttagtagagatggggttatgccatgttggcctggctggtcttgaactcctgagctcaagtgatccacccgcttcggcctcttaaagtgttggaattacaggtgtgagtcaccgcgcccgacccaaaagataaatcacgtccatgagttgttgaaagacttgtggttgcgtccaattattccaatttcagctttccccatttcacagtgtatgtttccctctactcagttatccaattattcatgactagatgagattaggggctgcctcccacggtgggctttcatcctattcatgactgtgtcatcatttttttttttgagatggggtctcactctgttgcccagcctggagtgcagtagtgcgatcacagctcactgcagcctcaatctccccaggcttaggtgagcctcttacctcagcctcctgagtagctgggactacaggcacgtgccatcaagcccaactaatttttcgtgtctgtattttttgtggagatggggtttcaccatgttgcccaggctagaatgtgcctttcatttttgaaaccacactccatccatggctgcctaagtggtttacaggtcttttgtctttaaagctgttgccatagtaaacaacatctctttttctttttttttttgagatggagtcccgctctgtcgcccaggctggagtgcagtggcgccatctcggctcgctgcaagctccacctcccaggttcacaccattctcctgcctcagcctcccgagtagctgggactacaggcgcccaccaccacgcccggctaattttttgtaaacagcatctttggaaagagattttggtttgttgaataatattcaggatggactactgagtcaaaggattaaatatgtagacaatatttggtggatattgtcttgtgaccttctaaagggcttgtgccccttactaagcatgggacttgagggatcatgccttgggctgtgggagggcaggaccttatcccagaattttattttatttttatttatttttattttttgagacagggttcactctgttgcccaagctggagtgcagtggtgtgatcttggctcactgcaacctccgcctcccaggttcaagcaattctcctgcctcatcttcccaagtagctgggactacaggcacgtgccaccacgcccggctaatttttgtatttttagtagagacggggtttcaccatgttggccaggctggtctcgaactcctgacctcaagtgatctgcccaccttggcctcccttagtgctgggattacagccgtgagccatggcacccggcccttatcccagaattttaaaagctataattgggagcagggaaaaaatacgaaagaagtaatggatcatctttgagagttttttcttcttctcttcctggaagatgtctttaaannnnnnnnnnnnnnnnnnnnnnnnnnnnnnnnnnnnnnnnctgaggcaggagaattgcttgagcccaggagttcgagaccagcctgggtaacatgacaaaaccctgtctctacagaaaatgaaaaataaaaaaattagccagggccaagcatggtggctcacgtctcttatcagcactttgggaggcggaagcgggtaggtcacctgaggtcaggagtttgagaccagcctggccaacaaggtgaatccccatctctactgaaaatacaaaaaattagccaggtgtggtggtagatgcctgtaatcccagctactcgggaggctgaggccgaagaattgcttgaacctgggaggtggaggttgcagtgaactgagatgtgggccattgcattccagcctgggcgacaagagcgaaactctgtctcaaaaaaaaatcagcctgtgtggtggcatgtgcctgtgatcctagctactcaggaagctgaggcaggaggatcacttgagcctgggagtttgaggctgcagtgagccatgatttgccactgcactccagcctgggtgacagagtgaaaccccgtctgtaaaataaacaagcaaacaaacagacaaaaacaaacacaaaaaataaatgtaggaaaagtagaaaaaggaaaaaaattacctctgatccagccatatgagaaaaccacagtgaatactttggctattgcctgttttctcctctatgtacagtgttttttttgtaataattctgattatgacctttcatatctttttttctgagttaacggtataacattttattcatgttattaactttatatagataccattgtattttattttgcttgagaatggtctcactttgttgcacaggctggaatgcagtggcataatcctagctctctgcagccttgacatcctgggcccaagcgatcttcccatcttagcctactgagtagctgggactacaggcatgcaccaccatgcctggctaattttattttttattattattattattatttttgtaacggtggaccttgccatgttgcccaagctatagatagcattttagttttttatttttatactttttttttttttttttgagacagggtcttgctctgtcatccaggctgtagtgcagtggcatgatcacagctcatggcagcctcaacctcctgggctcaaatgattcccccatctcagcctcctgagtagctgggactacaggtgcatgccaccataaccaactaattttttattttttgtagagatggagtcttattatgttgcccaggctggccgtgaactcctgtgctcaagtgatcctcccacctcagcctcccaaagtattgggattacaggagtaagccaccgcacctgacctagatgtcattttaaatcagtcttatttttccatttacagagctgtgcatgtgggttattaaaattcaaacagtgcagaggcaaagcatacacatctcgatttggtcccaattcttcatatttgtatttatcccaggggccagatagtaaatattttagcagttgctggctggctctgttatctgttgcgatgattcagtcccgccaccataggacaggagcagccctgagtgatatgtaaatgaagaggcgtggctttttggggttaaccaggtggcaggtggatttagccaggaaaagggtggtttgctcacccctggtctatgttaattgatatgtttattaggggtttttttgtttgttttttaatggaaatgggcttgacccacacctgctgctctgtatcttggggttttcccctcacttaatgacacaccttggacccctccaggccgggcacatagagctgcttgacagtccctagactgtcacagcttggcgccatcccactgcttgacagaccatagttagccgttgccctttgtagcaacactgggaactttcctcctttcccgtcttctttgtgactcagtggtgaacacctttcaactgcttgttgctgtgggagggctggaggcccgtcaccccagggcacacactccatggagaattctctttgggcccccttgctgtgttaaatatttctgagttcgttgccaacatttaaaaatcagggttgccaggcgcagtggctcacacctgtaatcccagcactttgggaggccgaggtgggtggatcacctgaggtcaggagtttgagaccagcttggccaatgtagcgaaaccccatctctactaaaaaaaaatacaaaaaatttagccaggcatggtggtgcatgcctataatcccagctactcgggaggctgaggcaagagaatcacttgaacctgggaagcagaggttgcagtgagccaggattgcgccactgcactccaacctgggcgacagagtgggactccatctcaaaaataaaataaataggtgaagaactccaggacagttagctgggctgcatgaaggtcatggccccccgtctctggagtgacctagggtggtcctgcactctgggaggggagcctgtaggacgtggtgccagccccagatcccagcacctcccaggtgcccccacagaagggcatcagtggagaagcctgtccacccatggtcagcacccagggggctgcagagagtgcagatcttggggtctgcctctgccctctgggaggtttggacccccaggctggaggccagctctccaccctccctcagcctcccacctcccagtggctgccttgggtggaggggctgaccggtgactgtccctccagctgctgtggcaccgcgcccagtatgagccgctcttccacatgctcagtggccccgaggcctatgtgttcacctgcatcaaccagacagcggagcagcaagagctggaggacgagcaacggcgtctgtgtgacgtgcagcccttcctgcccgtcctgcgcctggtggcccgtgagggcgaccgcgtgaagaagctcatcaactcacagatcagcctcctcatcggcaaaggtagctctgccgagtgggccgtgtggccgggctggccctgcctgccccacccgctgacccagccctccccaccccgcaggcctccacgagtttgactccttgtgcgacccagaagtgaacgactttcgcgccaagatgtgccaattctgcgaggaggcggccgcccgccggcagcagctgggctgggaggcctggctgcagtacagtttccccctgcagctggagccctcggctcaaacctgggggcctggtaccctgcggctcccgaaccgggcccttctggtcaacgttaagtttgagggcagcgaggtgagcccatgcgtggcctgcggcatccaggctgctctgtccatggggagcacttcctctgtgaaactcctcagtcatccgcaagcccccctcccccagtggcatcagatggtgtttgccaggtgtctgtgcatgtgtggggctcaactgaacgtccccccaggcaagctcaacgtggcaggataaccaagtggcgtggggcattgggcatcagtttgttcattctttgaacaaatatttcccagtgtcatttgtgaactccccagaccctacccttgggggcaaataggcaaccctgccctgtgccccagaaccccggggggcctcgagggcagaggactgacctccctcctccccacaggagagcttcaccttccaggtgtccaccaaggacgtgccgctggcgctgatggcctgtgccctgcggaagaaggccacagtgttccggcagccgctggtggagcagccggaagactacacgctgcaggtgaacggcaggcatgagtacctgtatggcagctacccgctctgccagttccaggtgaggccgctgaggccctctgcactctgggctcccaacgccctggatagggcctgggtgggagtcggggagctgacatttgggcgcaccttgagcctgccgagccaggcctttgggtcaccgccagagcatcccctggtagggctggccctctctgagagcacaaggaggggctccgtcttgggaggtggaggtggggcaggaaaaaccagcaggaagccctcccctctcccaaggcctaggacaggcagtgggcagcttggggggtcctgggaatcctggtgtccagggagtggttggggccgccccaccagccgctcaccctgcaccccgtctcagtacatctgcagctgcctgcacagtgggttgacccctcacctgaccatggtccattcctcctccatcctcgccatgcgggatgagcagagcaaccctgccccccaggtccagaaaccgcgtgccaaaccacctcccattcctgcgaagaaggtgagatggcgccttccgcctcccctctgagccaccccttctttccacctggcgtccaactccatgtgctactggccatgggtccaggggcccttggtatggagagctggggctttgagctggggaagccaacacagctgaccagcgtcctgggctgggggcctgtgggactgccgtgggtggggggcagccccatgcctggctcaccggctgcccttcccctctgcagagctcaggggtgttggggccccctggggagcccgcatggcaggttttctgggaaaggagatagcattgtggacaggcccaaacctggccgcaaacctgtgaccctctcacccgcccccaagtggtcacgggcctcaccataggccagggagacaagctgcactttgagccgtgttaacagccctgcttccccggcccccagccttcctctgtgtccctgtggtccctggagcagccgttccgcatcgagctcatccagggcagcaaagtgaacgccgacgagcggatgaaggtggggctcctgggataggtgggagagacactgtttttttgcacaaacaaggtggctgtatcctggaggggtagcagaggaaggagggggatcacatgaaagccacctgaccacattacccagcatccctgcctggggcgctgtgagcggcttgaaaacaggaagtggggagggggtgggccagccggccctggaggctgattcgtagaaacttgggccaagcagcgttctgggtatttgactttggtggaggttatggggccaggttcagcccagggatccgggaccgcagagctgggggaagggccgggcatggaagaggggctgggtccagctgggctgggggctgtggtgctccctggaggcaccagggcggtgcctgcagcctgtgagggctgcacctgcctcaacctctaggggctgagcccacctccctgttgtctcttaacactttcacacgctccatcgcaacagcctgcagtcatgggctttattgtcctgtttgctggacatgatacctgagtcctcagaggttggccctcctgcctggagtgtgtttcactggggaaatcgtataagcagggcaggtctgggttccactggcaggaatcgagggggactggatcagagggacttccagggtggtggtgtcaggtggaattggaaggggccggacatcaggtggcaggaaaagtccttccccacccacatgggctcataggaatctgagaagtccagggagccctaggatgttagagcaagggtccctgaagttcttgatccctgatggggaaactgaggcctggagtggggaatggacatgccccgaggtccccagagttggggtagctgagacagggcacccatgcacagcccgtggtaccctccctcaccccagggccgctcatgccctcaggccttccctgtgctgcaccaccttccttcgtgtgggaagtagagttcagacccacctgaggacattcaagggggagactgacaccttaagggggaggggagaggggctgggcctctgcctcctcacccatcatcccggcaccttctacagctggtggtgcaggccgggcttttccacggcaacgagatgctgtgcaagacggtgtccagctcggaggtgagcgtgtgctcggagcccgtgtggaagcagcggctggagttcgacatcaacatctgcgacctgccccgcatggcccgtctctgctttgcgctgtacgccgtgatcgagaaagccaagaaggctcgctccaccaagaagaagtccaagaaggcggtgggtcccagggccggctgggaggggtgcagaccccggagagccagtacagccccttgctgggccactcaccactctcctcccggcaagcacgcagcctggggatgggggtcctgggattgcttgtggaccccagcctcctcacccaccctagtctggccaccagccctgctcgagggacactctgggctcctgggctcctgtgcatgcggcctcagaatatctggcctgggctgtggtcctgcaggaacctgcaggtagtgccctgggatggaaggacaagcacagtgtcatccctggagcagaaaagcctgagtcagcggctggccgggaggcgtagtggctgggtgctgagtcacggtcccaggatatggctcccctcggagctgactcactccgagctgagctgggctggcctctggggctgggctgtctgtttggggatttctcaagaagccaggagggccaggcgtggtggctcatgcctgtaatcccagcactttgggaggccaaggtggtcggcttacaaggtcaggagtttgagaccagcctggccaatatggtgaaaccctgtctctactgaaaatacaaaaaaattagccgggcgtggaggcacatgcctgtaatctcagctacttgggaggctgaggcaggataattgcttgaaccaaggaggcagaggttgcaatgagccgagatcgtgccactgcactccagcctgggtgacagagcaagactccgtctcaaaaaaaaaaaaaagcctgagtaggggtgaggtgggaacaggagggtgcagcaggtgtcagctggcttcaccactggagccctcagaggaaagaggaaaaagcggctcctctccttccccaagcagggtctcccaggggtctggttgggagatgttagctgggctctgggtcttctcgggtggggtgcctgggggagggcagggaagctgggtctggaggcccctgagtggctgtcctcacctgccctgtccttctgcaggactgccccattgcctgggccaacctcatgctgtttgactacaaggaccagcttaagaccggggaacgctgcctctacatgtggccctccgtcccaggtcggcccaggcccaggagggagaggcgttgggagtgtgagggtcccagagatgctggtcacccctctacaacttcatctgcccctgtgttcagatgagaagggcgagctgctgaaccccacgggcactgtgcgcagtaaccccaacacggatagcgccgctgccctgctcatctgcctgcccgaggtggccccgcaccccgtgtactaccccgccctggagaaggtcagtgggggccccgccgcgtgaggctgaggggctggcgcggagctctcctggccctgctcctggagctcttcagagggtgctccctggccacgtcggggctgggctaccaggcatatctggggccttcccaggggccattttgcctgcagggatgctgcgcagtctgatgacattttcggttgtcacagctgccaggagggatgctcttggcatctcgtgagtggaggccagagctgctgtggatgcgcctccatgcagaggacagcgccccctcaaggatgattggggtggcaatgcccggcctgggggtcctgcccgggctggtccaggcccctggggacgctgagtgcagccgtttgttgcagatcttggagctggggcgacacagcgagtgtgtgcatgtcaccgaggaggaggtgagtggggtgggggtgtggggtggggggcatggagccggcgtggaaccagagccctcactcctgcccacacccctcagcagctgcagctgcgggaaatacctggagcggcgggggtgctggggagctgtatgagcacgagaaggacctggtgtggaagctgcggcatgaagtccaggagcacttcccggaggcgctagcccggctgctgctggtcaccaagtggaacaagtcatgaggatgtggcccagnnnnnnnnnnnnnnnnnnnnnnnnnnnnnnnnnnnnnnnnnnnnnnnnnnnnnnnnnnnnnnnnnnnnnnnnnnnnnnnnnnnnnnnnnnnnnnnnnnnnnnnnnnnnnnnnnnnnnnnnnnnnnnnnnnnnnnnnnnnnnnnnnnnnnnnnnnnnnnnnnnnnnnnnnnnnnnnnnnnnnnnnnnnnnnnnnnnnnnnnnnnnnnnnnnnnnnnnnnnnnnnnnnnnnnnnnnnnnnnnnnnnnnnnnnnnnnnnnnnnnnnnnnnnnnnnnnnnnnnnnnnnnnnnnnnnnnnnnnnnnnnnntggcccaggtgggtggggaggcgcacctgggggcggagctgggggcagcaccacagcctctggctacccaccaccctgtaccccggccaacccccaccctcaccctggccaaccttcaccctgaccctggccacccaccaccctgaccctggctggccatcacccttaccctgaccacctccaccctgaccccggccgcccccaagcctgacctcggctccccccagatgctctacctgctgtgctcctggccggagctgcccgtcctgagcgccctggagctgctagacttcagcttccccgattgccacgtaggctccttcgccatcaagtcgctgcggaaactgacgtgagtcccagctgggcgctccccacttctccagagggcagctgtgtcctggctgccaggacgtgggctctgggtggggcctgaaccttcccgtgggcttgctccgtcctgcctggcctccctctggctgccgagggagctccctcctgtcctgagtcggggagctccaggccccagcgccttccttccctgcagggacgatgagctgttccagtacctgctgcagctggtgcaggtgctcaagtacgagtcctacctggactgcgagctgaccaaattcctgctggaccgggccctggccaaccgcaagatcggccacttccttttctggcacctccggtagcgggacttgccccagccgttctgtgggaatcccagcccctgagtctccctggaaggccactggggacgtttccagcaggcctgggtgtcctggcctcgctaggtcctgctgggcgggaggggctgcgtggtgctgcctggtgaggctcagccctcccttcaccttccagctccgagatgcacgtgccgtcggtggccctgcgcttcggcctcatcctggaggcctactgcaggggcagcacccaccacatgaaggtgctgatgaagcaggtgaggcccaaggccctggggggcgggcagggggcggccctgagcgtctgggaatccccagggctgggtcgaggctgggacctgcccaccgccgccctcccatctgcccaccagggggaagcactgagcaaactgaaggccctgaatgacttcgtcaagctgagctctcagaagacccccaagccccagaccaaggagctgatgcacttgtgcatgcggcaggaggcctacctagaggccctctcccacctgcagtccccactcgaccccagcaccctgctggctgaagtctggtgagcccaagccccgccacaagggttcctcccacccctgggaggccggtagaggagcccctgctgactgcccgctctctggcctggcagcgtggagcagtgcaccttcatggactccaagatgaagcccctgtggatcatgtacagcaacgaggaggcaggcagcggcggcagcgtgggcatcatctttaagaacggggatggtgagggcctggcctccccacaccccgcctgtactgccctggggggtcctggggtgctcctagagtgggggtggagaagacagaatcctgggacttaagggcttgggtgtagctggaagcagagaacctaccagaaactcatgcttctcctcccaccggccggtggcacagacctccggcaggacatgctgaccctgcagatgatccagctcatggacgtcctgtggaagcaggaggggctggacctgaggtgaggacccccaccccacatcgtcccttggtgtctgtgcccagcctgggagtctgtgcccctggaggggtccttgttgaaggtggcatgaccatctcagccggggaaagggctttcctaggaagacccggaggcggtttaactctaggccaggaggcggcgggcagcaggatgcgtgaaggctgctcctgaggcttagtgtgtaccctgctctgttgctttagttgcccaggtgcccctggcttccccagcccatcttgggaagcagtggcgtcttctcccaaggcctctgtctggttctcttccaagcaaatgtgaactcagctgtggtgctttctgcacctcagatgctggtgccggcatctccaaggagccagcatctctcacctgctttttagcaatgtgggcagcagcatcttctgtggctttttggggcaccatgagtttctggggctcaagtggcctcagggacagcccttgaccatgccatttgcccgtccctcttcccccttgcctaggatgaccccctatggctgcctccccaccggggaccgcacaggcctcattgaggtggtactccgttcagacaccatcgccaacatccaactcaacaagagcaacatggcagccacagccgccttcaacaaggatgccctgctcaactggctgaagtccaagaacccggggtgggtttcaggcccagggataggttccctctcctttccaagaggtgtggagtgggagggcctcgcctgtcagaacaaaggagcggggaggggcctcagaccatctttgtggctacttggctcagttgaggaccagcctgtgtctgggttggggtgaggtaggtctctcttccccaagtatcagtgtctcttgctatgcaacaccatccaaagcgcagggctttaaaaaacagccatttacgattggctcacagatctgcagctggggctgggctcagccgggtggcttttctgctggttccacataatcactcatgcagctgttctcatctggtgccttaactgggccagtggggtctgagataacccatctcattcctggggccttggcgccagctgtctgtgatgcctctctgcatgtggtctcctcatttagcagcctcaccttccttccgtggctctgtattgagggtatggggttcaagatctgcaggggtcttcatgccttggctctggaatagcgtctgcaagcgatgtccagcattgtgtcctccatgttctgttggtcaaagcaagtcacagggccagattcaaggggagagggagtaataacccacctcttgataggcggagctgcaaaatggtatggccatgctttttaatcttccccacccagggaggccctggatcgagccattgaggagttcaccctctcctgtgctggctattgtgtggccacatatgtgctgggcattggcgatcggcacagcgacaacatcatgatccgagagagtgggcaggtacaggggctggtgctggcggctgctgtggggacttggcttctggccccagcctgctggcccctctgcctagcacacagctctgtggcaggggtcccccagccctgctggcttcctgtctcccctggattctctcctgtctgacaccttctcaatcctccccctcctctcccctcccctcagctgttccacattgattttggccactttctggggaatttcaagaccaagtttggaatcaaccgcgagcgtgtcccattcatcctcacctacgactttgtccatgtgattcagcaggggaagactaataatagtgagaaatttgaacggtgagagtgcctgagccccaccagatgcccctcggtgtggggccccagggaacagggcagaggttcccaggcagggtgcaggatggggctcaggtctcaaccccacacctggcccctcaccccaactgttgatgggtttggaacatgcccctgctccaccctgcagtgccccttttgggcaatgtgggcaggtttgtgggtcatgtagcaggaggctggctggggcacgggggtcagttagcagaactggaggccttgtgtccacccattatcagggcaagggcaggtgtccttggggaaggggctggttggatgcagagcggccctctggcctgtggctgggagttcccagagcctcacttcctctgtcccctacctgcaggttccggggctactgtgaaagggcctacaccatcctgcggcgccacgggcttctcttcctccacctctttgccctgatgcgggcggcaggcctgcctgagctcagctgctccaaagacatccagtatctcaaggtatgtgccgggcaggagactgctgtcgccagtggacttccaaggcctgcccccgagcaatgtgacctaggagggccctgaatgcagtaggccccaaagggcactgagctgtgtgtgcctcatgccgtcccaggacccagcagtggagctggtgggcggtggaggggaaagtggctggaccagagttgagccgcccaggcatggttccactcagtggcagatgtgtagtgacctctcctggttggggtgctgtgctcagggctgcggggctttcaggtgtccactagggggccgcgtgagcgctggctccctctgccttctaaaagatattttttggccaggctgggtggctcacgcctgtaatctcagcactttgggaggccgaggtgggcggatcacctgaggtcgggagttcaacaccagcctgaccaacatggagaaaccccgtctctactaaaaatacaaaattagctgggcatggtggtgcattcctgtaatcccagctactttcgggaggctgaggcaggagaatcgtttgaacccaggaggcggaggttgcagtgagccgagattgtgccattgcactccagcctgggcagcaggagcaaaactcggtctcaaaaaaaataaaaataaataataaaaaaagatatttttccaggccgggtgcggtggctcacgcctgtaatcccagcactttggggggctgaggtgggcagatcacgaggtcaggagttcgagatcagcctgaccaacatggtgaaaccctgtctctactaaaaatacaaaaattagtcaggtgtggtggcacgcacctgtaatcccagctactcaggagactcaggcagaagaatcacttgaacctgggaggcagaagttgcagtgagccgagatcatgccactgcactctagcctgggcaacaaaggcaaaactccgtctcaaaaaataataataaaataaaaataaacataaataaaagatatttttccaggctgggcatggtggctcatgcctccgtaatcccagcactttgggaggctgaggcaggtggatcacctgaggtcaggagtttgagaccagcctggccaacatggtgaaaccacatctctacttaaaatacaaaaaatcagccaggcatggtggcacatgcctgtaatcccagctactcatgaggctgaggcagaagaatcacttgaacacgagagactgaggctgcagtaagcctagatcgcgccactgcactccagctcgggtgacagagcaagactctgtctcaaaaagaaaaaattggccgggcacgatggctcaggcctgtaaacccagcactttgggaggccaaggcgggtgaatcatgaggtcaggagatcgagaccatcctggctaacacggtgaaaccccgtctctactaaaaaatacaaaaaattagccaggtgtggtggcggctgcctgtagtcccagctacttgggaggctgaggcagaagaatcacttgaacctgggaggcggaggttgcagtgagccgagatcatgcccctgcactccagcctgggcgacagagtgagactgtctcaaaaaaatgtatatatacagatacatatgtattttttttccttcttgtgtcctctccatgtgagaaggtgggatggggcggtgaggctgctggggccacacatgcttgccaggaccttccctctggtgaccagtccctgcaaaagcagctgctcccatgctcctcccagagccatttctccagtaggggaggcgaggtcacttgggaactgggggctctggggccaagatgtctttggcaccttcatttgagggtgggagcggaatagagagcttttcctgagatgctgggagctctctactaaccatttcattcagtgactctgaagtccccagagagggacgcatcccagagcaaggtccgggcccccttaacgtggacaccgctgtgatttgtttgcaggactccctggcactggggaaaacagaggaggaggcactgaagcacttccgagtgaagtttaacgaagccctccgtgagagctggaaaaccaaagtgaactggctggcccacaacgtgtccaaagacaacaggcagtagtggctcctcccagccctgggcccaagaggaggcggctgcgggtcgtggggaccaagcacattggtcctaaaggggctgaagagcctgaactgcacctaacgggaaagaaccgacatggctgccttttgtttacactggttatttatttatgacttgaaatagtttaaggagctaaacagccataaacggaaacgcctccttcatgcagcggcggtgctgggccccccgaggctgcacctggctctcggctgaggattgtcaccccaagtcttccagctggtggatctgggcccagcaaagactgttctcctcccgagggaaccttcttcccaggcctcccgccagactgcctgggtcctggcgcctggcggtcacctggtgcctactgtccgacaggatgcctcgatcctcgtgcgacccaccctgtgtatcctccctagactgagttctggcagctccccgaggcagccggggtaccctctagattcagggatgcttgctctccacttttcaagtgggtcttgggtacgagaattccctcatctttctctactgtaaagtgattttgtttgcaggtaagaaaataatagatgactcaccacacctctacggctggggagatcaggcccagccccataaaggagaatctacgctggtcctcaggacgtgttaaagagatctgggcctcatgtagctcaccccggtcacgcatgaaggcaaaagcaggtcagaagctaatactctgccattatctcaaaaatcttttttttttttttgagatggggtcttcctctgttgcccaggctggagtgcagtggtgcaatcttggctcactgtaacctccgcctcccaggttcaagtgattcttctgcctcagcctcctgagtagctgggattacaggtgtgcaccaccgtacccagctaatttttgtattttagtagagacgggggtttcaccatgttggctgggctggtctcgaactcctgacctcaggtgatccacccgcctgagcctcccaaagtgctgggattacaggcatgagccaccgcgcccggcccactctgccattgtctaagccacctctgaaagcaggttttaacaaaaggatgaggccagaactcttccagaaccatcacctttgggaacctgctgtgagagtgctgaggtaccagaagtgtgagaacgagggggcgtgctgggatctttctctctgactatacttagtttgaaatggtgcaggcttagtcttaagcctccaaaggcctggatttgagcagctttagaaatgcaggttctagggcttctcccagccttcagaagccaactaactctgcagatggggctaggactgtgggcttttagcagcccacaggtgatcctaacatatcaggccatggactcaggacctgcccggtgatgctgttgatttctcaaaggtcttccaaaactcaacagagccagaagtagccgcccgctcagcggctcaggtgccagctctgttctgattcaccaggggtccgtcagtagtcattgccacccgcggggcacctccctggccacacgcctgttcccagcaagtgctgaaactcactagaccgtctgcctgtttcgaaatggggaaagccgtgcgtgcgcgttatttatttaagtgcgcctgtgtgcgcgggtgtgggagcacactttgcaaagccacagcgtttctggttttgggtgtacagtcttgtgtgcctggcgagaagaatattttctatttttttaagtcatttcatgtttctgtctggggaaggcaagttagttaagtatcactgatgtgggttgagaccagcactctgtgaaaccttgaaatgagaagtaaaggcagatgaaaagaaagaaaaagcctttttatgttcttttatgttctcggctcaaaaagaaacaagggagtgtaggtttaaaaccaaaacaggagagaagacaaaccccgctccggctggagttagttagaaccagaactttattgtagcggatacactttctgacctatcatgagtatacacatctgcgaagggaaaccgcgcggcgacagcgtgaggacatcccctgggcgtgagcgtctgtccgctgtctaaacagagcagctacagggacgggacatggaggatggccacacatagcacagccaccagtgtcctcagaactagcagtcagggtcacagaacagtattcaaaatgattgcccacctgttttagaaatctaaaattttacatgtaactaagagcaaagtgctatgtgggttttagaccatgactgtttgtttgctctcctgccctaccaccaagcaaagcagcagggctcctgggggagagggatttcaacccccctgatggcagggggtgctctggggaggagagaggagagaacaggctgttttggaaaattccagcactttgacttcgggccatgcgtctctcctggacgttctgagtacggatcgctcaggcctcctgccgtctccaaaaggagtggtcagccggtctgcaggacacctctcagtttctccttttaccagcaggaaaatgtacatttaagcataaaccacaaggctgcacacggtgagaccaggccactgcccagggagctgctgtcggaggaggagtgtggaaaaggggccagggaccccgcaccccacaccaaattaggaacaggtagaatcccaaaggcaaggcccggccacttgtagctaccctgatccagtctcttgagcagcacagctagaggcctgtggcccccgactcccagccatactcagacctgagcaggggctggggcggggctgggcggggtgggcctctccctctggggtctggggagggaggacccggcgggaagagcccgtgctcagagctccgaacttcactttacattccagtcccgggttacactagcacaaaggacacaaggaatccgatttatttacaaaatattaaaaagtcagttaatcatctacacagtaccccccatcctgccattatttatacatgcactagtttggaaaaaataaaaactttttttaaaaaaagaaaaaaatgattaccgggtgggagtgagcatgttttaccctttgtcaacgagcccagctggcatggcttttctggagtgcgaggggccagtgtcctctccccggggggagactccagacacaaacgcggggcctgaggcgctgggaggcccctgtgcgagccggatggcggccagagaggacgtgtcagnnnnnnnnnnnnnnnnnnnnnnnnnnnnnnnnnnnnnnnnnnnnnnnnnnnnnnnnnnnnnnnnnnnnnnnnnnnnnnnnnnnnnnnnnnnnnnnnnnnnnnnnnnnnnnnnnnnnnnnnnnnnnnnnnnnnnnnnnnnnnnnnnnnnnnnnnnnnnnnnnnnnnnnnnnnnnnnnnnnnnnnnnnnnnnnnnnnnnnnnnnnnnnnnnnnnnnnnnnnnnnnnnnnnnnnnnnnnnnnnnnnnnnnnnnnnnnnnnnnnnnnnnnnnnnnnnnnnnnnnnnnnnnnnnnnnnnnnnnnnnnnnnnnnnnnnnnnnnnnnnnnnnnnnnnnnnnnnnnnnnnnnnnnnnnnnnnnnnnnnnnnnnnnnnnnnnnnnnnnnnnnnnnnnnnnnnnnnnnnnnnnnnnnnnnnnnnnnnnnnnnnnnnnnnnnnnnnnnnnnnnnnnnnnnnnnnnnnnnnnnnnnnnnnnnnnnnnnnnnnnnnnnnnnnnnnnnnnnnnnnnnnnnnnnnnnnnnnnnnnnnnnnnnnnnnnnnnnnnnnnnnnnnnnnnnnnnnnnnnnnnnnnnnnnnnnnnnnnnnnnnnnnnnnnnnnnnnnnnnnnnnnnnnnnnnnnccaagccctggcatggctcttctctacacttaaggcagaacggccttgaataaggtctctctcagcctcggtttacccacgaagacacctaagccccaggcttgctgagcagatgacgcgatggaaagcatgtgaacctgaaggagccgcgccgtaccggcttctcggaggccctggcctgtgctgcctctcagtcctggaggtcgcccgcccactcctacctccatggggttgacggtgatggtcagggcagagtcgtcccagtccatctcgttctccttcccggtgtcctgatcccgcatggtccgccgatgtgcggcccggatccgaaatacccccaggataatcatgaacaccaggaagctgacgcacaccacgatcacaactgtcgcagtgctggggacgactgtgggagaatgagggggcgggatgcgnnnnnnnnnnnnnnnnnnnnnnnnnnnnnnnnnnnnnnnnnnnnnnnnnnnnnnnnnnnnnnnnnnnnnnnnnnnnnnnnnnnnnnnnnnnnnnnnnnnnnnnnnnnnnnnnnnnnnnnnnnnnnnnnnnnnnnnnnnnnnnnnnnnnnnnnnnnnnnnnnnnnnnnnnnnnnnnnnnnnnnnnnnnnnnnnnnnnnnnnnnnnnnnnnnnnnnnnnnnnnnnnnnnnnnnnnnnnnnnnnnnnnnnnnnnnnnnnnnnnnnnnnnnnnnnnnnnnnnncatggctgcgggtgacatcatctgccctcttcgagggctttagtttccttgtgtgtgatggggaataattgggacagggaaagaccggcggtcatgctgagcaggaggctgtgcccacggtggggtgggggcagggcggacggcatggagcatctccgcttggtctccctccccatgtcctacctgcgaacgggtgggggttggccaggttgtggcctgacaggtcaacaaaggagcggtgttccgggtgcacgaactgtggctgggcagccatgtggttggcgtgttccatggggttggccgtgtggattacattcacctatagcagagaaagagaggatcgctggagacaggcatcctgagcctgtccaagaggtgacagtggagtcccgcagctggcatgaccagtgccactcagagtggctcctggaccgcagctgggggcaaacggagctacgggaaaaggacagaaaaaaaaaatcaagagtaagcacttaaaaaacaaaaacaaagaaaaagaaacaaaaaccaaacaaaaaagagtaataagcacttagaaactgctataacaatctaatattctcacacattccagaaatgtatcacttttctacttattagtatttgttgagactgggtcttgctgtgttgcccgggctggagcgcagtagctattcacaagcatgatcacggctcactgcagcctggaacttccctgctcaagtaatcctcccacctcagcctctcaagtagctgggactacaggcaagcaccacgcacctggctgcaatccatttttattgcattttataaaagattatgcccaaaacaagagcagaaaaagaagccgatggtccttccccatgggtcgtttgggaagcactggcgtagacctttttcctcaaatcacagccgtgtgaaagacagcaccaatcactgccatggatttcctttcatatctcttaccctttgactcaaacaaaacaggcaccgaatttagcattctgctcttgagttcatggtgatattccattgctaagagtaactttgggtcaattttctccaggccacagagagcctgagcgatgaagcagctgctggataggtctgtagacgacctcagagcaggaggagctaccctctagcctgtgtggcctgtgagtcaccagcgccagcctcagcagcactggtcctgcccgtgcgggtccctgcgtgagcccctctcaacctgggccgaggactcgacttcattcacaggagggccagtgacctggcacagatgcagagaacttttggttccctggatgctgctctttctaaaacagtgtctttggctgggcacagtggctcacgcctgtaatcctagcacttttggaggccaaggcaagtggattgcttgaacctggggggacaagaccagcctgggcaacatagtgagacctcgtctctaaaaataaataaataaataaaaccacatcctcctgtttctctcatgggaaatctcaagaagccccagaggcattaactgccacttgctctttgtcacctccctgcaaagttccttaggctccaactcaggctgaggcagccagggaaaggggagcaccccccaccccagctcaccccaaacacaacttgtcactccaacaagcccaggtgtaacctgcagcaggccccaggctggaaaggcgaccccctagaatgagcctgtatagctgccatcatgaatgctctgaggttggcgtttgtgaatattagggctgcaaatcagcgccctcactcactgctgctattggccctgctcagtgggagccttgtactcacctccaccttaaattcgttgctgatgtagcggccattcagctctgagcagatgagcttaaacttccggtcaagcaaggacctggcatgccagttccgatagcgcagcaggtgcaaaacctcctcgtagctggccatggtgtccacgcctgcaggggttgaaagggggaagattgccgggtggcttagggcaggagcatgggcagggctgcagccgtcagcacaggcaggctcaattagacacccaggttagctaggccaaggggtcacacaagttggctttctagccatgggaataaatgcaatgtgcacaggggcattcttccctctgtgggggacgtgtcatcccacgcctcaaccctccccctttagagagtagtggctacacatccggtacctgtccaggagacaggagtatgcgtgcagccaacaatgatcccagcgaacgtgctccttccccatctccctctaagataactcaacattctcagatggcaggcagcagccagccaagagctctcaaagtcccctcttgcagcctggcccacctgcgtggctgcagcgctccccttacctgtgaaggtcatgcccagttcagagctgctcacttcaatgcccttctgctgcaggcgggccatgtccacctccaggctctcctgctcgtggttcagctcctctccctccaccgtgacctcacaggtatccaggtcgtgcacgatctcctcggacaccagtgattcttgaactgcaaaagaggcccaaccagaaatattaagtaggggcagtggggcccagcgtggcggggcacactggatgccctgccggctcaccccaaacctacatggctctcgtaaggaccaacgacagaagcaagcgagagttgctttcaagaaacggctgggcgcagtggctcacgcctgtaatcccagcactttgggaggccaagacgggtggatcacctgaggtcaggagtttgagaccagcctggccaacagggtgaaagcccgtctctactaaaaatacaaaaattaaccgggcgttgtggcaggtccctgtaatcccagctattcgggaggctgaggcaggagaatcgcttgaactcaggaggtggatgctgcagttagccaagatgacaccattgcactccagcctgggcgacagagtgagactccatctcaaaaaaaaaaaaaaagggggggagtttcatgtgtcctgagcaagaattgtggggacattgtgcctccatgggctggccagcctggcaggtgcaagcagtgtctcccgtaagtgccctcaacccctcaacctcaagccacatctcaaagcctggcagcaaccaggaaaagatgtaagacccctccagatgggattccagagatcaccatgagctccagctcacgggtcagattccagaagcacacccgagagaacaccaacgaaagattaaaacctccccaaatcccacagagacaaagagccccgccaagtacatggggacaatggggtttccggccgaggcgagggagcccgcgccccacagagcacattacctgtggggtcctcagccccgtccccttcaggctccacttctctcgtgatggtgctgatgatgcgaagctcagggaaaaggaacaccccttctgagctttcaaattcagaagctgctcgggcaaaatggtggacgccactcaggctgatcttgggctcctcgggctgtaaaaccatcacgtagccatctaccggggggaccgaaatgcaggtggcctcgttaaaacacctgccagcaagaaatggggaagggtcagggctttgggagccgatcttggagcccacctgtgcaaaggcacatggaggtgggatacagaggcccccactaacacctgccggggccactccaggaacacacttgcaaacaagatgcgtaaatatcactcagctctctgccccacactttctggttacacacgatggctcacctttccttacagaaggggttaggctgtcttaaaaacctaaatatacaagtgtcattgggcaaaacaggccggctgttaaaaatcaggacgtacttgattgtgctggtgattttgagtctgcgaattccgggcgtggggaactgccgggagttcaggtacgagatgtgctgcatggccttatccaattccccgaggtcttctccctccaaggtcaataccaactggctggggtgtgcttggatctgaaatcacaccagccacagagaggagaagaataagccagtaaccgcaggagctgaaaccacagatgcctccacaaaggggactggcctgggttcgatttgaattgctgacttgaaaaagaaaagctcgtttaagtccagtgaacacaactcttttacccaacagtaaacgtatcaatcacagattactcactccctcatcccaccagcctccggggctgtagtctaaggggcccatgagtggtgtgcagtcgagcgctcggtgttacctgcacgcctctgccactgtcttcgaggacctgcaggtccagcccctccttgcaggtatacagacagtcgatcaccttcttatccgcgagtttcccggaacggagagttaagccagccagattgcctcggaaaaactgggtcatgtgcaggtcgccacctttgggtcaggggagaaaaggcgaagtcaggcgtgcaacccagcatcgcccaactcacttctcactcaacacggtgttaccggtgctggcagctcagtggatggacatgcgggttagttcataccaagtcctgttagccttgcaatctacatggaagcgcaatgaagaaattaaaccgtttatgatcatgcacatggcctggagaaagggagagttgggggtgtctcacctgaagccaagaggtcccctgagggtccccacacctctggccactacctggtaaggtggcctaccctgttctcatcaccagggtgcatggtgacacttcctacgccaccagcctctccagccactgccttctcagctggctgggttccacatggctgttttctctacctggcacgccctggggaatgaacccacacaagcgaggcagggaggataaaagggaggcttaaaatactccctgcatggaacggcctatttcaaggatgctatggtgttaagtcccatccttcctgcctcctcctgaggattgctgagaagtgcagatgttacaacgaaaaccaaaacccagaaaatggcccttgacagatgacaacaaagagccagaaacaggttacactaaaccttgttcttaaactgaaaaggaaaagggacaaattttcagcaatgtgtctcattctggtacagaaatcaggcactgtaaatcatgactaggaattgaggtttctaagaaacggctatttgccaggcatggtggctcacgcctgtaatcccagcgcttcaggaggccgaggcgggtggatcacctgaggtcagagtttgagaccagcctggcgaacatggcgaaaccccgtctctactaaaaatataaatattagctgggcatggtggtgcatgcctgtagtcccagctacttgggaggctgaagcaggagaattgcttgcacccaggaggtggaggttgcagtgagccaagaccgcgccactgcactccagcccagacaacagagcgggactccatctcaaaacaaaaaaaaaagagagacgtctatttaaaatttactgtcaatcaggacagaatatctagaaacaagtcttttcctgtctcgtggttcatccacatgacagtcacgaggcggcctcccaaaccctgcctgtaagactgaaaaagcagggagcctcatgcagtggggtcagggtcaaactggatgggggggaagtcccatgcatgcactgcctgagatgtcatttgtcctcactccagctggggtcagaatgggcagaataagggaactccatgaagcaatggggaagcgcaatgcagggaagcagctcagatggtgtccaggaccaaaatgcaactggggcgtttcatgcgacacgtggaatgaatcagtctcatctttaaatgaaacacaatagtgaatgtagggaaaaaatccagcaacctgcagaggccacagtcacaggctcagtttcattgtcattttcaactcctgaaaactctgtggaaaagcaagacaaagacaatagaaaaggactgagaggttagggtcttcaaaccggaccttgaaaaccaggtttgaagcaaccaactataaaacatgaagagaaaattccctcgtgatcccgctctgggatgtacccatctggacgcaagcttgtatttaatcaccttttcccagaagtgactttaccacccccaaccccaggcttcttttgttccaccttcccacatcctccttgccaaaacatatgttagattcaaaataagatgaatgaaagcacacacatggaattcgttcccctccccaatccgtgctatgaagtaggacactccacagaggctgagcctgggctgcaatgctgctcccgatataaacaccaccaagttccggaccaacagcacctcttctcctaatagggaagacactgcgcagacaaaaaggcatagcacacacgtgtcccaagcctggtacacagtaagcatgcggaagtctgtatattttggaagctccaaacaagtttacatctgtctagccattaacctttgggcgacagaggaaagaagacattctcaatcactttttctgaatgagagggagatgcagaggctaaggaacccacctagggaagcatagcctacggtggacctggggaccctcaccaccttcagctcctctagctcctggatccagtgtacagagtaatacaacctaccagaaaggcacacacacagcggctaagcacagaaccaacactctccaggtcatgctgaggggaaaggccactcctcaagccctgcagccctgcagccctcccctctatggtgtgctagggccccttttgggctgcggctgtgcggggctgcatcaaggggcaaggctagaggtgtatccaggtgaagcccatgtgagccacgggcctgtgctacctccacacacaccaagactcccccacaacacgctggtagaagggaatgaagctgctgcccacagcccaagctctccacggccaacgtgtagcaaaagtggcagaatcaaccacaaaaaagaaaaggagatcctctctcctgttaactgaattttaaacaatctgtggggtttttttgtttgtttgttttgagatagagtctcactctgttgcccaggctggagtgcagtggtgtgatcttggctcactgcaacctcagcctcctgggttcaagtgattctcctgcctcccaagtaactgggattacaggcgcacgccaccacgcctggctaatttttgtatttttagtagaggcagagtttcaccatgttggccaggctggtctcgaaattctcctgaccttgagtgatctgcctgccaccgcctcccaaagtgctgggattacaggtgtgagccactgcgcacggtcatctttcataaatttctaaccttactcaaggtacaatgtttccatagggagaaaaaactaatcaaaaagtaattaatgatgatgataccttgaaatgacacagcagagtccagtgcaagggtcaaggtgggaatcatgaacctctggggtaacctgagggttccatgaacttggatgggaaaaattacatgcttatttccactaacttctgaaattcagcatttcctttggcaataaatgtaggctacacaccacagcagttagcaatgactgcaactttgtcaccaatagaatgcactgatatttgcacaccaggccacagctgttgcagatgccacagggatcctcgcacagccctcacaacttggaacttacaccactgttggacctgctgctaaagctggttcttcatttgttaacataaagtaccactggtgttactgtttcacaaatgtagtatttcaggatgttaataactatatttcagtttaactgattacccttgaatcctatgtatttattttgtagattaataagaagggatccattggccttgccagaccacccaagggctccatggcacaaaaaagggcttaaaaccccaggtctgagccaggcgcagtggctcatgcctgtaatcccagtactttaggaggctgaggtgggaggatctcttgagcccaggagtttgagatcagcctgggcaacacagtgagaccccatttttataaaaaattaaaataataacaataataaaaaccttgatctggtgggtctgagtgtgggcccagaatacacaggtttttctttttcttttgagacagggtctcactctgttgctcgggctggagtgcaatagggcattttttttttttttttttttgagacggagtttcgctctgtcacctaggctggagtgcagtggtgctatctcggctcactgcaagctccgcctcctgggttcacgccattctcctgcctcagcctcccgagtagctgggaccacaggcacccgccaccatgcctggctaattttttgtatttttagtagagatgggatttcactgtgttagccaggatggtcttgatctcctgacctcatgatccacccacctcagcctcccaaagtgctgggattacaggcgtgagccaccgcgcccggccaatagggcattcttggctcatgcagcctctgcctcctgggttcaaccgattctcctgcctgagcctctcgagtagctgggatcacaggcacatgccaacatgcatggctaatttttgtatatttagtagagatggggtttcaccacgttggccaggctggtctcgaactcctgacctcaagtgatctgcccgcctcagcctcccaaagtgctgggattataggtgtgagacaccgcgcctggcccacaggcttctcaaagtaaaaaaattcaaaaccctggctcctgattcatcagctgggtgacacctggcttgctgcttctgtgggcctgagtttcttcagctataaaaaagggattctaaggtttaggtgagacaacgtgtataaaggagttggcacacagcctgccacttggtaagtacaggtaagaagcactggtgctctggtggttatcatatcccctctcagcagagacttccatggaatcctccccacacgtggcccttgctgagggtgaacagagccctcgcagccctcctaccaggtcaccaagtgataaacactctggaagagtcctccaggtccaaggcgcacttctacttctgcgtcctttatttctgtgcctgactcttgctgttgcctctttgtccttgtgaacctttcaataaacggattaatttataaaacagttccccccactacacgctccctctgtggaacgctccctcttgggtttccgggaaaggtgacggtgtggtcagtcctatcacctttatggagcacctacagacagagctatgctagctagagtggggtaacggcagtgtccccaaaaaggctgtacacaggaaatggaaggaaaagatccaggacacgagggtaaggctgtaggataccgatcacagcctgctgccaccaacctagtaaagaggtacaacttaattctcgagtcgagggcggggggtaatgacaggtaccttgccagcaagcccccaccacgagctgagtttctatcttggatggatggagcgggtaatcctcagtcacagagaagggctcgtgggacgtgccatccacatagagagtcacactcgggaattctacattgaggacgtagtggtgccattcctcatcacagacctacagaggcaaagggaagcggggaggtgtgagatgtccactttccttctcatcaatgcccatggaaaccaagtcacccaacacaagggtcttcctaggaggaaaaggatgaaaaaaatctaaccacaaaatatctgcaaatacatctcaccaaaagaagccaagcatctctagggcatttccaaactacgggggctgcattgctcactaaccagaggacacagcccaagtagggagctgcccaattctgctctgccaacagtgtggcaccaggaagttcctgtatgggcaagctggatacccaccctcgaaagggttgagttagtttaccactggccattccttttctgaataaaaataaaaagtgcctttaggccgggcgcagtggctcaggcctgtaatcccagcactttgggaggccaaggcgaggagatcacttgaggtcaagagtttgagaccagcctggccaacatatcgaaaccccatctctactgaaaatacaaaaattagccgggtgtggtggtgcacgcctgtagtcccagctacttgggaggctgaggcacaagaattgcttgaacccgggaggcaaaggttgcggtgagccgagattgtgccactgcactccagcctgggtgacagagcaagactctatctcctccccaccgccgacaaaaaagtgcctttaatctcagaataaggcacaccatagtacatgtattttcttttccaactcaaagttgatgatctcaataaatatgaacatcagctccaagggcaccccaaaccaaactgtgttcccatcctgtgatgaacgagtgtgtgaacacgcatcagccagctgcaatgggcccttatctgggtcgtaactcaaacaaattgtaaacacaaaaacatttatgaggctacttgaaatctgaacattgactggctatttgatcgtattagaaattttactgttaggtttttttttaatgtgaaagagtgctgtgattatgcttgtctatgagatacatcatgacatacaggcgggcgtctacaagaatgaaatgctctatttgggatttcttgaaaattattaactaacgtttgagggggtgataaaaattttcagcagtgaataggggtaacaatgaaactagactgaccaagagttggcaactgttgaaggcataagggcacacagggctattctttaatctgtctgcttttatataaatctgaaattttccataatacagtttttaaacagtatatacttagaagaaactaaatatataaatgcagactatggctactataacagaactgtagctaaaatgtccacctatgttgcaaaatatttttccaggactaagcctttctttagttttttgaaaataattaatggtaatagtttctgagaaataatcactcacataaataaaaaaatacaccaataagagatgaatgctacccagcctgaccaaaatggtggaaccccatctctactaaaaatacaaaaattagccgggcgtggtggcgcacgcctgtaatcccagctactcagaaggctgaggcaggaggatcgcttgaacccgggaggtggaggttgcagtgagccaagatctccactgcactccagcctgggcaacaaagcgagactcagtctcgggggaaaaaaaaaagagacaaatgctaccaactggacacccacttcaactttccactatcatatactttttcctttctcatttattctcttttacttttatctatcctatgattatttttagacactattatattttagcaactgcaggcacatataacatatgtcagcttttgtccactaactccatgagacaaataaaatgatgataaggccaaaggtttccttctcatcccaactctacatcaaaagaaaaaatgatctattctgattttaatagagggttctaattttacagtgctctctcgtttcctgtagcacgtggggtttttcacaggatatttgctttctatcacagcaactgctagaaaattagctttgcggccgggcacagtggctcaggcctgcaatcccagcactttgggcggctgaggtgggtgcatcagttgaagtcaggagttcaagactagcctggctaatatggtgaaacctcatctctactagaaatacaaaaattagctgggtgtggtggcatgtgtctgtagtcccagctactcataaaattataaatatacactgactatacacagccatccatgtgcaaggttgcagtacctgcttactctctcttagaagatgacagtgtttttctttttctttggagacggggtctcactctgtcatccaggctggagtgaagtggcacaatcgcagctcattacagccttgacctcctgggctccatcaatcatcccacctcagctccccaagtagccaggactacaggcatgtgccaccatgcccagctaattttcgtgggtttttttttttttgtagggacaggatcttagtaatgttgcccaggctggtctcgaacccctgggctcaagcaatcctcgtgccccagcctcccaaagtgctgggattataggtgtgagcaccttgcccggccctattagtgcgttttcaattcactcacctgattcaacttccagtggaactctgcaggtctgtatttcttctcctcagaaggatcctgacggaagaggaagatcagccggcacccgtggacatagagggagtagtggtgccgattcatatctgcaaaggcagtttctatgggtaaattgccaactaaagatccaaaggagaaattaaagctgtttcttgaatggattttgaagacacaatttcatctgcataaatgaactcttcggctaagccaaggcagggcttagaaacaaatacacttgggctttcctgagaggcggagcctgtgatcaccgtggaccccactgagcaacaacagctaatacccaaatgcccaggccgtggctctagggaaccaagtgccccaggcacacagcatggcacatggcctacgagcaccaggctggcaggggaccctgggaaaggagagggagcctgccgctggcacccaccctactggacactggggcctggcatcgcttgcagagctattaccctacctgttttatcagaactgcaaagaattgtctccttcttcctgccgaatggcccatgtctcatccacaccgagatggtgaacggctctttggggctgaccgacacgacgccatccgggatcctcactgcctgggtgccgttgaactcaaacacctggtcgctgtcgtggccattgtcggtgggcaggcccatggtccagttgagggatccactcggggatggcagcagctcggcagtgcccgcggccgcacctgaagccacagtgctcggtgaaactcatgtgaggagccagaggtcccgcgcacctcaagcccccaggcacgtgcttgtcttacacttaggcaatctgctggctccagtttactttttttttttctttcgagacagagtcttgctttgtccccaggctggagtacagtggcgcgatctcggttcattgcaacctccacctcccgggttcaagctgttctcctgcctcagcctcccgagtagctgggattacaggcgcgccccattaaaactggctaatttttgcattttcaggagagccggagtttcaccatgttggccaggctggcctggaactcctgacctcgtgatccgcctgactcggcctccaaaagtgctgggattacaggcgtgagccaccacgcttggccctttcagtttacttctcttcaaaaatcagggttttaaattacaaaaataaaaataacaaccatggatttgtttaaggaagggaaagggccaggcgtgaacccgggaagcgnnnnnnnnnnnnnnnnnnnnnnnnnnnnnnnnnnnnnnnnncctgcactccagcctgggcaacagagcgagactccgtctcaaaaaaaaaaaaaaaaaacaaaaaggaagggaaaggaagcatttcttgtaatctgattcaaattataccattttagtataaacacccagtcctcctttggtaaatatacacaaaaatgatgcgttttcttagaaaaatggagtcctggcagggcttggtggctcacacctgtaatcccagcactttgggaggccaaggcacacagattgcttgagcccaggagttggagaccagcctggacaacatggcaaaaccctgtcaatacaaaaaacacaaaaattagccaggtgtggtggtgcatccctgtagtcccagctacttgggaggctgagatgggaggatcacttgagcccaggaggttgaggctgcagtgagctgtgactgtgccactatactccagcctgggcgagtgcgaccctgtctcaaaaatatataaacaaatacaataaaagtggagtcctgctatgtatgtgcataatacatatatattcctagcaatattcttctatcatgtaatttaaactatctgaatagttgttttttttttttttttttttttgagacagggtctcctctctcgcccaggctgcagtgcagtggtgcagcgttggtttaccgcagccttgacctcctgagctcaagcaatcctcccacctcagcctcccaagtagctgggaccacaggtgtgtgccaccatgcccggctaatttttgtgtttttgtagagacggggtttcgccatgttgtccaagctagtctccaactactgggctcaagcgatccatctgcctcagactcccaaagtgctgggattataggtgtgagccaccgcgctcggcctgaatagcatttcattgtacagatacagcatcacctactgaccagcctcccaggtgggcacagaggctgtccctaaccttttcctattataaacctcacctgcatgcacagctttatgtgtctccatgattattcccttaaaataaattcctagaaatgaaattactaagtcaaaaaacataaaaaatgttttccaaccattcttatgtattgccatgttcaaattaaaaaaatttttttttgtccacaggaaaagattttgcaagctccttcttgactaagctattactcggagcagcaggccttggctggaccagcctggcctcttgagtaacagaagaccttggtccaaatcttagctcctgaagctagacgtggtggcttgcgcctgtaatcccagaactttgagaggctgaggcaggcagatcaactgaggtcaagagttcaaaccagcctggccaatatggtgaaactctgtctctacaaaaatacaaaaattagccaggcatgatggcagatgcctgtaatctcagctacttgggaggctgaggtgggagaatcacttaaacacaggaagtggaggctgcagtgagccaagatagcacgattgcattccagcctgggcgacagtgagactctgtctcaaaagaaaaaaaaaaaccacacacacacactagaacctcagctcctgaatatgtgggcttgggcaagctacttaacctgctttagtctcaattgtttaattcctctgtaacaaggtcaatacccacctacttcgtagacttgttgggaacattaagctaaaacacacatagaagtacctggagtaaggccaggcgcagtggctcatgcatataatcccagcactttgggaggccgaggtgggtggatcacttgaggtcaggagttggagacgagcctcgccaacatggtgaaatcccatctctactaaacatacaaaaagtagccaggcatcatggcacatgcctgtaatcccagctacttgggaggccgaggcaggagaatcgcttgaacccaggaggcagacgttgcagtgagtgagattgcgccactgcactccagcctgggcgacagagggagactgtctcaaaaaaaaaaaaaaaaaaaaaaaaaaagtacctggtgcatagtaagcactcaaattatttctattcttcctaactttattctgctgaaaaaaaattcacttaataccatgaaatgagagacggaataaattttatatattatacttacatgcatggtttaaaacagaaaatgtgccagacctccttacttaaatatatttaggtgacaattatgaatatttggattcagagttgccaaacacccccatatgctcatcattggactgtggcagcataatgtctagttttctactttggtttatttaccacatgataattttcttcttatttattgttttttttctaagacaaagtctagctttgtcacctaggctggagagtagtggcacactcttggctcactgcagcctcctgggttcaagcaattctcctgcctcagcctcccaagtagctgggagtataggcacctcgcaccacgcctggctaattttttatttttagtagagcgggggtttcatcatgttgatcaggctggtcttagacccctgacctcaagtgatctggataattttcaattataaaccagtggccgggcgcggtggctcatgcctgcaatcagcactttgggaggccgaggtgggcggatcacgaggtcaggagatcgagaccatcctggctaacacggtgaaaccccgtttctactaaaaatacaaaaaaattagccgggcatggtggcaggtgcctgtagtcccagctactcgggaggctgaggcgggagaatggtgtgaacccaggaggcggagcttgcagtgagccgagatggcgccactgcactccagcctgggtgacagagtgagactctgtctaaaaaaaaaaaaaagaaaaccagtaacctaaatctcatggttgttatcaggctagtgaaaagactcatcagtttaagaaaatgctccctgaaaagctgtttcacaaaagctttttgaaacacaaaagacccttccaatttatgaagacgctgcttcatttagtgggattttatcaccagtcaactaaatgttcttccctcaacatcttccatgacagccatccatacctcacctcttcttcatttagataaaccagaaaaatatccgcagctgacagtaaagagagacctagccttctggtgggtttcccagtaattctgtctctcaatttctccacacaatattgtgatatagaaaatctattgagattctaagttagatgtggctatctttagttctgattttctacttcatgtttgtcaaaagctattgtattacctatatttttccttcagttctttttgagacaggttctcactctgtcatccaggctggaatgcagcggcgtgatcttggctcactgcaacgtccacctcctgggctcaagcgatcctcctccctcagccccccaagtagttgggactacaggcgtgcaccgccatgcccggctagtttttgttttttttgtagagacagggttttctccatgttggtcaggctggtctcgaactcctgacctcaggtgatctgcccacctcggcctcccaaagtggtaagattataggcatgagcccccatgccctggcctttgtcttcaattcgtaagtaaacatctcatttcatgtaaaactcactccatgtactcctatagaagccctttttggatgattctcagagtatgctggagaaatacttccttcaaatcagtggttctttttttaaaacagggtctcactctattgcccagggtggagtgcaatggtgccatcacggctcactgcagcctcaacctcccgggctcaggtgatcctcccgctcagcctcccaagtaactggaactacaggtccatgccaccatccccagttaatttttcaattttttgtagagatggggtatcgctgtgttgcccaggctggtctcaaactcctgggctcaagtgatcttcccacctcggcctcctaaagtgctggaattacaggtataagccaccacatctggccaccagtggttcttaaaatgcacatatacacaacatgttgaatagacgtttaggagttgatgtccaccccctgccccacccccgaagcccatccagtatgaaaactagccagcaaggcagcaaagttcacttcagaaatgcagattctctgtcacagtttataattatgaacacaacacacacaagtatttccagttgtaaaggtccctcccaccttcaccaaagccagccggatgcaagaacgcctggtctccttaccacagagccggtggagggacttctctgagtaggtgtctcggtcgcagcctttccctatgtggctggtttctagctccactgtggcctgtactgaggcgactggctcgtcacatgtctccaggtggatatttggaaagacggccaacgcgccggtgcccggctcatactcaatcctgttgttccatcctgtgttggtccacaagtcagcaggggaagagagaaggaaaacacacactctaggttgctgccgcatacatcagttttaagagcagatgtgagcgcaggggagagaatgaagctcaccttgccacccaggggtgcaggtgggcttaatgctgatcttcaccaaaacatcttctgtggctcttttcttcccacagtcataggcagtgacggtcagcttatattgatgttctttcccgtagtttaatttctctgtgttttttatataaccttacagagggcaaaaacaacagtgagagccaaaacccatgctggttttacttttgttgtcctaggcggaaagacaaaatgcataggctttaagccctgtaaatactcagccagaaataaacatatgcttgggatgcttaaccctcaacctgtcctccctgagccctaacacgcactaaatccatcctgaagagtttcaacagaagagacggagctacacagctcagtctccacttactctcacagtgttacattgggctttacattaagatttaactgtttacatacattcagaggattaaaaaataataataattcaagtacctcaaatattaaatataagatcgctgatcaaacatttactatattaaaagaaagagagatttcctacccccacctgcttagaacagaagcctgctttttgaacgtggtgagtatagatctctggaaagtgtttgcaatgtccataattccatcaaagattctagaccgtgcattgattaacaatggaaacactgtattatctttttttttctttttggaacagggtctcgttctcttgcccaggctggagtgcagtggcctgatctcggctcactgcaacctctgcctcctgggttcaagcgattctcccacttcagcctcccaaatagctgggactacaggtgtgtgcctgcagtcccagctactagcgaggctgtggcgggaggatcccgtgagcccaggagttcgaggttacagtgagcagtgactgcaccactacattccagcctgggcgacagagcaagaccttccctcaaacaaaaaaaaaaaaaaaaaagatgtcacaggagattctaacttaatggagaacatggccaggcgcggtggctcacacatgtaatcccagcactttgggaggccaaggtgggcggatcacctgaggtcaggagttcaagaccagtctggccaacatggtgaaaccctatctctactaaaaatacaaacaacaacaacaaaaaattagctgggcgtggtggtgggcacctgtaatcccagctactcgagaggctaaggtaggagaatcacttgaacccgggaggcagaggttgcagtgagctgagatcgcaccactgtactccagcctggggaacagagtgagaaactgtctcaaaaaaaaaccacaaaaacaaaaacaaaaaacttaatggagaacagaaaatgagacaaactaaatgtaaaggtcagtctcattcagatgcatgtggactgaaagttaagaagattaaaaaaacaaagccatgtcaggtaggaggatttttatttgattttggtgggaaagcaaaaaagaggtgagccccacaagagaacacaggacttacaggttccagagaagaagttgtcagggaacaaagtagaaacttaaatgtttttacaattaaaagcaaacacacaccaggttaggtctccaacttgtgagttccatgaagttctgacgaagcacagaagctggggtgtaaagtcagtggggttagcagggactgtctacctagctgaaaagccggctcctcgattcttaccatctttgtcaacagtaaagggcacgtctggagtgatgatttcgtagctgcaaatctggctgaactgaggggagcagtcggcatccacggcctccaccctcaaaatgctgtcgtactgcttcccctcgatgaccgtggctttgtaggacttctccttgaacacgggcgcgtactcattcacgtcgttcacctgaatatgaacagttgctctggacaaagggagggagaaaaatatttttctgcttgttttcagtgtgagagagagacagagagtgtgtatgtgtgtttacccaattctgccctactttaaaatttcctgtttctgataccttgtttcatgaaattcatatgatgaagtcaaaaattaaacaagctattcactgcttttcattcaagtgtggagataacagaaagttaaaagagggatttgggtcgattcttccatatcctaagaataaagcaaaaaaccaatcatctaaaataaaagagacttgggtgtttttttttgacaatatgggacaagacaggcagaagggagataaacaataccagacgtctgtttgctctccaattataaagttgaaacatattttgtagcaaaatccagaaaaaaaatagagccaagggaagaaggggtatgaaacagagaaagcatgaaatggtttgattctgagagttcaaacgaattctgtcctacttctagggaataggctggagtccatggcatcacctggtcctgattcaacaaatggaagagttcaggagaggcaggccgttgccacctgccaataccccagctcagttatcaagaaaattagggtgtcatcagacctggctacaaataaaaaaaactgtaggtttcaagggctaatggtcagggcatgcttctgaatcagtcaaggactttggtcaaaatctgaccttttcaagggaaacaataacattacactgtggaaaaagagaagagactcactggggcactgcaccttctgctcaccatgagcctcctcatcccagtgccatcggtctgaccctcacaatgggttatgtgacaccatctcgcccacatacccttctttagtagatgtgctaagtagaaactgagactcagggccgggtgtggtggctcacacctatcccagcactttgggaggctgaggcaggagggtcaccagaggtcagagttaaagaccatcctggccaacatggtgaaactccgtctctaccaaaaatacaaaaattagccaggtgtggtggagcgtgcctgtaatcccagctgcttgggaggctgaggcacgagaatcgcttgaaccctggaggtggaggttgcagtgagccgagattgtgccaccgcactccagcctgggtgacagagcgagactctgcctcaaaaaataagtaaataaataaataaataaaacaaaagaaaaagaaacagactcaacaaaattaaatttgcacaatgccaaagggctagcaagtggtggagaaaagactagagctctagaaaagactagagcttacaatctaattgtagaagacactggacttgagaacaccagcagtccccagcctttttggcaccaaggactgatttcatggaaggcaatttctccacagatgggggtgggaggatggttttgggatgaaaatgccccacctcagatcatcaggcagtcgattctcataaggagcgcacaacctagatccctggcatgctcagttcacaacagggttcgcgctcctgtgagaatctgataccgctgctgatgtgacaggaggtggagctcgggcagaaatgctcactcgctcacatgctgttgacctcctgctgtgtggcctggttcctaacaggccacggaccagtactggcccacgtcctgaggtatggcgacccctgttctatgttgtcttgtccaaagccctctctgctacaactgcagttcctaactggcaggaggtgcagcaacacactcaggattgtggcagcgagccagcctacttccaccagcagtgactaatttttttttttttttgagacggagtttcattctttttgcccaggctggagtgcaatgatgtgatcttggctcagtgcaacctccacctcccaggttcaagtgattctcctgcctcagcctcccgagaagcagggactacaggcgcgtgccaccatgcctggttaattttgtatttttagtagagacagggtttctccatgttggccaggctggtcatgaactcctgacctcaggtgaaaatcacctcaggtgatctgcctgcctcggcctcccaaagtgctgggattacaggcgtgagccaccgtgcctggccaatttttgttgttattgttttttagggacagggtctcattctgacactcagactggagtacagtggcacaatcatggctcactgcagcctcaacctctcgggctcaagcaatcctcccgccttagcctcccaagtagctgagaccacaggcatgtgccaccatacctggctgtttatgttttgtagagatggcatctcctacattgtctaggctgctctcaaactcctaggctcaagcaatcttcccacctcagcctcccaaagtgctgggattataggtgtgagccactgcacctggccaacaatgattaagtttatgcccttaggaattacagcaaaagataaatatgacaacaaaataaccttcctaagggagaagcagactttttcaatttttaatgtagggcctttacttctttaatagagtatttggtgtgataaaattattcactcattcatttattaaaaacctaggccgggtgtggtggctcacgcctgtaatcctagcactttgggaggccgaggcaggtgaatgatggggtcaggagtttgataccagcctggccaacatggtgaaacccgtctctactaaaaatacaaaaattagccaggcgtggtggcaggcacctgtaatcccagctactcgggaggctgaggcagaaaaatcacttgaaaccggaaggcggaggttccaatgagccaagatcgtgccactacactccagcttgggtgaaacagcgaaactccatctcaaaaacaaaacacaaaaaggccaggtacggctcacgcctataatcccagcactttaggaggcccaggcaggcggatcacctgaggtcgggagtttgagaccagcctgaccaacatggagaatccccatctctactaaaaatacaaaattagctgagcgtggtggcgcatgcctgtaatcccagctatgtgggaggttgaggcaggagaatcgcttgaacccaggaggcggaggttgcggcgagccaagatcatgccattgcactccagcctgggcaacaagagcaaaactccatctcaaaaaacaaacaaaaacaaccccaaaaaacctaatatgcctaatgtgagcaaggctcttgctagaaactgtatacaagggtagagagacatgattcctgccctccaagtgtttacaatctaattgtagacacttgagaactatcttctgcctatttcaaaaacagtcttggggagcaggcaatagtcactactattttcgttctgcgcacacacgtttactcggtgggttatgttcactctttgtccagcttacttacttatgagactttttcacgttggtgccatcaggtcccttcccacaatcataggcctggatggtgaatgaatagtctttctgcagctcacagtccagtttctctttggagcgaatgactccctcaccagtggatttatccactaccactgcatcaaaggggacattctgcccgtgaattttaaatccacaaatctcacctagggagtcaaagcagaacaggtaagaattcctaccacatagatcttctgcaccttgccctcctccccccatctccacccccaaagaaaataaatgacaacaatttggcagccaggggtttggagggtccgtggacaaagcaggggcactgtgttttaaacatggggaagttctcgggctttagtaagatgaagcagattctggctttccaagcaacttgtttactttgcatccattcatgcaggaatacaaaagagagagagaagaaaatatagacaggcattccacaggagcacttagatagctcgagggtaaaaggagtctcattagcacacagccaggcctgagaacaccagcgctgccccagctcctgggagggctggcagccagtttgatttggaccagagagaagctaaaacgcagttatgtgttgagagaggaggaagcgtgagatataggatcagcaccgtaattacagaaattctgtcaaaaaaaaaaaatcaaaggaaacaagtcttcctgtgcaatgagcctggctaaaattagggaatcaaaacaaactactcaatgagaaaggtagaaataccgactcgtcaggcatccatttcaacagctattttatcatctacgattcagacacagtttctattatgggagggactggctagacttgcctttgtttcggactttatcctatcaaacctgaaaaagacaccagcctgggaacttctctacatctaaattggctcacaacttaattaggagttaaaaatctatgtttccattcttgtccatgggagaacagtataaatgttttgatgtcgatgtgaaactccacaaaatgtatttcacatgaaaataagactgcactccttccacaattccaactaatagaaaattgttacaaagcaaatctctgaagttctattaaacaaaaatgtacagtgttatccatacagttcaaatggatgtctgatttccagatatttctaaccaagggtctggttacatacaatttccatcaatatactttaaaatagaaacaaagtaggagaataaataaggataaaagagcatgacagtttctcctgtttaagggctgattcccaattttataaacaaagttagtgggttaatattcataagaggggaagaaagaaccctttatcaccttctttggtgactgtcacctcaaaactctctaaagggagaaaagataagcccatgtcagtaatacaggaaagaatgaagacggaatacactaaggaaaaaagtcaaaggtgcacatattacacatttccacaccaagctcagcgaccggcttctacgattgctacagcaaaacctaatcttcaggaacaaaatgtcactttgaatccaacttaccatgaactactgcataattctgaagttattaatttagggatgaaatactcctacatgaagtgtcctaacaccctcaggggtcattaggatttttcttttttttgagacagagtctcgctctgtcacccaggctggaatgcagtggtgctatctcggctcactgcaagctccgcctcctgggttcaccattctcctgcctcagcctcccgagtagctgggactacaggcgcccgccaccacgcccggataattttttgtatttttagtagagacagggtatcaccatgttagccaggatggtctcgatctcctgacctcgtgatccgcccacctcggcctcccaaagtgctgggattacaggagtgagcccccgtgcccggcaggatttttcttttaatgaacactctagtgacaaaccatgaataagtacatctatttgttattttgcagttttcagatgttcatttccaacctaaattctctcagctagattctggtaacattcaactcatcagtagatttaatgaaacaaaaatttggagcaaaaggtttttttttttttttgagatggagtcttgctcagtcgcccagactggagtgcagtggcgtgatctcggctcactgcaagctccgcctccctggttcacgccattctcctacctcagcctcccgagtagctgggactacaggcgcccgccaccacgcccagttaattttttgtatttttagtagagacagggtttcaccatgttagccaggatggtctcgatctcctgacctcatgatccacccgcctcggcctcccaaagtgctgggattacaggcgtgagccaccgcacccagccgaacaaaaggttttaaccctttgttcttgaactgaaaaaaatgacaatatttttctaatccaaagtacccaaccaaggcaacaaatataaacccctctgctaatggaacatctgcttaaatgtgaatagaaaccagattcaaaactaactgtagggatgctacaacagtcactgttctcattacatgaaagctctgttctaccaagtcaatatatatcctgcttataaaccctttactatggaggagtggaaatgtgaagagatcaggaatttcgctgcccctcaacacactgggccctcactggtggcaccttctctcccccaaaggtaacacgacctgaattcccttgctttgctaatagtgctaccatttattctccctgaacagtgttgtttcattttgcttggttttaaggttttaaaaatggtatcacatggcatgcagttttttgtttgtttgttttgggggggggtgggaacggagtttcactcttgttgcccaggatggagtaacaagatctcggctcactgcaacctctgcctcccgggttcaagcgattctcctgcctcagcttcctcagtagctgggattacaggcatgcaccaccatgcctggctaattttgtatttttagtagagatggggtttctctgtgttggtcaggctggtctcgaactcctggcatcaggtgatccgcccgcctcggcctcccaaagtgctgggattacaggcgtgagccactgcgcccagcccacgtgcagtttttatgacttgcttctttttctttttttgagacagagtctcactctgttgcccaggctggagtacagtggtagcatctcagctcactgcaacctccactttctgggttcaagcgattctcatgcctcagcctcccaagcagctgggattacaggcgcctgccaccaagcctcgctaatttttgtatttttagtagaaatgggatttcaccatattggccaggctggtcttgaactcctgatctcaagtgatccgcccgcctccgcctcccaaagtactgggattacaggcgtgagtcaccgcacctggccatgacttgctttttcatgcaactttgtgtatctaagatttattcatccttgctggtataggtagctatagtttattcattttcactactacctaacagtgagaatccacgggtcaaaacatgtaaagtgcttaaaacattgcctggcggaaagagagcacttaacaaatgtttgctattattacaatcattttccactgtgtgaaaatgccatcagttgttcctgctgtttaaaaacaatggtgtcatgattatttcggtccctgcttgctgctgcacgtctacaagagcctctgtacgcctgtgctgcctaacatggcagccactagccatgtggggctgttcaaatgcaaatgaaaattcaagctaaaaatcaaacaatgtgaaaaatccagttcctcagttacactggccagttctcaagggcccagcagccacatgtggctggtggctgctgcaagaagacaatggacgcagagtgctccccttggcacagcaagtcccactggacagagttgctttgaattaggggtctgcaaactgccgtttccagaannnnnnnnnnnnnnnnnnnnnnnnnnnnnnnnnnnnnnnnnnnnnnnnnnnnnnnnnnnnnnnnnnnnnnnnnnnnnnnnnnnnnnnnnnnnnnnnnnnnnnnnnnnnnnnnnnnnnnnnnnnnnnnnnnnnnnnnnnnnnnnnnnnnnnnnnnnnnnnnnnnnnnnnnnnnnnnnnnnnnnnnnnnnnnnnnnnnnnnnnnnnnnnnnnnnnnnnnnnnnnnnnnnnnnnnnnnnnnnnnnnnnnnnnnnnnnnnnnnnnnnnnnnnnnnnnnnnnnnnnnnnnnnnnnnnnnnnnnnnnnnnnnnnnnnnnnnnnnnnnnnnnnnnnnnnnnnnnntgatctcctgacctcatgatccggcccgcctcggcctcccaaagtgctgagattactggcgtgagccaccgcgcctggcctcaaatacagtttctataaatatatttcactggaacacagacatgctcatttgtttaatgtatggtctctgctttcacactgcaagggcagaggttgttgcagagttacatcattgcgaaagagatccgaggggccccaaagcttaaaatagtccctatctagttcttcaccgaaaaggtttgctgatctctgctctagagagacacccacgagtaaaactgcctggtatcagatg

SEQ ID NO: 764 - DNA, 5953 bp, Homo sapiens
cagaggcgcccaggacaccacgaggttgggagaggagtgtgctttgcactctgcactctccagctcagagtagctgaggatgctagggagactgggggctggcccacggggggagcagaggagtcctcagtgcggtcctcactctgaaaacagcatttttccctaggcttgagaatgcctccgggattggactgatccaggctggacccacgtctgtctggtgataccaggggcagagggaccactctgacagataaggagtcaggccagggcgggatgacactcattgattctaaagcatctttaatctgccaggcggagggggctttgctggtctttcttggactattccagagaggacaactgtcatctgggaagtaacaacgcaggatgccccctggggtggactgccccatggaattctggaccaaggaggagaatcagagcgttgtggttgacttcctgctgcccacaggggtctacctgaacttccctgtgtcccgcaatgccaacctcagcaccatcaagcagctgctgtggcaccgcgcccagtatgagccgctcttccacatgctcagtggccccgaggcctatgtgttcacctgcatcaaccagacagcggagcagcaagagctggaggacgagcaacggcgtctgtgtgacgtgcagcccttcctgcccgtcctgcgcctggtggcccgtgagggcgaccgcgtgaagaagctcatcaactcacagatcagcctcctcatcggcaaaggcctccacgagtttgactccttgtgcgacccagaagtgaacgactttcgcgccaagatgtgccaattctgcgaggaggcggccgcccgccggcagcagctgggctgggaggcctggctgcagtacagtttccccctgcagctggagccctcggctcaaacctgggggcctggtaccctgcggctcccgaaccgggcccttctggtcaacgttaagtttgagggcagcgaggagagcttcaccttccaggtgtccaccaaggacgtgccgctggcgctgatggcctgtgccctgcggaagaaggccacagtgttccggcagccgctggtggagcagccggaagactacacgctgcaggtgaacggcaggcatgagtacctgtatggcagctacccgctctgccagttccagtacatctgcagctgcctgcacagtgggttgacccctcacctgaccatggtccattcctcctccatcctcgccatgcgggatgagcagagcaaccctgccccccaggtccagaaaccgcgtgccaaaccacctcccattcctgcgaagaagccttcctctgtgtccctgtggtccctggagcagccgttccgcatcgagctcatccagggcagcaaagtgaacgccgacgagcggatgaagctggtggtgcaggccgggcttttccacggcaacgagatgctgtgcaagacggtgtccagctcggaggtgagcgtgtgctcggagcccgtgtggaagcagcggctggagttcgacatcaacatctgcgacctgccccgcatggcccgtctctgctttgcgctgtacgccgtgatcgagaaagccaagaaggctcgctccaccaagaagaagtccaagaaggcggactgccccattgcctgggccaacctcatgctgtttgactacaaggaccagcttaagaccggggaacgctgcctctacatgtggccctccgtcccagatgagaagggcgagctgctgaaccccacgggcactgtgcgcagtaaccccaacacggatagcgccgctgccctgctcatctgcctgcccgaggtggccccgcaccccgtgtactaccccgccctggagaagatcttggagctggggcgacacagcgagtgtgtgcatgtcaccgaggaggagcagctgcagctgcgggaaatacctggagcggcgggggtgctggggagctgtatgagcacgagaaggacctggtgtggaagctgcggcatgaagtccaggagcacttcccggaggcgctagcccggctgctgctggtcaccaagtggaacaacctgacctcggctccccccagatgctctacctgctgtgctcctggccggagctgcccgtcctgagcgccctggagctgctagacttcagcttccccgattgccacgtaggctccttcgccatcaagtcgctgcggaaactgacggacgatgagctgttccagtacctgctgcagctggtgcaggtgctcaagtacgagtcctacctggactgcgagctgaccaaattcctgctggaccgggccctggccaaccgcaagatcggccacttccttttctggcacctccgctccgagatgcacgtgccgtcggtggccctgcgcttcggcctcatcctggaggcctactgcaggggcagcacccaccacatgaaggtgctgatgaagcagggggaagcactgagcaaactgaaggccctgaatgacttcgtcaagctgagctctcagaagacccccaagccccagaccaaggagctgatgcacttgtgcatgcggcaggaggcctacctagaggccctctcccacctgcagtccccactcgaccccagcaccctgctggctgaagtctgcgtggagcagtgcaccttcatggactccaagatgaagcccctgtggatcatgtacagcaacgaggaggcaggcagcggcggcagcgtgggcatcatctttaagaacggggatgacctccggcaggacatgctgaccctgcagatgatccagctcatggacgtcctgtggaagcaggaggggctggacctgaggatgaccccctatggctgcctccccaccggggaccgcacaggcctcattgaggtggtactccgttcagacaccatcgccaacatccaactcaacaagagcaacatggcagccacagccgccttcaacaaggatgccctgctcaactggctgaagtccaagaacccgggggaggccctggatcgagccattgaggagttcaccctctcctgtgctggctattgtgtggccacatatgtgctgggcattggcgatcggcacagcgacaacatcatgatccgagagagtgggcagctgttccacattgattttggccactttctggggaatttcaagaccaagtttggaatcaaccgcgagcgtgtcccattcatcctcacctacgactttgtccatgtgattcagcaggggaagactaataatagtgagaaatttgaacggttccggggctactgtgaaagggcctacaccatcctgcggcgccacgggcttctcttcctccacctctttgccctgatgcgggcggcaggcctgcctgagctcagctgctccaaagacatccagtatctcaaggactccctggcactggggaaaacagaggaggaggcactgaagcacttccgagtgaagtttaacgaagccctccgtgagagctggaaaaccaaagtgaactggctggcccacaacgtgtccaaagacaacaggcagtagtggctcctcccagccctgggcccaagaggaggcggctgcgggtcgtggggaccaagcacattggtcctaaaggggctgaagagcctgaactgcacctaacgggaaagaaccgacatggctgccttttgtttacactggttatttatttatgacttgaaatagtttaaggagctaaacagccataaacggaaacgcctccttcatgcagcggcggtgctgggccccccgaggctgcacctggctctcggctgaggattgtcaccccaagtcttccagctggtggatctgggcccagcaaagactgttctcctcccgagggaaccttcttcccaggcctcccgccagactgcctgggtcctggcgcctggcggtcacctggtgcctactgtccgacaggatgcctcgatcctcgtgcgacccaccctgtgtatcctccctagactgagttctggcagctccccgaggcagccggggtaccctctagattcagggatgcttgctctccacttttcaagtgggtcttgggtacgagaattccctcatctttctctactgtaaagtgattttgtttgcaggtaagaaaataatagatgactcaccacacctctacggctggggagatcaggcccagccccataaaggagaatctacgctggtcctcaggacgtgttaaagagatctgggcctcatgtagctcaccccggtcacgcatgaaggcaaaagcaggtcagaagctaatactctgccattatctcaaaaatcttttttttttttttgagatggggtcttcctctgttgcccaggctggagtgcagtggtgcaatcttggctcactgtaacctccgcctcccaggttcaagtgattcttctgcctcagcctcctgagtagctgggattacaggtgtgcaccaccgtacccagctaatttttgtattttagtagagacgggggtttcaccatgttggctgggctggtctcgaactcctgacctcaggtgatccacccgcctgagcctcccaaagtgctgggattacaggcatgagccaccgcgcccggcccactctgccattgtctaagccacctctgaaagcaggttttaacaaaaggatgaggccagaactcttccagaaccatcacctttgggaacctgctgtgagagtgctgaggtaccagaagtgtgagaacgagggggcgtgctgggatctttctctctgactatacttagtttgaaatggtgcaggcttagtcttaagcctccaaaggcctggatttgagcagctttagaaatgcaggttctagggcttctcccagccttcagaagccaactaactctgcagatggggctaggactgtgggcttttagcagcccacaggtgatcctaacatatcaggccatggactcaggacctgcccggtgatgctgttgatttctcaaaggtcttccaaaactcaacagagccagaagtagccgcccgctcagcggctcaggtgccagctctgttctgattcaccaggggtccgtcagtagtcattgccacccgcggggcacctccctggccacacgcctgttcccagcaagtgctgaaactcactagaccgtctgcctgtttcgaaatggggaaagccgtgcgtgcgcgttatttatttaagtgcgcctgtgtgcgcgggtgtgggagcacactttgcaaagccacagcgtttctggttttgggtgtacagtcttgtgtgcctggcgagaagaatattttctatttttttaagtcatttcatgtttctgtctggggaaggcaagttagttaagtatcactgatgtgggttgagaccagcactctgtgaaaccttgaaatgagaagtaaaggcagatgaaaagaaagaaaaagcctttttatgttcttttatgttctcggctcaaaaagaaacaagggagtgtaggtttaaaaccaaaacaggagagaagacaaaccccgctccggctggagttagttagaaccagaactttattgtagcggatacactttctgacctatcatgagtatacacatctgcgaagggaaaccgcgcggcgacagcgtgaggacatcccctgggcgtgagcgtctgtccgctgtctaaacagagcagctacagggacgggacatggaggatggccacacatagcacagccaccagtgtcctcagaactagcagtcagggtcacagaacagtattcaaaatgattgcccacctgttttagaaatctaaaattttacatgtaactaagagcaaagtgctatgtgggttttagaccatgactgtttgtttgctctcctgccctaccaccaagcaaagcagcagggctcctgggggagagggatttcaacccccctgatggcagggggggtgcaggtgggcttaatgctgatcttcaccaaaacatcttctgtg

SEQ ID NO: 765 - protein, 544 aa, Homo sapiens
MPPGVDCPMEFWTKEENQSVVVDFLLPTGVYLNFPVSRNANLSTIKQLLWHRAQYEPLFHMLSGPEAYVFTCINQTAEQQELEDEQRRLCDVQPFLPVLRLVAREGDRVKKLINSQISLLIGKGLHEFDSLCDPEVNDFRAKMCQFCEEAAARRQQLGWEAWLQYSFPLQLEPSAQTWGPGTLRLPNRALLVNVKFEGSEESFTFQVSTKDVPLALMACALRKKATVFRQPLVEQPEDYTLQVNGRHEYLYGSYPLCQFQYICSCLHSGLTPHLTMVHSSSILAMRDEQSNPAPQVQKPRAKPPPIPAKKPSSVSLWSLEQPFRIELIQGSKVNADERMKLVVQAGLFHGNEMLCKTVSSSEVSVCSEPVWKQRLEFDINICDLPRMARLCFALYAVIEKAKKARSTKKKSKKADCPIAWANLMLFDYKDQLKTGERCLYMWPSVPDEKGELLNPTGTVRSNPNTDSAAALLICLPEVAPHPVYYPALEKILGRHSECVHVTEEEQLQLREIPGAAGVLGSCMSTRRTWCGSCGMKSRSTSRRR

SEQ ID NO: 766 - DNA, 6780 bp, Homo sapiens
cagaggcgcccaggacaccacgaggttgggagaggagtgtgctttgcactctgcactctccagctcagagtagctgaggatgctagggagactgggggctggcccacggggggagcagaggagtcctcagtgcggtcctcactctgaaaacagcatttttccctaggcttgagaatgcctccgggattggactgatccaggctggacccacgtctgtctggtgataccaggggcagagggaccactctgacagataaggagtcaggccagggcgggatgacactcattgattctaaagcatctttaatctgccaggcggagggggctttgctggtctttcttggactattccagagaggacaactgtcatctgggaagtaacaacgcaggatgccccctggggtggactgccccatggaattctggaccaaggaggagaatcagagcgttgtggttgacttcctgctgcccacaggggtctacctgaacttccctgtgtcccgcaatgccaacctcagcaccatcaagcagctgctgtggcaccgcgcccagtatgagccgctcttccacatgctcagtggccccgaggcctatgtgttcacctgcatcaaccagacagcggagcagcaagagctggaggacgagcaacggcgtctgtgtgacgtgcagcccttcctgcccgtcctgcgcctggtggcccgtgagggcgaccgcgtgaagaagctcatcaactcacagatcagcctcctcatcggcaaaggcctccacgagtttgactccttgtgcgacccagaagtgaacgactttcgcgccaagatgtgccaattctgcgaggaggcggccgcccgccggcagcagctgggctgggaggcctggctgcagtacagtttccccctgcagctggagccctcggctcaaacctgggggcctggtaccctgcggctcccgaaccgggcccttctggtcaacgttaagtttgagggcagcgaggagagcttcaccttccaggtgtccaccaaggacgtgccgctggcgctgatggcctgtgccctgcggaagaaggccacagtgttccggcagccgctggtggagcagccggaagactacacgctgcaggtgaacggcaggcatgagtacctgtatggcagctacccgctctgccagttccagtacatctgcagctgcctgcacagtgggttgacccctcacctgaccatggtccattcctcctccatcctcgccatgcgggatgagcagagcaaccctgccccccaggtccagaaaccgcgtgccaaaccacctcccattcctgcgaagaagccttcctctgtgtccctgtggtccctggagcagccgttccgcatcgagctcatccagggcagcaaagtgaacgccgacgagcggatgaagctggtggtgcaggccgggcttttccacggcaacgagatgctgtgcaagacggtgtccagctcggaggtgagcgtgtgctcggagcccgtgtggaagcagcggctggagttcgacatcaacatctgcgacctgccccgcatggcccgtctctgctttgcgctgtacgccgtgatcgagaaagccaagaaggctcgctccaccaagaagaagtccaagaaggcggactgccccattgcctgggccaacctcatgctgtttgactacaaggaccagcttaagaccggggaacgctgcctctacatgtggccctccgtcccagatgagaagggcgagctgctgaaccccacgggcactgtgcgcagtaaccccaacacggatagcgccgctgccctgctcatctgcctgcccgaggtggccccgcaccccgtgtactaccccgccctggagaagatcttggagctggggcgacacagcgagtgtgtgcatgtcaccgaggaggagcagctgcagctgcgggaaatacctggagcggcgggggtgctggggagctgtatgagcacgagaaggacctggtgtggaagctgcggcatgaagtccaggagcacttcccggaggcgctagcccggctgctgctggtcaccaagtggaacaagtcatgaggatgtggcccaatgctctacctgctgtgctcctggccggagctgcccgtcctgagcgccctggagctgctagacttcagcttccccgattgccacgtaggctccttcgccatcaagtcgctgcggaaactgacggacgatgagctgttccagtacctgctgcagctggtgcaggtgctcaagtacgagtcctacctggactgcgagctgaccaaattcctgctggaccgggccctggccaaccgcaagatcggccacttccttttctggcacctccgctccgagatgcacgtgccgtcggtggccctgcgcttcggcctcatcctggaggcctactgcaggggcagcacccaccacatgaaggtgctgatgaagcagggggaagcactgagcaaactgaaggccctgaatgacttcgtcaagctgagctctcagaagacccccaagccccagaccaaggagctgatgcacttgtgcatgcggcaggaggcctacctagaggccctctcccacctgcagtccccactcgaccccagcaccctgctggctgaagtctgcgtggagcagtgcaccttcatggactccaagatgaagcccctgtggatcatgtacagcaacgaggaggcaggcagcggcggcagcgtgggcatcatctttaagaacggggatgacctccggcaggacatgctgaccctgcagatgatccagctcatggacgtcctgtggaagcaggaggggctggacctgaggatgaccccctatggctgcctccccaccggggaccgcacaggcctcattgaggtggtactccgttcagacaccatcgccaacatccaactcaacaagagcaacatggcagccacagccgccttcaacaaggatgccctgctcaactggctgaagtccaagaacccgggggaggccctggatcgagccattgaggagttcaccctctcctgtgctggctattgtgtggccacatatgtgctgggcattggcgatcggcacagcgacaacatcatgatccgagagagtgggcagctgttccacattgattttggccactttctggggaatttcaagaccaagtttggaatcaaccgcgagcgtgtcccattcatcctcacctacgactttgtccatgtgattcagcaggggaagactaataatagtgagaaatttgaacggttccggggctactgtgaaagggcctacaccatcctgcggcgccacgggcttctcttcctccacctctttgccctgatgcgggcggcaggcctgcctgagctcagctgctccaaagacatccagtatctcaaggactccctggcactggggaaaacagaggaggaggcactgaagcacttccgagtgaagtttaacgaagccctccgtgagagctggaaaaccaaagtgaactggctggcccacaacgtgtccaaagacaacaggcagtagtggctcctcccagccctgggcccaagaggaggcggctgcgggtcgtggggaccaagcacattggtcctaaaggggctgaagagcctgaactgcacctaacgggaaagaaccgacatggctgccttttgtttacactggttatttatttatgacttgaaatagtttaaggagctaaacagccataaacggaaacgcctccttcatgcagcggcggtgctgggccccccgaggctgcacctggctctcggctgaggattgtcaccccaagtcttccagctggtggatctgggcccagcaaagactgttctcctcccgagggaaccttcttcccaggcctcccgccagactgcctgggtcctggcgcctggcggtcacctggtgcctactgtccgacaggatgcctcgatcctcgtgcgacccaccctgtgtatcctccctagactgagttctggcagctccccgaggcagccggggtaccctctagattcagggatgcttgctctccacttttcaagtgggtcttgggtacgagaattccctcatctttctctactgtaaagtgattttgtttgcaggtaagaaaataatagatgactcaccacacctctacggctggggagatcaggcccagccccataaaggagaatctacgctggtcctcaggacgtgttaaagagatctgggcctcatgtagctcaccccggtcacgcatgaaggcaaaagcaggtcagaagctaatactctgccattatctcaaaaatcttttttttttttttgagatggggtcttcctctgttgcccaggctggagtgcagtggtgcaatcttggctcactgtaacctccgcctcccaggttcaagtgattcttctgcctcagcctcctgagtagctgggattacaggtgtgcaccaccgtacccagctaatttttgtattttagtagagacgggggtttcaccatgttggctgggctggtctcgaactcctgacctcaggtgatccacccgcctgagcctcccaaagtgctgggattacaggcatgagccaccgcgcccggcccactctgccattgtctaagccacctctgaaagcaggttttaacaaaaggatgaggccagaactcttccagaaccatcacctttgggaacctgctgtgagagtgctgaggtaccagaagtgtgagaacgagggggcgtgctgggatctttctctctgactatacttagtttgaaatggtgcaggcttagtcttaagcctccaaaggcctggatttgagcagctttagaaatgcaggttctagggcttctcccagccttcagaagccaactaactctgcagatggggctaggactgtgggcttttagcagcccacaggtgatcctaacatatcaggccatggactcaggacctgcccggtgatgctgttgatttctcaaaggtcttccaaaactcaacagagccagaagtagccgcccgctcagcggctcaggtgccagctctgttctgattcaccaggggtccgtcagtagtcattgccacccgcggggcacctccctggccacacgcctgttcccagcaagtgctgaaactcactagaccgtctgcctgtttcgaaatggggaaagccgtgcgtgcgcgttatttatttaagtgcgcctgtgtgcgcgggtgtgggagcacactttgcaaagccacagcgtttctggttttgggtgtacagtcttgtgtgcctggcgagaagaatattttctatttttttaagtcatttcatgtttctgtctggggaaggcaagttagttaagtatcactgatgtgggttgagaccagcactctgtgaaaccttgaaatgagaagtaaaggcagatgaaaagaaagaaaaagcctttttatgttcttttatgttctcggctcaaaaagaaacaagggagtgtaggtttaaaaccaaaacaggagagaagacaaaccccgctccggctggagttagttagaaccagaactttattgtagcggatacactttctgacctatcatgagtatacacatctgcgaagggaaaccgcgcggcgacagcgtgaggacatcccctgggcgtgagcgtctgtccgctgtctaaacagagcagctacagggacgggacatggaggatggccacacatagcacagccaccagtgtcctcagaactagcagtcagggtcacagaacagtattcaaaatgattgcccacctgttttagaaatctaaaattttacatgtaactaagagcaaagtgctatgtgggttttagaccatgactgtttgtttgctctcctgccctaccaccaagcaaagcagcagggctcctgggggagagggatttcaacccccctgatggcagggggtgctctggggaggagagaggagagaacaggctgttttggaaaattccagcactttgacttcgggccatgcgtctctcctggacgttctgagtacggatcgctcaggcctcctgccgtctccaaaaggagtggtcagccggtctgcaggacacctctcagtttctccttttaccagcaggaaaatgtacatttaagcataaaccacaaggctgcacacggtgagaccaggccactgcccagggagctgctgtcggaggaggagtgtggaaaaggggccagggaccccgcaccccacaccaaattaggaacaggtagaatcccaaaggcaaggcccggccacttgtagctaccctgatccagtctcttgagcagcacagctagaggcctgtggcccccgactcccagccatactcagacctgagcaggggctggggcggggctgggcggggtgggcctctccctctggggtctggggagggaggacccggcgggaagagcccgtgctcagagctccgaacttcactttacattccagtcccgggttacactagcacaaaggacacaaggaatccgatttatttacaaaatattaaaaagtcagttaatcatctacacagtaccccccatcctgccattatttatacatgcactagtttggaaaaaataaaaactttttttaaaaaaagaaaaaaatgattaccgggtgggagtgagcatgttttaccctttgtcaacgagcccagctggcatggcttttctggagtgcgaggggccagtgtcctctccccggggggagactccagacacaaacgcggggcctgaggcgctgggaggcccctgtgcgagccggatggcggccagagaggacgtgtcag

SEQ ID NO: 767 - protein, 544 aa, Homo sapiens; identical to SEQ ID NO: 765

SEQ ID NO: 768 - DNA, 6025 bp, Homo sapiens
cagaggcgcccaggacaccacgaggttgggagaggagtgtgctttgcactctgcactctccagctcagagtagctgaggatgctagggagactgggggctggcccacggggggagcagaggagtcctcagtgcggtcctcactctgaaaacagcatttttccctaggcttgagaatgcctccgggattggactgatccaggctggacccacgtctgtctggtgataccaggggcagagggaccactctgacagataaggagtcaggccagggcgggatgacactcattgattctaaagcatctttaatctgccaggcggagggggctttgctggtctttcttggactattccagagaggacaactgtcatctgggaagtaacaacgcaggatgccccctggggtggactgccccatggaattctggaccaaggaggagaatcagagcgttgtggttgacttcctgctgcccacaggggtctacctgaacttccctgtgtcccgcaatgccaacctcagcaccatcaagcagctgctgtggcaccgcgcccagtatgagccgctcttccacatgctcagtggccccgaggcctatgtgttcacctgcatcaaccagacagcggagcagcaagagctggaggacgagcaacggcgtctgtgtgacgtgcagcccttcctgcccgtcctgcgcctggtggcccgtgagggcgaccgcgtgaagaagctcatcaactcacagatcagcctcctcatcggcaaaggcctccacgagtttgactccttgtgcgacccagaagtgaacgactttcgcgccaagatgtgccaattctgcgaggaggcggccgcccgccggcagcagctgggctgggaggcctggctgcagtacagtttccccctgcagctggagccctcggctcaaacctgggggcctggtaccctgcggctcccgaaccgggcccttctggtcaacgttaagtttgagggcagcgaggagagcttcaccttccaggtgtccaccaaggacgtgccgctggcgctgatggcctgtgccctgcggaagaaggccacagtgttccggcagccgctggtggagcagccggaagactacacgctgcaggtgaacggcaggcatgagtacctgtatggcagctacccgctctgccagttccaggtccagaaaccgcgtgccaaaccacctcccattcctgcgaagaagccttcctctgtgtccctgtggtccctggagcagccgttccgcatcgagctcatccagggcagcaaagtgaacgccgacgagcggatgaagctggtggtgcaggccgggcttttccacggcaacgagatgctgtgcaagacggtgtccagctcggaggtgagcgtgtgctcggagcccgtgtggaagcagcggctggagttcgacatcaacatctgcgacctgccccgcatggcccgtctctgctttgcgctgtacgccgtgatcgagaaagccaagaaggctcgctccaccaagaagaagtccaagaaggcggactgccccattgcctgggccaacctcatgctgtttgactacaaggaccagcttaagaccggggaacgctgcctctacatgtggccctccgtcccagatgagaagggcgagctgctgaaccccacgggcactgtgcgcagtaaccccaacacggatagcgccgctgccctgctcatctgcctgcccgaggtggccccgcaccccgtgtactaccccgccctggagaagctgccaggagggatgctcttggcatctcgtgagtggaggccagagctgctgtggatgcgcctccatgcagaggacagcgccccctcaaggatgattggggtggcaatgcccggcctgggggtcctgcccgggctggtccaggcccctggggacgctgagtgcagccgtttgttgcagatcttggagctggggcgacacagcgagtgtgtgcatgtcaccgaggaggagcagctgcagctgcgggaaatacctggagcggcgggggtgctggggagctgtatgagcacgagaaggacctggtgtggaagctgcggcatgaagtccaggagcacttcccggaggcgctagcccggctgctgctggtcaccaagtggaacaacctgacctcggctccccccagatgctctacctgctgtgctcctggccggagctgcccgtcctgagcgccctggagctgctagacttcagcttccccgattgccacgtaggctccttcgccatcaagtcgctgcggaaactgacggacgatgagctgttccagtacctgctgcagctggtgcaggtgctcaagtacgagtcctacctggactgcgagctgaccaaattcctgctggaccgggccctggccaaccgcaagatcggccacttccttttctggcacctccgctccgagatgcacgtgccgtcggtggccctgcgcttcggcctcatcctggaggcctactgcaggggcagcacccaccacatgaaggtgctgatgaagcagggggaagcactgagcaaactgaaggccctgaatgacttcgtcaagctgagctctcagaagacccccaagccccagaccaaggagctgatgcacttgtgcatgcggcaggaggcctacctagaggccctctcccacctgcagtccccactcgaccccagcaccctgctggctgaagtctgcgtggagcagtgcaccttcatggactccaagatgaagcccctgtggatcatgtacagcaacgaggaggcaggcagcggcggcagcgtgggcatcatctttaagaacggggatgacctccggcaggacatgctgaccctgcagatgatccagctcatggacgtcctgtggaagcaggaggggctggacctgaggatgaccccctatggctgcctccccaccggggaccgcacaggcctcattgaggtggtactccgttcagacaccatcgccaacatccaactcaacaagagcaacatggcagccacagccgccttcaacaaggatgccctgctcaactggctgaagtccaagaacccgggggaggccctggatcgagccattgaggagttcaccctctcctgtgctggctattgtgtggccacatatgtgctgggcattggcgatcggcacagcgacaacatcatgatccgagagagtgggcagctgttccacattgattttggccactttctggggaatttcaagaccaagtttggaatcaaccgcgagcgtgtcccattcatcctcacctacgactttgtccatgtgattcagcaggggaagactaataatagtgagaaatttgaacggttccggggctactgtgaaagggcctacaccatcctgcggcgccacgggcttctcttcctccacctctttgccctgatgcgggcggcaggcctgcctgagctcagctgctccaaagacatccagtatctcaaggactccctggcactggggaaaacagaggaggaggcactgaagcacttccgagtgaagtttaacgaagccctccgtgagagctggaaaaccaaagtgaactggctggcccacaacgtgtccaaagacaacaggcagtagtggctcctcccagccctgggcccaagaggaggcggctgcgggtcgtggggaccaagcacattggtcctaaaggggctgaagagcctgaactgcacctaacgggaaagaaccgacatggctgccttttgtttacactggttatttatttatgacttgaaatagtttaaggagctaaacagccataaacggaaacgcctccttcatgcagcggcggtgctgggccccccgaggctgcacctggctctcggctgaggattgtcaccccaagtcttccagctggtggatctgggcccagcaaagactgttctcctcccgagggaaccttcttcccaggcctcccgccagactgcctgggtcctggcgcctggcggtcacctggtgcctactgtccgacaggatgcctcgatcctcgtgcgacccaccctgtgtatcctccctagactgagttctggcagctccccgaggcagccggggtaccctctagattcagggatgcttgctctccacttttcaagtgggtcttgggtacgagaattccctcatctttctctactgtaaagtgattttgtttgcaggtaagaaaataatagatgactcaccacacctctacggctggggagatcaggcccagccccataaaggagaatctacgctggtcctcaggacgtgttaaagagatctgggcctcatgtagctcaccccggtcacgcatgaaggcaaaagcaggtcagaagctaatactctgccattatctcaaaaatcttttttttttttttgagatggggtcttcctctgttgcccaggctggagtgcagtggtgcaatcttggctcactgtaacctccgcctcccaggttcaagtgattcttctgcctcagcctcctgagtagctgggattacaggtgtgcaccaccgtacccagctaatttttgtattttagtagagacgggggtttcaccatgttggctgggctggtctcgaactcctgacctcaggtgatccacccgcctgagcctcccaaagtgctgggattacaggcatgagccaccgcgcccggcccactctgccattgtctaagccacctctgaaagcaggttttaacaaaaggatgaggccagaactcttccagaaccatcacctttgggaacctgctgtgagagtgctgaggtaccagaagtgtgagaacgagggggcgtgctgggatctttctctctgactatacttagtttgaaatggtgcaggcttagtcttaagcctccaaaggcctggatttgagcagctttagaaatgcaggttctagggcttctcccagccttcagaagccaactaactctgcagatggggctaggactgtgggcttttagcagcccacaggtgatcctaacatatcaggccatggactcaggacctgcccggtgatgctgttgatttctcaaaggtcttccaaaactcaacagagccagaagtagccgcccgctcagcggctcaggtgccagctctgttctgattcaccaggggtccgtcagtagtcattgccacccgcggggcacctccctggccacacgcctgttcccagcaagtgctgaaactcactagaccgtctgcctgtttcgaaatggggaaagccgtgcgtgcgcgttatttatttaagtgcgcctgtgtgcgcgggtgtgggagcacactttgcaaagccacagcgtttctggttttgggtgtacagtcttgtgtgcctggcgagaagaatattttctatttttttaagtcatttcatgtttctgtctggggaaggcaagttagttaagtatcactgatgtgggttgagaccagcactctgtgaaaccttgaaatgagaagtaaaggcagatgaaaagaaagaaaaagcctttttatgttcttttatgttctcggctcaaaaagaaacaagggagtgtaggtttaaaaccaaaacaggagagaagacaaaccccgctccggctggagttagttagaaccagaactttattgtagcggatacactttctgacctatcatgagtatacacatctgcgaagggaaaccgcgcggcgacagcgtgaggacatcccctgggcgtgagcgtctgtccgctgtctaaacagagcagctacagggacgggacatggaggatggccacacatagcacagccaccagtgtcctcagaactagcagtcagggtcacagaacagtattcaaaatgattgcccacctgttttagaaatctaaaattttacatgtaactaagagcaaagtgctatgtgggttttagaccatgactgtttgtttgctctcctgccctaccaccaagcaaagcagcagggctcctgggggagagggatttcaacccccctgatggcagggggggtgcaggtgggcttaatgctgatcttcaccaaaacatcttctgtg

SEQ ID NO: 769 - protein, 568 aa, Homo sapiens
MPPGVDCPMEFWTKEENQSVVVDFLLPTGVYLNFPVSRNANLSTIKQLLWHRAQYEPLFHMLSGPEAYVFTCINQTAEQQELEDEQRRLCDVQPFLPVLRLVAREGDRVKKLINSQISLLIGKGLHEFDSLCDPEVNDFRAKMCQFCEEAAARRQQLGWEAWLQYSFPLQLEPSAQTWGPGTLRLPNRALLVNVKFEGSEESFTFQVSTKDVPLALMACALRKKATVFRQPLVEQPEDYTLQVNGRHEYLYGSYPLCQFQVQKPRAKPPPIPAKKPSSVSLWSLEQPFRIELIQGSKVNADERMKLVVQAGLFHGNEMLCKTVSSSEVSVCSEPVWKQRLEFDINICDLPRMARLCFALYAVIEKAKKARSTKKKSKKADCPIAWANLMLFDYKDQLKTGERCLYMWPSVPDEKGELLNPTGTVRSNPNTDSAAALLICLPEVAPHPVYYPALEKLPGGMLLASREWRPELLWMRLHAEDSAPSRMIGVAMPGLGVLPGLVQAPGDAECSRLLQILGRHSECVHVTEEEQLQLREIPGAAGVLGSCMSTRRTWCGSCGMKSRSTSRRR

SEQ ID NO: 770 - DNA, 6527 bp, Homo sapiens
ataaggagtcaggccagggcgggatgacactcattgattctaaagcatctttaatctgccaggcggagggggctttgctggtctttcttggactattccagagaggacaactgtcatctgggaagtaacaacgcaggatgccccctggggtggactgccccatggaattctggaccaaggaggagaatcagagcgttgtggttgacttcctgctgcccacaggggtctacctgaacttccctgtgtcccgcaatgccaacctcagcaccatcaagcagctgctgtggcaccgcgcccagtatgagccgctcttccacatgctcagtggccccgaggcctatgtgttcacctgcatcaaccagacagcggagcagcaagagctggaggacgagcaacggcgtctgtgtgacgtgcagcccttcctgcccgtcctgcgcctggtggcccgtgagggcgaccgcgtgaagaagctcatcaactcacagatcagcctcctcatcggcaaaggcctccacgagtttgactccttgtgcgacccagaagtgaacgactttcgcgccaagatgtgccaattctgcgaggaggcggccgcccgccggcagcagctgggctgggaggcctggctgcagtacagtttccccctgcagctggagccctcggctcaaacctgggggcctggtaccctgcggctcccgaaccgggcccttctggtcaacgttaagtttgagggcagcgaggagagcttcaccttccaggtgtccaccaaggacgtgccgctggcgctgatggcctgtgccctgcggaagaaggccacagtgttccggcagccgctggtggagcagccggaagactacacgctgcaggtgaacggcaggcatgagtacctgtatggcagctacccgctctgccagttccagtacatctgcagctgcctgcacagtgggttgacccctcacctgaccatggtccattcctcctccatcctcgccatgcgggatgagcagagcaaccctgccccccaggtccagaaaccgcgtgccaaaccacctcccattcctgcgaagaagccttcctctgtgtccctgtggtccctggagcagccgttccgcatcgagctcatccagggcagcaaagtgaacgccgacgagcggatgaagctggtggtgcaggccgggcttttccacggcaacgagatgctgtgcaagacggtgtccagctcggaggtgagcgtgtgctcggagcccgtgtggaagcagcggctggagttcgacatcaacatctgcgacctgccccgcatggcccgtctctgctttgcgctgtacgccgtgatcgagaaagccaagaaggctcgctccaccaagaagaagtccaagaaggcggactgccccattgcctgggccaacctcatgctgtttgactacaaggaccagcttaagaccggggaacgctgcctctacatgtggccctccgtcccagatgagaagggcgagctgctgaaccccacgggcactgtgcgcagtaaccccaacacggatagcgccgctgccctgctcatctgcctgcccgaggtggccccgcaccccgtgtactaccccgccctggagaagatcttggagctggggcgacacagcgagtgtgtgcatgtcaccgaggaggagcagctgcagctgcgggaaatacctggagcggcgggggtgctggggagctgtatgagcacgagaaggacctggtgtggaagctgcggcatgaagtccaggagcacttcccggaggcgctagcccggctgctgctggtcaccaagtggaacaagtcatgaggatgtggcccaatgctctacctgctgtgctcctggccggagctgcccgtcctgagcgccctggagctgctagacttcagcttccccgattgccacgtaggctccttcgccatcaagtcgctgcggaaactgacggacgatgagctgttccagtacctgctgcagctggtgcaggtgctcaagtacgagtcctacctggactgcgagctgaccaaattcctgctggaccgggccctggccaaccgcaagatcggccacttccttttctggcacctccgctccgagatgcacgtgccgtcggtggccctgcgcttcggcctcatcctggaggcctactgcaggggcagcacccaccacatgaaggtgctgatgaagcagggggaagcactgagcaaactgaaggccctgaatgacttcgtcaagctgagctctcagaagacccccaagccccagaccaaggagctgatgcacttgtgcatgcggcaggaggcctacctagaggccctctcccacctgcagtccccactcgaccccagcaccctgctggctgaagtctgcgtggagcagtgcaccttcatggactccaagatgaagcccctgtggatcatgtacagcaacgaggaggcaggcagcggcggcagcgtgggcatcatctttaagaacggggatgacctccggcaggacatgctgaccctgcagatgatccagctcatggacgtcctgtggaagcaggaggggctggacctgaggatgaccccctatggctgcctccccaccggggaccgcacaggcctcattgaggtggtactccgttcagacaccatcgccaacatccaactcaacaagagcaacatggcagccacagccgccttcaacaaggatgccctgctcaactggctgaagtccaagaacccgggggaggccctggatcgagccattgaggagttcaccctctcctgtgctggctattgtgtggccacatatgtgctgggcattggcgatcggcacagcgacaacatcatgatccgagagagtgggcagctgttccacattgattttggccactttctggggaatttcaagaccaagtttggaatcaaccgcgagcgtgtcccattcatcctcacctacgactttgtccatgtgattcagcaggggaagactaataatagtgagaaatttgaacggttccggggctactgtgaaagggcctacaccatcctgcggcgccacgggcttctcttcctccacctctttgccctgatgcgggcggcaggcctgcctgagctcagctgctccaaagacatccagtatctcaaggactccctggcactggggaaaacagaggaggaggcactgaagcacttccgagtgaagtttaacgaagccctccgtgagagctggaaaaccaaagtgaactggctggcccacaacgtgtccaaagacaacaggcagtagtggctcctcccagccctgggcccaagaggaggcggctgcgggtcgtggggaccaagcacattggtcctaaaggggctgaagagcctgaactgcacctaacgggaaagaaccgacatggctgccttttgtttacactggttatttatttatgacttgaaatagtttaaggagctaaacagccataaacggaaacgcctccttcatgcagcggcggtgctgggccccccgaggctgcacctggctctcggctgaggattgtcaccccaagtcttccagctggtggatctgggcccagcaaagactgttctcctcccgagggaaccttcttcccaggcctcccgccagactgcctgggtcctggcgcctggcggtcacctggtgcctactgtccgacaggatgcctcgatcctcgtgcgacccaccctgtgtatcctccctagactgagttctggcagctccccgaggcagccggggtaccctctagattcagggatgcttgctctccacttttcaagtgggtcttgggtacgagaattccctcatctttctctactgtaaagtgattttgtttgcaggtaagaaaataatagatgactcaccacacctctacggctggggagatcaggcccagccccataaaggagaatctacgctggtcctcaggacgtgttaaagagatctgggcctcatgtagctcaccccggtcacgcatgaaggcaaaagcaggtcagaagctaatactctgccattatctcaaaaatcttttttttttttttgagatggggtcttcctctgttgcccaggctggagtgcagtggtgcaatcttggctcactgtaacctccgcctcccaggttcaagtgattcttctgcctcagcctcctgagtagctgggattacaggtgtgcaccaccgtacccagctaatttttgtattttagtagagacgggggtttcaccatgttggctgggctggtctcgaactcctgacctcaggtgatccacccgcctgagcctcccaaagtgctgggattacaggcatgagccaccgcgcccggcccactctgccattgtctaagccacctctgaaagcaggttttaacaaaaggatgaggccagaactcttccagaaccatcacctttgggaacctgctgtgagagtgctgaggtaccagaagtgtgagaacgagggggcgtgctgggatctttctctctgactatacttagtttgaaatggtgcaggcttagtcttaagcctccaaaggcctggatttgagcagctttagaaatgcaggttctagggcttctcccagccttcagaagccaactaactctgcagatggggctaggactgtgggcttttagcagcccacaggtgatcctaacatatcaggccatggactcaggacctgcccggtgatgctgttgatttctcaaaggtcttccaaaactcaacagagccagaagtagccgcccgctcagcggctcaggtgccagctctgttctgattcaccaggggtccgtcagtagtcattgccacccgcggggcacctccctggccacacgcctgttcccagcaagtgctgaaactcactagaccgtctgcctgtttcgaaatggggaaagccgtgcgtgcgcgttatttatttaagtgcgcctgtgtgcgcgggtgtgggagcacactttgcaaagccacagcgtttctggttttgggtgtacagtcttgtgtgcctggcgagaagaatattttctatttttttaagtcatttcatgtttctgtctggggaaggcaagttagttaagtatcactgatgtgggttgagaccagcactctgtgaaaccttgaaatgagaagtaaaggcagatgaaaagaaagaaaaagcctttttatgttcttttatgttctcggctcaaaaagaaacaagggagtgtaggtttaaaaccaaaacaggagagaagacaaaccccgctccggctggagttagttagaaccagaactttattgtagcggatacactttctgacctatcatgagtatacacatctgcgaagggaaaccgcgcggcgacagcgtgaggacatcccctgggcgtgagcgtctgtccgctgtctaaacagagcagctacagggacgggacatggaggatggccacacatagcacagccaccagtgtcctcagaactagcagtcagggtcacagaacagtattcaaaatgattgcccacctgttttagaaatctaaaattttacatgtaactaagagcaaagtgctatgtgggttttagaccatgactgtttgtttgctctcctgccctaccaccaagcaaagcagcagggctcctgggggagagggatttcaacccccctgatggcagggggtgctctggggaggagagaggagagaacaggctgttttggaaaattccagcactttgacttcgggccatgcgtctctcctggacgttctgagtacggatcgctcaggcctcctgccgtctccaaaaggagtggtcagccggtctgcaggacacctctcagtttctccttttaccagcaggaaaatgtacatttaagcataaaccacaaggctgcacacggtgagaccaggccactgcccagggagctgctgtcggaggaggagtgtggaaaaggggccagggaccccgcaccccacaccaaattaggaacaggtagaatcccaaaggcaaggcccggccacttgtagctaccctgatccagtctcttgagcagcacagctagaggcctgtggcccccgactcccagccatactcagacctgagcaggggctggggcggggctgggcggggtgggcctctccctctggggtctggggagggaggacccggcgggaagagcccgtgctcagagctccgaacttcactttacattccagtcccgggttacactagcacaaaggacacaaggaatccgatttatttacaaaatattaaaaagtcagttaatcatctacacagtaccccccatcctgccattatttatacatgcactagtttggaaaaaataaaaactttttttaaaaaaagaaaaaaatgattaccgggtgggagtgagcatgttttaccctttgtcaacgagcccagctggcatggcttttctggagtgcgaggggccagtgtcctctccccggggggagactccagacacaaacgcggggcctgaggcgctgggaggcccctgtgcgagccggatggcggccagagaggacgtgtcag

SEQ ID NO: 771 - protein, 544 aa, Homo sapiens; identical to SEQ ID NO: 765

SEQ ID NO: 772 - DNA, 32999 bp, Mus musculus
  misc_feature (1)...(32999): n = A,T,C or G
gcatcgaagttcggctgatctgctgtaggagaggttgactttcagagctttgttctctggcctcagcattgattaaggccccttgagcaagttaaccagcaacttcccacactgggaacgcgttcctctgccacaaattcccaaccttccctggcctcgcaggcgaggatcaaggcactctggaaagggggagggtgcttgctgcagaggagccttgggggcacttggcttctggatccattccttaattttcctaaactaagcctagtagatgctgataattagctgtgggaaccatgacctgaacctcactttcagatacagctgaccagatgggcaccacacaggctccaaatagaacccctgtttttgcttttcatttcttgacctatggctgtaattctgtcatgtttttgtctctcccttccccctatgctggataaagcagggtcccccatactcaacagtgcttggacaccaagacacccagtcccaactcatgacttttagaatctgttcagcctttaaattttgctggaggacctacagaatctgcattttgaaggttgtacacacacacacacacacacactgctgtctgagcacctgcccccgtatatctgaccttttggcttatgcccgggccagctatgcacttggcagagtcccctagcctcccatgttccctaagaagtgctcaccctgagtagtcaaggatgcagggatcaggctcatcattagataccatttcgtcttccctgtttctttggcacaaccagaagggggaaaggcaacatccttggtgcttaccctcacccagctcccacactctttgtggctctgaagccacaaggataactgaaattctgcttagtccacttagttctcaaatagaatccttagtttgccaaagctcagagagagagagagagagagagagagagagagagagagagagagagagagagagagagagaaagtccttttgaagcaccggttttatgaatctgataggatagaactaaaaaagttcgggaaaggggaagtatatctgacgggtgtttgagagcactgggaaccttgtaggcgatagacgaagagttaggacagtttctaaaaccttaggctcctatagagtgtccattcccatctgctcagcctgtgctcaggtcaggtcctcagaaatgttggctttcaggagagaggctggagaactagcggctgcctggaggcagtgacacacaccttcgttgtgatccgaggaaatcagtacagggcttgagccacctgtattgtgtctgtgatagaaaagaccagaaaaacgagaagaaatacttctgtaaagacggacttgggatgaggagaggcacagattgagtctctttcagtcccaagtatccttgggacaggtgcttagtttcttggctctgtatgggagactacaggctatgtccttagcaacaaaaagatctttctatgggtatgtgattattgtattcatactgggggctgcttttcccatacgcttgaagtgttggatccctggtccctcatcccagtatccttcttgggccctgaaaaaggcaagaggggctgggcaggaaagtagacttgaacagtatcctggagacagaggcccactgagtgaacctcatcaaccttaagtacactgtgtaccctaatgggactggacctgttgtctaggctattctgtagtgaatatactcagatggagggcctgtctatgacctgatcctgacctggccattggtcacatggaagtctacatagcctgcctcccagctctttcgggctgtcagcctctgggaaggactatttgacccttcaaagtcctcacctgggccccaagctagtccactgcaggtcaggtttggctgggcaggggaacttgtctatggccatgggtgctaagtccttcctctgggccttatagagaggcaagaagaggcttcagggcctataagacccccatcctaattattttccatctaatttccaaaagagaacttgatcttacttcaagctgttgacctctccactacctatctttggagatgagaatgcagggctttctgctgttgtcctgaaggagtgccctccttctgcaatgctctggggattaggacacttaggcatctgggccctgcccatggaatctagtcatcttcaactccctgctaggcggcctccatatccaacttgggcagccgtggccatcttactgggcagcattggatagtgtctgatctctaatactgcctggtaatgatgacggcggagccctgcatgcagcaatggagccgcctcctgatcccagcctccaggggccccagttccacacctcacctaccttatccaaggtagggctatggggcaaagagttagccttggcgatatgggtggtgggaggctttagggagagttcccccaaaccaggcacctctgagggccactctatatcctggggtgagaggctcctcccattgccctgggggcgccccctcccaatgccctgggaattaggacagtcaagtgcctgggttctgcatacaatacccaggcaggtgctgccaccacacctggcaggtgtacgctgggtggaagtgcagcaaaggctctaaagggctaagtctccgcctaggctcagagggcctcatgccaaaaactgcctcacctacatctaggagctgtgtactgattgaccccctagtggggctactcaagcctgggataccttaccttcctgcatcaagtgagcaccgacctattgaccaacagcacctccaacatgcacactgagccaatgtgtcactgtccccttgctttggacaaagcagaccgtatgagttagggtcaacatctctgctggcttattgcgatgcatatacggtctctggctgttcatggcatcaggtttccactgggcctccctgagggtggaaaccacctgtgtcttcctgccagagcatacctgggcctctgtgggcatcttaccggacagtgctggatttcttggcttgactctaacactgtctggtaacgatgttcaaaggtgacccaccattcgccgaagacaggctgatgatacacacttgtcctcctggactccagttaggccgaggctgggtgctgggtgcagagggcctgtctcagctctacagatcagcagtcagtgggggctggactttgacccttgtctattacttcatgctgggacaagggatggtttcaccatgccaggggtactggagtagaagtggattgtcactcattctcagagcagcgatgcccacctttgccaactcctctgctggatttgggggttcattgattcctagagagactgtgagggttagtgaggatgctgagctaggtaaggagacatggatagcagtgttagcataaggactgtcagtgcctatgggaccaatgggcaagggtgggttcggggacctgagcctggtacacagaattgtgacgtcatcagctgtttcctaattaagaacaaggaatctctattccttcccaatggctttccagaataggaactttgccccaaaccagaatccaggattacttcttatctttctttacttggagccagagtacagggtcagggagccccacccagtatcagcctagatgactcttccgggggaaggagtctgttcctggctttaatgttactcattaagctgacagccattcagaaaaccaaagaggtgctatgacgagcatttgccaagtaagagtgagcagatgactctcctgttgcacccacagacttccacacttgaggaacaggcaaccaagctgggccctggtaagaaagtccttagagtagtcccaggtcctagaagggtgaaccccaagaatggcccttggaccagagcaggcaggaagccaaccctggccttccctctacaggtatcaaatccaactgcccagatggggaggcccttgtactgccctgctgatggatgtcttaccagacatggttagatctggatgcatctgtctaatactgtctggtaatgccgtccatccacggccttatcaccgctggagacgacatcctcaccacctcgtggacactgggtagagacaagaccttaatccatctgttacaactgtccagagctggggtcatcaagccctctatgcaaatagaccacagtttaaatatacaggccccgctgagcctgactgccttcctctgaccctgtaatagctttcggttacagccacagcagactgaggcctccgtatccatccttttcaggaatagtcagtggggcggtcacagtcctcttgccccccatagcccactgggctccacacagagacttcgatctgtcgtcagctgtcacctgcagattctgtagcccctgtgctatcaacactggtaggagacaagaggagatctaaaaccttggtcctttgtctcctctccaaaattctcaggtcatggaaccaaggagagtaaaagcaagtctaaccactctgcccaaacccggagtggaaaataagtatatgggtttcagggacaggggcactgccaaggtgccagaccaggtgatagtgactcatacccaggaatatgcacaaggctgcacagctctgccgttgtcagcctgcttatgagctcttcctatgcatcccacctctggctcttaggatctgagagtcatctttcagtctaactctggatgctgaatggcccgatcttaaagatcccacccccaccccatgtccctgagaattttcaaaaggctgttgctaaaacggttgctctagaatgactcccaatgcttacatcatttgctatatggggagtttgagtgttgctgtgataagaactagaagtgaacctcttagacctcatctgcaagctgctggcttcagtacctagacttctgcaaacctcaagttggccaatacagcctgagtccagcagagccaaaccctacctcatccactgccctcttgaaggaacccaacatgccctaacagatttcttagccctggacaggccattcctctaaagaaccattatagggacactggacttcatcttccacagaaacctgctgggctccaagttctatgtggctgagggacttgtccgcccatcgtgcgctctataataggtggtcccctttttgtcatctcttcaagcattgtaaataaaatgcaggcaaaaaaaatctttgtaaggcaataaattgtgtgatttctgaaattttatgttgatcatctcattttcaccgtacaaaacattaacaagcagccttgcaaaggatcaagccgaggacacggggactccagtgatcggtgctcccgccagatagaagagagacatggggctcattgtacccagccagtcattacacaaaccagctctggtatgcaatatgtactctagaacctaccaaggacaggtgaatcaggaaaatgggggctcctgtctcagccaagagtcagccttggagtgagaattgggtgtcttgtgcaggaaccaagcccagggtgttatgaatgtgaaagcaatcactccacccctgagctacaatccccagctcctggagtgtgcattgaaaatgtcttcatagccaggatcaaagacagctggctgctggtccaaagcctctccagggttgggtgagctacctgtccagcctggaggctttcagccccaataactcagcccagggtttagtagaagtgctatgtgccccagcccacctgcagtcccactgtactattagtctagagcagagaggtctcttgatccagcactggactgaccacagagaccccgactcccagcacagcataagaagggcagatctcacaagtagagaatgacaacctatggggcactcctatcgccataggactctgggcacagctgagaaatggtgctccttcagacctgccaagcacaagctcccacactggcagcttagactagggaaggccacgtgagtgacttgtcatgcccagcctctaaggggatgctagagccccttaacatgagcagaaccacaaaagaacctgaaggtgaggagatttacagggtagccaaagacaacagttgtcttccagaatttccaagatatgcccctagaacctcaagaaggccctagagggagtcttcaagtgtcttcctcgtcttagttcacaggtcctgtggcttacagtcacatacccttatctctgcttccctctaaagaggtcaccagtcactgggtttagagtacggctggttgacacaagatgactgcacccaaaattctaactcagtgacatctgtacagatttctatttttagaaaggcacggtcatggactccaggatatggtcctggtttttggaagcaccatgtagcccctgtcaagttattgtgatccttgcaaggctctgaaagatgacaggaatgtggatccatatggctgaaaacttggggtcaaaagcaggagtcacaccagatcccaaggaccccagcaggaaactacaaattggcctcaaagccactttgagccatgcttggtgttagatcctagttctttaggtatggattaaggagtccctgtgaatactcaaaatcatctaggaagaattcatggggggaaggggacctggagagatggctcagcggttaagagcactgactgctcttccagaggtcctgagttcaattcccagcaactacatggcggctcaaaaccatctgtaacaggatttgatatcctcatctggtgtgtctgaagatagctacagtacactcacatataagataaatcttttaaaaatttcatatacatatacacacacacacacacacacacacacatatatatatatatatatatatatatatatatatatatagttcatgggaggatggaagatgtggggctatgccccagattcagatggcgttgtgaactcaggaacagcttccccccagcctcctcagatcaatttgacccattctccacttcttgctttgcccaacttctgtaaggctgcccctcaactcatacaatggtccctttcaccatccacctaaaactcttgtttacctttgggcagctgctgaatcatagttccctagtaacagttgcctggagacagttgccaggtcaccactgttgtatcccagcagagggttcctaagaccttgagagcaggtaagagagactaggtggttacaagctgaggggtcctgactaggactgaggctgagtccttgccctcctgtgcctcatttttgactctttccggaagtagataaacaggagggaggactgggcagcttggctgagttcagccctctgccaaggccacactctccaaacccaagtgtctcagccaacaaaggcgtgtcttgtggggcgggactggtccatgtgggcaactcaagttctggggagggctgggaccccttagaaggagctctttgcctagagccgtgtctgtctcccccagaactgacccctcagaagggccacctcctgagatccacagagaacgcatccccagacagtgagcgcagcttgggaggcaccggcccttcaaaaaatgtcagcaccttctcagagccctgtgttgccaaacgtgtgtgtgtctagagaaaacttcagcagagcactgacatggtcattttcttggccatcttcttcaggtttaaacgcatctcctgcccattgtaccggggtgtgatttcctgccggtctttttatctgatcaggtaaacatgtttattttaaatttattataaagacttcaggcttcagtctggctcctcaccttgagctttcccttaacttttatgtaatatcacaagattcatgaccacaccatttgcttcagtattagacagcttgcttcctgaaactgtaactgaaacttttagtgtaaaacttcctttctggatcttgggtctcctcctcagagacgccctgaaacgcgcttcctagataagggcagtagctggtagcttcccagtttagatgctgtaccccagtccttcctctcttgggtacatagatccctactcactcattaggttttctatgaagtttttgttatttttgtgggttttccttggttttgtttttttaatttttgagggaaggtttcatgtagtgtagctcaggctggtcaccaacttatatagtcagactaccttgaatttctgatcctcctcaagtaatgggattctaagtgtgcaatgccattcctggtgcaggggaccagatccggggctgatcttatatatgctatgcagcactgtatcagctgagctatatcttgagccttgctatttttttttttgttgttgttgttgtttcacagggtctctctatgtagcctaggctagcctcaagcttttggcaatttcctgttttctgcctcccaggtgctgggattacaagcttgtgttaccacacctagcttagctttagtaaatatagatgacaagaaataataattcatagctgaattcaatgttaaaataacaagaatacgaagctaagaaagtgactgcagaatcgcacacccacacctacactcctgcccagttctaaagctcctatctcagccttttcctgggagctttccttttctcggttgggaagggatctccaggcactcctggattcttccatctttgcagcctgtcctctagagtggcatgagtttctcattccaggatttctctccaccctacagaactttttggatttttttttcttctcctgttgattcagtaggggtagaattgatagacatgatgcccatatttggcctttctttgctgtcagtcagtcaatccacagacctgtcttcctccttaaggctgacctgctcctatccaaaggccttgtcttacccttcccagtcacagagttctctgtaccgtctcatcattcacccaacacactgggtttattcacttgatgtgatgggaggcacaaacttttgtctaggaattaatttaaaatgccctaaaatgttccaaagacggcaaatagggaaaagggacaacatctggggcaggggtgctgggagaagaggagttgatggtagctatagacaggttgtgttagtaggacctgggctgagcacttgggtagccataaaccgataggacctttgtttggggcttggagcttctttgaccttcaagtctgcagatgtgcactctaccagcaacaagactgataggcaacctctttgcagcagacacagaggccacactcgtcgaggccagaacagtcttggccgaagaaaactcactaggcagagacgggatgcaaagatggccctacacccacaggccggaaggcctcacagagatggaagtgaggcacaagctgaagccacagcccaggacttggggaggcttccttccccaagcaaagtgggtgcagctgtctgtcgcattcaagggctgggacatcgggctgctcgaagaccccgaaggggtatagggactacatctgcctcaagggttcctcgccctggtgcccttatgcctgcaacacgaaaccgtccaagattcatccactgccggggtcagccccctcgaacccgtgtcagctccaagagatccaaacggtccagaatccatccgtgccacactgaggtgccaggtgaatgcagaggggccctgggactggttacacatgccctcaagtcagggcctccagggagagggaagaggtgaggctcacactagaccatgcccagccagccaaccaagcagcccctgaaagaagctaacaaaggtccacatactagggacactatgctcaagaatctgcaagctttacctgtccgtaccatcacagcgggccctcactaccccaaccccatttcgtgcaagtttctcatctctcctggttgaccatagagacttgagtcacccatgatgtcatcatagacattgtgacccctgccctctggagacatccccaaatcatgtttgtatggactcctgtctcacactctagcccactccctgcatggagcctttcctactggtaaggagggtggagacggggccaccctcttaactcccaatgtaatctccacactacatggactctgcctgagtccatggctggtaatgtctcctttcttgggtgtaatgaccctcaggcctcctagtcaggtctgtattgggctgaagaaaggtccagggggtctgggttagttcccagcagctgctggcattggctgggctcaggcagattgaatgggtacctgcccattccccatctgacaccactggtcttcaggctggacccatgagaaacagatggggagcagcgtcaaggaaaggctccggcctgagctaagtcagctggaccaagatgcaggtggggcttctgacagccgggaggggcaggaaaaaccttactgagccagaaacccaggctcagtacccacctatccacagacgacctggaggaagaagaagctgccagactcccagtgacctccccggacgggctcctgatggaaggagacaagcagcccagtcccggtcagggccctttcttctacattggaggcaccaacggagcatcaatgtgagtagagtttgggcaccctgatctgtattctcacccctgtcttggatctggcccaagatgttgctatcggcagccattcctgccatgccttctccagggaaccctaagtccccccagttactgctgccttctaccctgcagaatcagcaactactgtgagagcaagggctggcaacgcactcaggacagccactgtgaggactacaagctaaagtggtgtgagatcaagtgcagggacaactactgcagctttcgggaaggtaggagacatccctgagggtaggggattggcacagccttaaggtgccacccacagacccctatttgtctcaccaggccagcagttgctgttccagctccccaacaacaagcttcttacgaccaagatcgggttgctcagtgctctgcgggagcacgcacgcactttgagcaaagccaggatgctgcccagtacccaaaccaagtgagcccgctctaccagccccagaggcacgcccacttctacctccatctgtctcttggaaccatttccccgctccataaactcaccactccctctgcagcgcctcagcattcagtatcctacccaagatacgagtcaatcactagtcctgagcactcgtcacgtgttccacttttcttcccactgatcttccactctgcctctacgggagcccatggccatgattccttatgcggacgtctatactctgtgctcacaatagccacatatggaatatcccccagtaatcgttcccccccagagtcatcccccaggcgtcatccatggctccttgccatttggccatcattttgtcctttctcagtcactcgatttcctccatcatttagccaagctgaaccactctggttcactcattacttgcccagatctatctacttatccaaccaacttcttatcatctgcccctcgaggtagctttttgatcatggacatccgtaacaccatcttgtcatctgcgtgtccagctgcccacttcccactaacttgtgccagcaactcaaagccatttttctttttcttttttcttttttttttggtttttagagacagggtttctctctgtgtacagccctggctgtcctggaactcactctgtagactaggctggcctcgaactcagaaattcacctgcctctgcctcccaagagctgggattaaaggcgtgtgccaccactgcccggccagagccatttttcttttctttttttttaaagatttttatttattatgtgttaagtacattgcagctgtctttagacaccagaagagggcgtcatatctcactacggatggttgtgagccaccatgtggttgctggggtttgaactcaggacctctggaagagcagtcagtgtgctcttacccgctgagccatctcaccagccccagagccatttttctaagacatccatctgaccacctacctctatgcccatctgtactttaattctgcacatccaatccacacctccaaacgtgccagagataggtactaagaccaggatttatgtccctttgggatgcagatttggaaagggtgcctcggcccacagaaatagaccgctgagaggcactgtcttggcactggaaatcaaccgacatagaagaggacaattgggagagagaaagcagggagatgggatagaggaaccacagtgaattcggtagccagaaggttggctgctgcagagagactgaaaatatgagactcataaaagaatgttctccaagggtatagtatgagcaaaggccttacaaaggaaatagcttagaaggctggaggacacaacagtaaacatcccctccagctagcctacaggtcaaactaccagatagatcactggccaagcctgagacaaaggacagccctcttcatgttttaacttctatgctctcccaagggtcctgaaaatggaagagttttttccagagacctatcggctggacatcagagacgagaggcaggctttcttcgctctatttgatggtgagaagcccctgggtagggccaggcacactagaaggtcagacaagattagggtgggacagggccagacctgggaaaagtagaatagttcttgaggggaaaagtgaagcctggggctcaggatcctagtggtttctggtattgaggagtgggagaaggaagggtcgtggccttagttagaggtaggagtgtggcggggccagggccataggcaggtcataggtatgatcaaagggaaacaaaatagtcctctgacagtgagatcagggtaggatcaggggtggatccagcttggctgtttgctgtggtcagaactgagggaaaaggataaggaaagggaaggtcagggccagggcagggtgagggatgggaggggcaaggagtactcagggccacaggctcgggggttactccctgcagaaacccagatgtggatctgcaaacctacggcctccaaccagggaaagggcatctttctgatcaggagccaggaggaggctgctgccctgcaggccaagacccagagcattgaggatgaccccatctaccgcaagatgcccttccgtgcaccacaggcgcgagtggtgcagaggtgtgggcgtggatgccaggaagggcttgagtctcagcggggataacccagcctggctgttgcctgtggatgctggtgatagttgtcagtagtgctgcagagcatccctaggccatagcaggctgcagcatatccaacacccaaccaacctgcctggagcagcccacatctagacccataacctgttcaggggcgggggtgtgtgtgttcacatttagctggggtaacaagcaagactgcccctaaacacaggctccagggaggggtagccagggagtgtttggtccctttgtcctctgtcctgcagctgtcttaaccgttcttcagcccagccagccagctacagcctatctgcaacacagagctgaccaatgactcatctgcctacagtggggactagatcctcagtctcacatggcactagcagggaaaactcagctcacacttagaaaggtcccaatagagccttatctgccaatatggaccctttctctggccacagctgtcattggctccctctttccccttccatagtgcccttccaagcatgctctccctaccttcagtcttgaagacatgaagtttcctatgtggaatgccctctcccatcaccaaagccattcaccattcacaggtccaaagttagccttccttctccagacagccctccctgccacatgggccaatctgctcccataagtttcctagtaagagctgcaccagacactttcagtgggtaaagatttcattatgaattcttcctaattcttttgaacagttcaaagtcctcttaccattctcagccagtggtcatgtctgggacaggtgggaggcaatgaggaaacagtccttgtggggatgacagatctaggccaactggccaagcaactcagccccaggtgcccctgtggtaccccctagatatgtccagaacccgctgctgctagatgggaagaagtttgatgtgcgctcctacatgctcattgcctgtgccatgccttacatggtcttttttggccatggctatgcccgcctcaccctcagcctgtataaccctcattccagtgacctcagtggtcatttgaccaatcaggtaagaacccttataggagaagtccttttcctaaaggtgtggatgacctctgagaaaactctcattgtttgggaacagaggaagaacttagttatagactaggtgtggaagtagcctagccactacttccttttgccccaacagacactctgttgtcctaagtaccttagagcctaaatcctttgagtcaactccatcaatgtgctgaccaaatgcctaattaatgggaggtctggaacaaggattccttgttcagggtctgtggggattggctgactgggaagtctcgaagcataaaggtatatgcacaagggtctcataggcaattctcatgggagatgggaataaggctctggtgagggtcagaaggttagggtaaggccttcctagagggggagctacagagggtaacctctaggctctgcttgtgttgtagttcatgcagaagaagagccccctgtacacgctgctgaaggagagcaccgtgtggaccatggagcacctcaaccgatacatcaatgacaaatttaggaagaccaagggcctccccagagattgggtcttcaccaccttcacggtcagtcgagctctgagtcgtgttttgtgtgcatactgcctatgggtcgggctaggcgcatggcttttatggatccctgaagcctgtgtagttttactgacgccatgcctgatgtctccaggtgtaattttctatatcaaatcgaaggggcaaaagtagatatccttgtatttcttctgatgtgaggggaaggctcacaaacttccttctctccctagtttgctaagcatttttaagggtagggtgctgagtaatgtagaatgctgctcctataccgattaagacgatcattggctatctttccttcattctgttcatgtgtattgcattgattagttttcactactcttacattgctgggataaattccaggtgatggtaatatataataattcaactgtacttctaggtttgattttattgtatttaagaatttttgtgttggtgctcataaggaatcttgacctatggcttttctttagtattttatctgattttgatataaaaatatatcctactccttttatatataaaatatctaaaataatcaaattatttgtagaaatggtttattctggctctcagtcttaaaggtttggaatctgagcagggtgcatcaccttatctcactcctatgataatctgccctactcaagtttgagagactgtagatggaaacctctaaaactataaaacaaaaatctttcctccttggaaacaattctcttggttatttgttacagtgagaaaaaaaaagaaagaaacaatatacactccatgaaagcagcctggacttccctttgtggaagggtttgtcactctgtcttaccaccaccctcaagctcatttgattgctgtttactaagattttctattgtttgtgtttagatttttctattactttgctagcttttcctagggattttttttttcagttttcctcggttatataatgtgtttggtctacagattcttacagtatttccttaaattcattttactatcctgggcatgctgctgttcactttcaatcccaacatttgggaggcagaagccagcaaatttcagtttgaaaccagtcttgcctatatagttccaggccaatgatagttgcatgatgagatctaccagggcaggggggagaagagaggagagaagagaaaagaaaaagaggaagagttagaaaaaaaagagggccgggcggttgtggagcacgcctttaatcccaacacgtgggaagcagagtcaggcagatttctgagttcaaggccagcctggtctacaaagtgagttctaggacagccagggctacacagagaaaccctgtctcaaaaaaaacaaaaaaaaaaaaaaaaaaaaggaaggaaagaaagaattaaagaagaaagagaagaaaaaagaaaaaagaggaggaggaagaggttaggagggagggagggagggannnnnnnnnnnnnnnnnnnnnnnnnnnnnnnnnnnnnnnnnnnnnnnnnnnnnnnnnnnnnnnnnnnnnnnnnnnnnnnnnnnnnnnnnnnnnnnnnnnnnnnnnnnnnnnnnnnnnnnnnnnnnnnnnnnnnnnnnnnnnnnnnnnnnnnnnnnnnnnnnnnnnnnnnnnnnnnnnnnnnnnnnnnnnnnnnnnnnnnnnnnnnnnnnnnnnnnnnnnnnnnnnnnnnnnnnnnnnnnnnnnnnnnnnnnnnnnnnnnnnnnnnnnnnnnnnnnnnnnnnnnnnnnnnnnnnnnnnnnnnnnnnnnnnnnnnnnnnnnnnnnnnnnnnnnnnnnnnnnnnnnnnnnnnnnnnnnnnnnnnnnnnnnnnnnnnnnnnnnnnnnnnnnnnnnnnnnnnnnnnnnnnnnnnnnnnnnnnnnnnnnnnnnnnnnnnnnnnnnnnnnnnnnnnnnnnnnnnnnnnnnnnnnnnnnnnnnnnnnnnnnnnnnnnnnnnnnnnnnnnnnnnnnnnnnnnnnnnnnnnnnnnnnnnnnnnnnnnnnnnnnnnnnnnnnnnnnnnnnnnnnnnnnnnnnnnnnnnnnnnnnnnnnnnnnnnnnnnnnnnnnnnnnnnnnnnnnnnnnnnnnnnnnnnnnnnnnnnnnnnnnnnnnnnnnnnnnnnnnnnnnnnnnnnnnnnnnnnnnnnnnnnnnnnnnnnnnnnnnnnnnnnnnnnnnnnnnnnnnnnnnnnnnnnnnnnnnnnnnnnnnnnnnnnnnnnnnnnnnnnnnnnnnnnnnnnnnnnnnnnnnnnnnnnnnnnnnnnnnnnnnnnnnnnnnnnnnnnnnnnnnnnnnnnnnnnnnnnnnnnnnnnnnnnnnnnnnnnnnnnnnnnnnnnnnnnnnnnnnnnnnnnnnnnnnnnnnnnnnnnnnnnnnnnnnnnnnnnnnnnnnnnnnnnnnnnnnnnnnnnnnnnnnnnnnnnnnnnnnnnnnnnnnnnnnnnnnnnnnnnnnnnnnnnnnnnnnnnnnnnnnnnnnnnnnnnnnnnnnnnnnnnnnnnnnnnnnnnnnnnnnnnnntgccaggctagtcaagactactactgagtcttaagacatcataataagtcatcttgttagtctcttttaaataaatactctttgtgtgtgtgtgtgtgtgtgtgtgtgagagagagagagagagagagagagagagagagagagagagagattgattgattgatgctagggtgcttttgccacagtggacatgtggagatcacaggacaacttcataaagtcagttccgttattgttattgtaccttaatacgggttctaggatcaaagtcaggtcactaagcttgcacagcaagcgtctttattcacttaaccatcttatgagccctgaaaaatatgtgtgcttttggtcaagtcttctgtttactctttaacaatctatgtatacagtccatttgtatcttttttgtttgtttatttttttgtttattttttttccagacagagacagggtttctctgtgtagtcctggctgtcctggaactcactctgtagaccaggctggcctaaaactcagaaatccacctgcctctgcctctcaagtgctgagattaaaggcgtgcgccacccctcttggacagctcatatgctgtcttatatttaactatatagtcacctttactagggttctttattttatttcttcatatacgttcaagttactgatggaggaacaacagagcaggcatacctttgtttttccttgtgtgtaaatgtctctttgtttttttattttttttatttttattttattatttttttcgtttttttttgagacagggtttctctgtataaccctggctgtcctggaactcactttgtagaccaggctggcctgtctctttgttttttgagactgggtctcaccatgtagatcaggctgatctcaaactcataaagatctgcttgcctctgcctctccagtgttggaattaaaggtatgtgccaccacacctgtcctcatgtgggaacatcttaattttcctattgttaaaaaagattttcaatttttatgtgtttgagtgctctgtgtgtgtgtgtgtgtgtgtgtatgtgtgtgtgtgtgtaccatatatgtgcttggtactcaaagaggctttggatctcttggaacgggagttgtaagaggttgtgggctgtctgatgtggacactggaaacataattgtagccttttgcaagaatagctagtgctcttaacattttgagccatttctctagctctttaacttctccattcttgatttactgggcagagaaattctttttactctgtgtgtgcgtgtgtgtgtgtgtgtgtgtgtgtgtgtgtgtgttttgtgtatctatgtggtatctgtacatgtacaacatctacatggagacctgtagtccaggtgtgtccttccttgagcactctctacttttatttttttatttttaattttttaaaatttttaaatatttatttgtttattatatgtaagtacactgtagctgtcttcagacactccagaagagggtgtcagatctcattacagatggttgtgagccaccatgtggttgctgggatttgaactcaggacctttggaagagcagtcggcactcttaaccagccatctcaccagcccctctacttttattttttaagacagtgtctcttactgagcctgaaggtcatcaattcagctaaaatggctagaccataagcttcagggatctgcctgtcttaccaccaccaccaccaccaccaccaccaccgaagaccagggttataggcattcagttgtcacgcctgactttttatattgattcaggggctgagctcagtctgtgtttttacagctggcacttttctaactaagcatttttttttcagcctctggagatagaattcttggttgtagttttttctttcagcactttgaaaacgtaagttcattgcttcctggcctcataatttctgatgagaaattgactattactcttattgggtatcctttttatgtgacaaattgcttctctcactgattttaatattctctttgtctttttatgattttgtatgtgcgtgtgttcatgtgcatgggggatatgtgtacaattatggaggccagagatcagcatcagatgttcctcaggtgtcacccagcttttgttttgtttttaagacagggtcatattcgttgacttgaagttctctgattagataaggacagcaaacctcaggtctgccttccctgacaagggttacagatagagaacccgtcacacgagcttacgtgggttccggggacagaactcggtcctatacctgcatagcatgtactttgcagatcgggctatcttccaggctctctcttcttttcaaagttttcttatgatatgacaagtctagaatttattcttcttgggcttcattatacaatttaaatttagagatcaaatgtaggcacctccctgtcatttcttacactgccgttcccttcctttcctcctgagattcgcagtagagagatcatttgctagattacttcccatcgtcgggcttctgaagcttaattttttcattactttttattttcttcggactaaataatttcagttgagtttctttcaaaatactccaatttatgagcccctctagtgattaggcaagcaagaaatagcaaagaatcatgtacccctcctgctttggtttgcttagtctggggctacaggtatgtgctactatacccagttctgtgatttaaaaaaatattttacagggctggtgagatggctcagtgggtaagagcacccgactgctcttccgaaggtcaggagttcaaatcccagcaaccacatggtggctcacaaccatctgtaacgagatctgactccctcttctggagtgtctgaggacagctacagtgtacttacaataaataaataaataaatcttaaaaaaaaaaaaaaatattttacatgtatggatgttttgcctacgtgtatgtctgtatactaagtgcatgcctggtgcccacagaggccagataagaatgtcagaaatgtagttccaggtgctataacgtaggtgcttggaattgaacacagttcctctggaagaacaaagcaaacacccttaaccctggagctatctcttaagctccaagatctgtgcgatttctcttctctcctctcctctcctctcctctcctctcctctcctctcctctcctctcctctcctctcctctcctctcctctcctctcctcttctcttctcttctcttctcttctcttctcttctcttctcttctcttttcctttgtaagaattgtagtcactgtagttttttattctactcaggtctattcccctttatactttgtattgcttcacatttttaaatgtgtttttttttttttttttttttttggtttttcgagacagggtttctctgtctagctctggctgtcctggaactcactttgtagaccaggctggcctcgaactcagaaatcctcctgcctctgcctcccaggtgctgggattaaaggcgtgcgccaccacgcccggctaattgtgttttttaaaaaatgtattagggggtgcatatgccgtgagtacacgccatgcacatttgtagaggtcagaggacaatgtatggggggtcatttctctttctattatgtgggtcccggagctcaaactcaggttctcagcgtcaggcgtctttacctgctgaccattttaatggcttctgtaatttgtatctctgttggggggcgggggggggtcagtattttctaaaggagtctttcaacaaaccgcaaaacttacgaaaactaatagctgtaattatttgtaaattagacatgttatgctatttctgatactgagattttttttcatggaatgactctaactaggacagcttgaaatgctataatgttctctatccttaccagggtgttatgtgttctagttgtctgtctctcctgctgtgagtcctaatttccctcacttttgtgaagccccatggttttgttgagtgagtttcttactgtgagcctgtgactctccatgttgaagcgtaggcagtttcagccgtgcaggtgagagtgagggcgaaagtgacaggtgtgactgattgttcaggcctaggagatctcatctgggccaacaggtgacagccaggatccctccctgcttcacccacagaagcggatgcagcagatcatgtcccactgcttcctggctgtcaagtccaagctggagtgcaagctgggctactttgacctcattggctgtgacttcctgattgatgaaaacttcaaggtgctgtcttggggagaggaggtccggtagggaggtgcagggaggtggggcccttgtgcgctctgagcacataagcgtgcccagtggctgggctcagacctagatttggatgtgcacaaaaagctggtctcctgctggaactgagcagctcccacgatcagtcttaactccttgagcaaacaaggggagcaaagccattaatctgcccagaatcactgggctcattagggaccagagccccagcttcttaacagcagtaggtgggtagagaatggtgctgagcactgtctgccacaggtgtggctgctggagatgaacgccaaccctgccctgcataccaactgtgaagtcctgaaggcagtgatccccggagtggttatagagaccttgggtgagctctgggcagccccacaccacaactttcccatatgcatccccccaccacccccagttctgggcaccccgtcctacttgcctccaagttcagactccacaagtctggttttctagcgctccataatctgtatggcagccaagccctctgctcacactttgtcatttctcccacctacagccagtccctcgtgaacccctctcctcctcccgtgtttctagacatccagaggttgctggccccaaattgccctctcaccattcaccttgtcgctcccttgccttcccacagacctggcgcttgagacctgccaaaagagcttgcacagtcagaagatgctgcctctgctgtcacagcgtcgctttgtgctcctttacaacggggagactacggacttgtggccgcgcttggcgagctcgcgcccacttaaccgcttgcctaaccctaaccctaaccctaaccctaacgctaaccctcaccctcaccctcaccctaaccctcaccctcaccctaaccctcaccctaacgctaaccctcaccctccccggcccacctgtgaagccgcatcctctgcgctttcctccgcacgggccgctatctcagaacggcctggtgcacgcaagtcgatgccctccaggggagctcccgtgtgcaccccccgcaaatcgcggctgtctgactcgagcggtagctccatagcggagtctgagccctctctctgttctgggtccctggaaggcagcagggacacagcccgggaaccctccctgggtccgcccgaggaggagcgcgaggaggaacagagaagtacgagccatcgaggctcctagcagccgcagcatccagcggccctgcaccttgctgtgccctctccgggacctataaaagctactttgtgacaaacgcaacctctagaagcccgtcccgtctgggcgccccccagcccttctgcccccgcttctctatttgctccgtggttgtccttagaggaaggagagggaagcgtgcagaatgggaatgcgtccttccggtcccactgacctccttttccttctctggggcagcccagcaaatcctgggtccccatgctctgtgtttttcattctgtatgatcctcctgaaactccatggccttcatgacctctgcaacctggcactgggacccacccactgtcccatggagtccttaggaaaggtcttggatgcccttggaactctggaagccccaccttaccccattactattctggttcatccttaccctgcccaacaccttccttctggcctttcagacactttgtggaatagccaaagccgccatttccctataaatgccctggaacctgtcaggcattagaggcacaaaggagctggctgtgagagggcagttcccagggatgtcgactcttattagtgattagtgcattctctaatgttcgcgctcccagttagcacggggtttgaaaggagagcactgaccgtctcaaacctctgaggtgtccacatcttacaccaaagcagccaggacactgtaagtccatccagccaaaccctgtcctataaaactccaaagaggaccaaagagggccaaagaggaccacccacaggtttccaggtccttcccagcctgaatcctctcttgcatatatatccaaggtggcagatgcctcttcctaacccttctgacctttagttagtcctaagcatcaaagtgggaggagtgccagactagtccctgttcttttatttatttttatatctaataacactaaatggcactatattcagcctcaccagaagagggcgtcagatctcattatggatggttgtgagccaccatgtggttgctgggatttgaactcagaaccttcggaagagcagtcagtgctcttaaccactgagccatctctccaggccatccctgttttgtattggagcaaaatctctcagtggataaggaaatcttcctggcacagtagtctcaactgtggcacggtttctaagctacaactgcctggccaccactagagggctctgtctacagccactgctctggcaaggaactgaggctacaagaggcaaagtgaggtcacagaggaaatgatcgtggagaccttactttagtttgtgaacatcccacgtttctccaccccctccacaacccttctccattcagaccgcctgtcccatgccaggtgtttcagtctactcttccaagtccagtcttcctgttgtggcctagagcatgaagtgcaaggtgaccaagttcagtgtctcctataaccgattgtggttcctcttggaaagagcctgccccaggcctgtgagtctctgggtatctgacgtccaccgaggctaggaaaatgaagactagtctccctagggccttgggctgttagtgaggtcagggcaacatttctgcaggcttccatggtgctacatagccatgccccttggagacacctgtcattggattctcaactgtgccacctccgagttctattttctatagcctcacagttccttgaccaagtcagagctgtgtcccttgatggcattaccagtgtcataaacatttctggtctcagctgctacatggagctgcagccctgcctcccgccccctccctccctcggggtggtggtaagatgtcagcagaagtgacaaagctctcaggaaggagatgcttccactgctgctgtggggacacggagcctctactaagatcctgatgtgataaatgcccattggcagtagcctatctggttcaagcagggcctctgccagccatgggctgtccaagggcttgggctacctgctacccttcattcctggcagctgcagagcatgtcaatgaataaacatttcagatctgttgctgctcactcaccccacaggagtaatggccccatctactctctcccaggtccccaagcccttagcctacacgtaagtctccaggagccctgagtttaggacagcatagagctctaaggagtgaaaagctgtagggcatttgagcatctagccacctggcattcctccattaggaatacaacaatatggcagaaccaaggcttaggagctgatagttgtatcaagactggtctggccttacattgtcactggggttggtgatccaaggagaatagagctcctgacagcttactgtgcctgccaaccctcctctctctctctctctcctcctctccttggagggaatcctgtggtcctaccagtagagttgtcaagaagtttcctccaccacaagacactggggaattgagctgttcaccctctctctcctgttgtctctgcagccagcacagacctttacaacacacacacacacttaagcctgccttagtcagggatctggcgtctgcctaagggacagtctctgggatgtgagcccagcccagtacagggaagacctagaggtttgtagtgccagctagtcagtgggagcatagctcagcagccagggacagtcattacccacctacccctcaaggtctctagacagctgccaggagcctggagttgggggaagggttgctgagttgtaaaaggaagaggcatctcatatgtcaggctggggcatgttccacatgaagaataagaagtgagagggtggaggctgggcaggagccaccagctgtggccggaagcatttctgggaactgagatggcctctgagcctttatctgaaactgaacaaaacttacaaaatcaaggtgaaggtgcgtgcgtgtgtgtgtgcgtgcgtgcgtgtgtgtgtgtgtgtgtgtgtgtgtgtgtgtgtgtgtgtgtgtgtgcatgcacgcgcgcgctcgctctcgtggttttcgggaagaactggagagcacctactgtggggtaggggtttctgggaattgcagcaagactttcctcctgctggactaggccaagcagagctacagggtagcagcttgtgttctcatgctaatgttggctgtgccccccacccccacgtaggactaaaggaagcctgttccccgttggttttttgactggtcaataaagttacccgtggccaatggctgggcagggagacagaggcgggacctttaggatccctgggaagggactgaggaagaagaggggatttggccaggagcagagggtaggagacggaccaccctggaaacatggcatgtaggtacagggggaaagtggccccagggagggttgcccggcaggacctagggcagcaaaggtgaaatatagattgttaagtattaacgcatgaacgttggagggctgtgtgtgtgtaagccatttggagttagggagtggcctagccattgacctgcttagggcacattaaaaataaggctgcgtgtgtatctttctttctggattttagtgggtggtcagaagcacacaggcacccatccgggaggggcgtttagaacggattaacaacctactgctacactacacctagctgttgtggttgccagcctatgcagatgggcaagtacttcaggaggagggtgctgaagtggtctctgtttggatggtaggaggtttctgcagcagaatattttcatcaggtcctgttccctacattctagcacccctggatttcacactccccttcttgccgtcacgggcactgtccctcagctacaggccctcagcctcagcccttgggacctgcacagaccctgcacagctcacagttcttagtggaaatccccagatctaactcacaggctggcacggctcatctcatgcccctggggtggacgtgagtggaatgcaggctgctggcttcaaggcaaggatacagcaaagacgacacccctcaccccaccctgcagaatcccctgccatcccactatcacacccatcagccgcccacaggaggggtttccagcacatacagcctgtgggtatttgcacacacgtcatctgtttggggatgtcccacctgtggtgtttccagtgtaactgtcgacggctcagccaatctagaggtgtgatgggcaagttgggagacgctcccagaccttgcctccctctccaggctgattctagccttgtagctcgtatgtgactcctcacccacccagtaggggacagaagaggcagttgcaggcaatgagggtgctgatacatctctaaggggcttcatgtggccctgagcaatttgtattccgatcccaatgtcgtccacttccgtggcaatttttttccacctcctcttctagtctcccccaggagcctgtgtgtggatgtggctgttagcatcagaggttgcatatccaccccacctcaccccaagtcgccctttacctgctatgaggtaagacagtcggcattaaagtgggggatgggctgaggaagtgtccaggtgtgcagatgcctcgagtgtgcagctgagattccttcctcctggcctgctactccctggacatcaagccaagatggccttattgatttttgtttccttagagatagggtctcactatgtagctgtggctctcttggagttcactgaccagtgtggcctcagacttcggagatctgagtgcctctgcttcccaagtgctgggattacaggtgtgcactggcttgatgatggtggtgatggtggtgatggtggtgatggtgatgatggtgatggtgatggtgatggtgatggtgatggtgatgatggtgatggtgatgatggtgatggtgatggtggtgatggtgatggtggtgatggtgatgatggtgatggtgatggtgatgatgatggtgatgatggtggtgatgatggtgatggtgatgatggtgatgatgatggtgatgatggtgatgatggtggtgatgatggtgatgatggtgatggcagctcttattcagtctttctatgagcagccccaacaactaccatgaagagggaaagacgctttgctgggaatgcctcagagtctaaactatccacttcagagaatttgcctcatcccagatactgctcagtatggaacctgacaaagcctaagtctgaagcatttaggccggggcgaatgccctaaagtgacgtcaaactccagtttccacaggcatcgcgtccaaagggcagtagccccaaactacatgcttaccacacggctgcccaatacatgccagacggaagtgagggaaaggattggaacaaaaagccaagagagagacaggagagctggctcagcagtaagagcacttgctcctctcccagaggacctggattcagttcccagcacccacatggtggctcacaactgtccatatcccctgctccaaaaagttacacatgatacatggaaacttacaaaggcgcaataaatacacatataaattttaaaaaagagaagcaaagacaggtattcagtatagagtatcactttccgaaagcctccttagcttgatggtctctactaagggtttgtggccaagattaaccttgacttgtgccaccactaccaccaagagggagcactgaggacaggcctcagacgcttttcccattaaaatattaaagctttcattacatttatttgtgtgggcatgaatgtgtgtgtgtgtgtgtgtgtgtgtgtgtgtgtgtaggcatgtgggaaatcagaggataatttgttggcattagcagaatctcctactgtggttcccagaaatccaactcaattcatcaggcttagaggcaggaggctttctttgtctgccaagatatttcactagactgccttcttagtttcatactctggaaatgactgtgggcataggatgacaaagggtgtccctcaatgcaactctgggctccttcctttcctccgtccttaggacacagccactcaggttactagacaagtatttattcttgtacaagatcttgtgctaaacgtggtgctcttggtgggcccaaagaccctactccaacagagctgtcaaatgagaaaggcagccatagggcccaatcgtaactcaccgctctcatacacccacttccgccactgttgaggggagcagggccaggcccagggaagggtgcagagcatggcccctgctctcaccaagggtatagctgggcaagtcttgtagcgtctggcttggggcacagaggaagaccaggcctcatggccaccgaccccccagatgacacttttcttctgtctgctccccgcgttcctcctcagggaactggaagctgcaagcatcctcagctgacaactgcacctccgcgaatggctgggtctctgtagtaaaactgcggtaagtgaggggcctgagacacattttccccttccctgggacacaactgacctcggggacacatgtgttgcctcctcagctgccatatgtgcaggccgagctggactgtggttaggaagaaaatgcatgcagccatgaccaggaagatgacagtcaaatggccgtattgctcagtgggcagtggctccgggatgcacacagcattgtgggtcttgttcccagggaacatggtgagaaatccaaactgagaacagctgggacacagacagacactgtcaggattggttaccaaagggaccacactagaaggactgctgtcccctaagccatttgggagaagaatgggggttctctggtggtcactgcaagaaagggataggggaggctttcttagaacgggcctaggctactcatccaggacttacttggtccaaagtctgcagtgaccgtcacgacctgcggagaaggtgcccatggcacaggcaacacaccggaagccaaacacaatatcccctgtggatagacagaatattaggacccctgaagttaatgaagaaggagtcagacaagggtctatctattcaccaggtctaatgtccacaggtctagggcctgaataagctattgcttaccatgtgtgcctattctagaactggcatgatacattggtccctatgaagacggacaggattggtggtaagatctgaccatagtcagaataataatagtctgagagcagaccagcacctgggcagctccccacagcctctcaccaacatccctgagaagacatccccaccctcacgatggaccattcctgcctaagaagaagggctcgggtacccagagaccacttgacccacctatccgttctagaatctaggatgtaggtctttgcctacctagaagatgcacccgtgagagctctatctgcaaacattcttacatgtctacacatgctcactgggtatatcagcttggccctaggtccaactcatgattgtctgtggcttttatcagtcccctaggaacataccttgagactccaccctctggcctggttggcaggggtagtgcttgcagatcttgcactgagggtctccacagtggtactcaggtgtgacacatatgcacctttcttttggacagtcctccttgcctggacaagaataagagcctcagccattagacagagccccttctccagagcttctactgatccttcaagtatttagggtgctatggctccattctcaatcaaccccaattgcaagaccctaagctttgtctagttcactgtttcatttcagttggctgacagctagcatatatacctcccactgctctaaagttgtggtttcgtaagttccattggatgtgggagtcacctggggcttcctatgggccctgggcccatgctgccccattctcaccccatattgcccctcaagggactagaacaacctcatcagctgccttcactgatatccacatctctatctcagagacatggggcttcagagctgcccctttctataccagaagtgtggcaaggtgaggtgctgagatattcttctttggtccacagactgtcctacacctacaattgtaagtcacagtcagtggacaaaccagaggaaatgttgagactccaacccagacaaagagtatcttcagtgatggctaaggtttggtccacctaacagatggtcctctttcatcttggatccccgatccttcttcagggagaagttcccagcctcttttgcctctgctcccacattctgagaggaagttgtccttctacctccttatcagagctccagactcaaagatttacctaccaactcacatgtgccctgtgcccagcctcctcatatgagtgtcgggaagggcgctgctctacagcctgagtcccactctcctccttgccttacctggagcatacaggctgcagcagcgagtgttgttgccacttccgttctgaaccttgccagggccacagccaggctcctcaactacactcggctgacctaggtccagcacacagagcatcgagactccatacagcatggcccatgcccccatagtgcttctcctgagtcttctgtcggctgatttcaggagttcccgctccaacttgccttgtctctgcctctgcctctgtccccacccctcagactgggcttcaggccagctccacctccagtttccggcagacatctgaggtgtttgtaaaggccttctgtgaagtgtagagcagagctatcccctttctggacatctcctaacccctacatgcctctcccaactccagcaaactcgccctggctaggctacagaggaaaaggatgcccattcacatgtgccactgctgccacctgtgggcaccccttattgtataaaactacccccttcccccttctgccccaggaagttcctctaagcctgggaaactaggagagccagcgagaggagtccagagcacacaccatgcctcgctaagaagatcatcataaagtaggtattcctagcaagtacatgaagccatgggcggtgtggcctgcccaggtctagccttggcagttccagcttggctctccctggagccacttttgttcacttcctcacacaattttagacaacaagaaaggagtcccagatacaggtgagcctcattttcttgaacatggccagcatggctctgacaggccttgcccttctcttccattctctctgactggctagattacacccctaaactcagggttacctgcccaccaaggtcttttctcttatttggccatttcctcctccggaggctgactgccaaggttcggctatcaaagtattgaagtccagcaatcaaaaaacccctttggttcaactaattaacatgcccaattaaaatataccactgcatcctaatccattctaacacaggcctcccctttttctcttcttaaaaattacatgtgaaaccgggtgtggtggcgcacgcctttaatcccagcactcgggaggcagaggcaggtggatttctgagttcgaggccagcctggtctacagagtgagttccaggacagccagggctatacagagaaaccctttctcaaaaaacaaacaaacaaacaaacaaacaaaaattacatgtgaaaggtcatttgctgctgtttttgtgcctgagtcagaaaacaaccactttaacttttcttccctgcttagtaaagaatctctctgtgagaacaggtgtttgtatgtagtttgtgcctaatctggggtctgaaagagaaccaatgctgtgctgggagtctcctaacagcttcttcgtgtggccactgacggttctggaaccctgcctccgtcaggagtcctctgctgtactcagccttacttcccacatcttccagctgaataagcacagggaaacatagtgaggacttttgggaggaccgagggtgaatttgaacatctcaggatataactgtggtgtaactttaattttttcacccttacttttaatgatggttcttaaatgcgttaacttcccttgtagcccaccacccaccagacatagtgggaaagaaaggacacaggggacgtggctctgtttagaaaggttctttggagcaactcctgtctgt

SEQ ID NO: 773 - DNA, 1625 bp, Mus musculus
gacatccccaaatcatgtttgtatggactcctgtctcacactctagcccactccctgcatggagcctttcctactggctggacccatgagaaacagatggggagcagcgtcaaggaaaggctccggcctgagctaagtcagctggaccaagatgcagacgacctggaggaagaagaagctgccagactcccagtgacctccccggacgggctcctgatggaaggagacaagcagcccagtcccggtcagggccctttcttctacattggaggcaccaacggagcatcaataatcagcaactactgtgagagcaagggctggcaacgcactcaggacagccactgtgaggactacaagctaaagtggtgtgagatcaagtgcagggacaactactgcagctttcgggaaggccagcagttgctgttccagctccccaacaacaagcttcttacgaccaagatcgggttgctcagtgctctgcgggagcacgcacgcactttgagcaaagccaggatgctgcccagtacccaaaccaaggtcctgaaaatggaagagttttttccagagacctatcggctggacatcagagacgagaggcaggctttcttcgctctatttgatgaaacccagatgtggatctgcaaacctacggcctccaaccagggaaagggcatctttctgatcaggagccaggaggaggctgctgccctgcaggccaagacccagagcattgaggatgaccccatctaccgcaagatgcccttccgtgcaccacaggcgcgagtggtgcagagatatgtccagaacccgctgctgctagatgggaagaagtttgatgtgcgctcctacatgctcattgcctgtgccatgccttacatggtcttttttggccatggctatgcccgcctcaccctcagcctgtataaccctcattccagtgacctcagtggtcatttgaccaatcagttcatgcagaagaagagccccctgtacacgctgctgaaggagagcaccgtgtggaccatggagcacctcaaccgatacatcaatgacaaatttaggaagaccaagggcctccccagagattgggtcttcaccaccttcacgaagcggatgcagcagatcatgtcccactgcttcctggctgtcaagtccaagctggagtgcaagctgggctactttgacctcattggctgtgacttcctgattgatgaaaacttcaaggtgtggctgctggagatgaacgccaaccctgccctgcataccaactgtgaagtcctgaaggcagtgatccccggagtggttatagagaccttggaacggcctggtgcacgcaagtcgatgccctccaggggagctcccgtgtgcaccccccgcaaatcgcggctgtctgactcgagcggtagctccatagcggagtctgagccctctctctgttctgggtccctggaaggcagcagggacacagcccgggaaccctccctgggtccgcccgaggaggagcgcgaggaggaacagagaagtacgagccatcgaggctcctagcagccgcagcatccagcggccctgcaccttgctgtgccctctccgggacctataaaagctactttgtgacaaacgcaacc

SEQ ID NO: 774 - protein, 510 aa, Mus musculus
DIPKSCLYGLLSHTLAHSLHGAFPTGWTHEKQMGSSVKERLRPELSQLDQDADDLEEEEAARLPVTSPDGLLMEGDKQPSPGQGPFFYIGGTNGASIISNYCESKGWQRTQDSHCEDYKLKWCEIKCRDNYCSFREGQQLLFQLPNNKLLTTKIGLLSALREHARTLSKARMLPSTQTKVLKMEEFFPEYLDIRDERQAFFALFDETQMWICKPTNQGKGIFLIRSQEEAAALQAKTQSIEDDPIYRKMPFRAPQARVVQRYVQNPLLLDGKKFDVRSYMLIACAMPYMVFFGHGYARLTLSLYNPHSSDLSGHLTNQFMQKKSPLYTLLKESTVWTMEHLNRYINDKFRKTKGLPRDWVFTTFTKRMQQIMSHCFLAVKSKLECKLGYFDLIGCDFLIDENFKVWLLEMNANPALHTNCEVLKAVIPGVVIETLERPGARKSMPSRGAPVCTPRKSRLSDSSGSSIAESEPSLCSGSLEGSRDTAREPSLGPPEEEREEEQRSTSHRGS

SEQ ID NO: 775 - DNA, 21555 bp, Homo sapiens
acgcagccctgcactgggggcccctccaccccaggcggctcacgaggtgtcatctggagctgtccccaagccgggatctgcaggttgacctcccccacccggggctatctccagaccctctttcctccctggggagatggggcagtcccccgcagggccagctgaaaccacccccatgctgctgccgcctgagcgacgtgtgtggggaagaacttggagtgccacccccagaatgtggcgtccacctcaccagaccgcacgggtgagccctggactgcaaggtgcatataacacaaggtttggacacacctggagagctcgggccaggcagggccacacctgtgagcctgagctcatccaacaccgcccggagctcggggaccttccccatcccagcacctcctcaccgctgtgcccgtctggccagtccctccaagcacccctcggatgaagttgcgccccacactgcagtggggctcactctccacagcgcctgctgcgttgcacggggtgtgacaggaaggaccctgctggggctggcggggccgtacccagagcctccctgtgcggtttctcctcctcctcctcctctccataagcaccgggaacaaaacagaaaaaagtctttgtatagtaataaagtctgcagttcacgcacccatgcttggaccagctccttattttaaccacacgtgcacagacccccgccgtgcaaagggcccagctgaggacagaaccccagacactgcatccggccccggaggcccccaaggttcctgggagaggctccctccctcccttccctcctctttccctccccctcctccttcctctcctccatccctccttccccctcctccctcctcctcctctctccgtccctccctccctccttcttttgctcaggaatcttccctgactctcctgtggtcagctcaggtcaaggttctgggggaagggggagtccctgagtggagacacctcagcctgtgctgaagggagctaccgagggggcagccggtggccctggggggcctctctgagcaggtgaccaagagcgtatggtgccggccagcaggagcgagggctgcggacaggatggaggcagccaggcgccagccaggagggcttcctggtccagccacacctgccccggtgacagccacaggttggtggcaaaggggccacctcccttccagtggcagggcctggcctgcctggagaccccacccactgcccgagaggtgccaggcctcccccattctgcctggccctgggggctgcacccacctggacacgcgggccgggcacacccacggcccaaggtcctgctcccacctgccctgcgcaggaaccttgctggggctacaggtatccgtggctgccacaccacccagattttgggattaaggggcagagttttcaagtttgaactcaggaaagctgtgagggacgaggtagtgcctggctggggagcctgggggcttctgagggcggtggggagtcctcaggcctgtgtggggccccagggaggggaggctgcaggggttgggggacctgcccgctgcaccccctctccccccacacaaggaaacccgtcctccgaggtgtgtgtccagatcacatcctccaaaggccggtgcgccacaaagatgaacacggggctctccctcccagcccaggggcaaggaccctgccttgctctgttcccggaagggccagttctggagaggagctgggcgagtccttcccatccccatcagctcctgtcaggccacctgcctcagcctcagggaggaggggacacacgtaggccccttcccagagtcagagcttccgaacccggatctgctgctcccagcctggagagccacagcagccaccgaaggaaccccccacccgtcacccccaccaagtgggccctgctccccgaaggcccagccactcagcccaggacctgccccagccccacctgccacctgacctgaggctcccagagggcagaggggcctcctgggtctgctccgcaccagggtccagcgggaccatctcaaagcttgagcaccaggcgcaaggtgggagtgcggggaggggacgaggacactgttcccagctggacagaaccaggaggacggtgggagacgccccccaccgccccgcttccgagagctctctcttccttccagggactccccagggacagccggggccccttcttcccccacagctcaggccccagggacacagagcggggaacccccaggctgccgccccggcgtgggtcggggaggcggctccggagcgggcaccacactctcgaaagggtggcttctcctcccggctgctgaaaaaccacacaggcaggcacaacaacagacgcttacgcccgcatctggaggccagaactccaaagccacagggcaggcagggctgcacccctctgggggctccaggagaggaccctgtctgcctccccagcccctgccagctcaggcatcagtggctgtggccgtgtcacccatctctgccccccagtcccacggcgtctcccccacgtctgcgtctcctctctccacctccctctcaggggggcagaggccattgattcagggcctgccctgggtgatgtcactagagatcctgacgtaaccccacctgcaaagccccttcttctaaataaggtcacattcgaggtttcagggctatgatgtggttgtcttttgggggcaccaccagccccctgcaaggggaccctaagcacagaggccctcgtgacccacgcaaagctctgaaggacacggatgggtaggggacacgtggctggaggctcagagtttgaggcagaggggatcagaccgtgccatgggtcatgccaggagcccaggactcccagacctcgtatcattaggtgttttaaagagaaggcgagggcaggccaggcgcagtgactcacgcctgtaatcccagcactttgggaggccgaggcgggcggatcacctgaggtcaggagttcaagagcagcctggccaacatgatgaaaccctctaaaattaataataaattaataataaaataattataataatatagaaaataatatataaaataataaatatataaaatataaaacaaaataaaaataaaaaataaaattaatattaaaaatacaaaaattagctgggcactgtggtgggcacctgtaatcccagctactcgggaggctgaggcaggagaattgcttgatcctgggaggcggaggttgcagtgagccgagaccgtaccattgcactccagcctgggcaaaagagtgagactccgtattttgaaaaaaaaaaaagagagaatgtgagggttaaacaaagacacacagagatggagaaagggcagccttacatcaacacgggtacattgcaaacacctgcagaggtgggggaccagctggatgccagagcccactgccgcctacgggctggggtgcctataggtatgggtgggagcggcccgggccacacggcttcaggatgaggccgtttgtttggcccttgttcccgcagaaggtaatcgtgatgttcctcggtgtttttccccgcagagtgttcaagtcaggtgtcgggcaggctgttcctcacggcccaaacccctgcggaatgcttcactttggccgaggtctgtgacacagcgaggggcttacagaaaggtgcagtttggaccgatagatgtgagtccccctctggggggcactcactttgtggagcccccggttcctgtttgcagaggggggcacagtggcacctcgtccgctgtggagtgagaacagggacccgaccacgtgaagcacagagaatgctcagggatcggcagccgtgtatccagccaacatcaccagggtgcacgcagagcctggcccgggccaggtcctggggtgctgagcatgggtggggcctgagagacggctcagggaccatcctgggagggccgggcggaggggcagcaactggggctcaggctcaggcagtcccagcagtgactgggaggcagctgtgcccatgaagctgtgcccttctccagcctcagccctcagcccggcttcccgggctggccccgccactcagcagcccctccccatcctccgaaaacccaagctcacctctgggttccggctgggtgggggttgccaggagacggttgccaggtcaccactgttgtttcctggcccaggctcccaggaccttgtgggctgggcaggtaagaagcgccggcggccaccagctggggtccagtgggctcggccccgccctcctacgccctgcctgcgggtcccctcgggaggctgctcaggagaggaggaggctggggaggggactggacagggatcgggtagggtggggccaggctgagcctgctctgcgggtcccggaccccagcgccaccgtgcgagaggctcgggtccaggccaggccggggaacggtgtgtgtacccggtggggtgggagggctgggcagccctgggacgagctccgtggcctgggaccaggtctgcctccgcagagcaagtcctggacggacggctgcttgagcccacaggtcgtgcgtcctttgacagcggcctccggccgggaggcaccagctcttcgaacaatgtcagtaccttcctagggccccacgtggccaagcttggattctggggggagaactcgcagcaggacactaacatgtggtcgctttttggatgatttcttcaggtttaaaagtctcttctgttcatcctaccggggtgccgtctcctgccggtcttttcatctcaccaggtaaaacgcttattttacaatttattgtaaggtcgtgcaccaagtttccacgccgcctttacaccgtgtccccaccgaggggcgtcacaaccgtcctccacaccgggcgtcaccggcttcccaagtcccaccgctataaaggacacgtcagtcagcatctcggagtgagacgctttccttctggattcagaatcgcgtccgtcagagactccaaagcacatttgctagatcgacaggcgtgaggagccagcggctcccggcgcttgggaggctgcgtcccacctgcattcaggccccgggttcaccacacacacagcgggcagctgcttaagaaacctttgatttcagtccggggcggtggctcacgcctgtaatcccagcactttgggaggccgaggtgggcggatcacgaggtcaggagtttgagaccagcctggtcaacatggagaaaccctgtctctactaaaaatacaaaaattagccgggcatggcagcaggcgcctgtaatcccagctactcaggaggctgaggcgggagaattgtttgaacctgggaggcggaggttacagtgagccgcgattgcgccattgcactccagcctgggcgacagagtgagacttcgtctaaaaaaattaaaaaaaaaaacacctttaatttcaatgacaagaaataacagctcacaacttatttagttatttgtgaacatcataaggacataaagttagaaaagcccaaaggaggcctcaggcttacgatgaaatcagcacctggctgcctcttccagctgctgcttcttctgcagcagaagagacggaggcagtttcctgggtgggggggtgggtgctgtgcttccgctttctaactgcctgtttccaaaaagcacctgatgctgctgcttctggagcttccagtgcagaaattccccgtggacggtgaaaggggcttgtcttccacacgctgccctgtccatatcatcccggcacgaatgatgtttggggcagagctgcccggcctccccgggtggtgcccatttgttttcctcagagttggcgatcgccttgcttttcacatgtgcttgtgttcccgcctatcctgagctgtccctgagctctctgcctcccgtcacccccacagtcaccatcaccacagccctgcagactgcgcagtgtgtggcgggtgctgtcctgacattacatgtggaaactccatctttgcagcaaccctgcgaggctgctgctcccagctgctgtgcaggtggagagaggctgctgttgtgcaggtggagaggctgctgctcccagccgctgtgcaggtggagagaggctgccaccgtgcaggtggagagaggctgccgctgtgccggtggagaggctgctgccgtgcaggtggagagaggctgccgctgtgccggtggagaggctgctgctcccagccgctgtgcaggtggagagaggctgacgctgtgcaggtggaaagaggctgacgctgtgcaggtggagaggctgctgctcccagccactgtgcaggtggagagaggctgacgctgtgcaggtggagaggctgacgctgtgcaggtggagagaggctgccgctgtgcaggtggagagactgctgctcccagccgctgtgcaggtggagagaggctgacgctgtgcaggtggagagaggctgacgctgtgcaggtggagagaggctgccgctgtgccggtggagaggctgctgctcccagccgctgtgcaggtggagagaggctgacgctgtgcaggtggagagaggctgacgctgtgcaggtggagaggctgctgctcccagccgctgtgcaggtggagagaggctgacactgtgcaggtggagagaggctgacgctgtgcagctggagagaggctgacgctgtacagctggagaggctggggcacacagtcatcaggtcagctgcaagctcacagctgctgcatcttttccctgacagctcactcctgtgagagtcttccaggcttcccggagggacggatgtctcctcaccttttcccacctccacaccttttcccacctccacacctggtaggccaggtatggaattcctggaattcccggctgggagcctcctgggccggttccagccctgtgtgtccccaggaaggctggagggctgctagtggcctcggtgggcacccagggctggccaggaccacacctccttcctccggctctgtgcctgtatctccccgggcctcccctctcgcctggggctccacggtgaccctgctgtgcggcacctcggatttacacccacagtcccatccccagggttcccttctgggcagtttccttgacttaaatcccaaccccggtgttgcatttttaattcccaccggctcttttgtattctctgtgcctttgctttaaaagcacgcggctctctgaggggtcctgtctccatcaccccagccttttccaggctggtttgtttccctgtttctccccttttctcttcctctgtgtgcgtctgtgtgtctgtgtgtctacatgtctgcgtgtctgtgtgtgtcagcgtctgtgtgtgtgggtgtctgtgtgtgtgtgtgggtgtctgtgtgtgtgtctgtgtgtacgtgtgtgtgtagacgtgtctgtgtgtaggtgtctgtaggtgtgtctgtgcatgtttataggtgtgtgtgtgcatgtctgtaggtgtgtctgtgcatccatgtgtctgtgtgtgtaggtgtgtctgtgcatctgtgcaagtgtcgacatgtctgtgtgtgtctgtgtgtagctgtgtgtctgtgcgtgtgtgtgtgtaaatgtgtctgtgtgtcattctttttttttttgagacggagtctcgctctgtcgcccaggctggagtgcagtggcacgatctcagctcactgcaagctccacctcccaggttcaagctattctcctgcctcagcccctcaaggagctgggactacaggcgcccaacaccatgcccggctaattttttgcatttttagtagagacaaggtttcatcatattagccaggatggtctcaatctcctgacctcatgatctgcccgcctcagcctcccacagtgctgggattacaggcgtgagcctccgcgcccggctgtccttgtgtcactcttcttcacacttgggagtccctctgatgatgcctgttgggcctgggcagcccctttggctgagagtcagtactttagaggatccccttccccagcaggaatcctgggtgctgagggcccatgagaaggagctgaggtctcccatttaatgcagagtcttgcacgcacacacctgctccgtgcctgcgcagggtccagcctcttccaaaagtcctcctgttctgggtggggaggggtctcagggctcctgacttcttccattcttgcccagcccaccctaggaagagggcgtgaggctctcccagacacaggtggggggcccagcctgtgttccgctcctccctgaggacgggtcccagtggccccacccgactgggtcatcgtgcagacggctgcctcagtttccccaccttcccctgcccgtgggcttcctcgttgtctccttccctcctgtcactcaggcggggcagggaggggcagacacaaaggcttcctgcgggtgagattggtgccgagctctgtgcccagcctggagcctcaggcctaccccagccttctccagcctcagagcccccacagcctctgcccaacactgccgtgtgctcccctgtctcctgggcgagttccttcaaacccttgaaagccctcacctaagccgggcacagtggctcacacctgttatcccagcactttcagaggccgaggcaggcggatcacctgaggtcgggagtttgagaccagcctgaccaacatggagaaaacccatctctactaaaaatacaaaaagttagctgggcatggtggtgggtgcctgtagtcccagctacctgggaggctgaggcaggagaatcgcttgaacctgggaggcagaggttgcagtgagcctagatcgccccattgcactccagcctgggccacaagaatgaagctccgtctcaaaaaaaaaaaaaaagttctcacctcccaagcagccccaagatgggtttgtttgctggagacagaggtagaaagatctgtcgaggaactggctgaaaattcctaagttgcaacatgggaaggtgttgctggagacagtgtcctgggggtcgggcctggcacccaggggcggccgcagaggaaccctgatggcaggtaccaggcggctgcacacagcccacagctgggctccggggtcagcagcggagacagagaagacccctgctcaggccaaggagccctcccaccctccattcttcaggcaggcgccccacccagcaggcctgacgctgcccctccttccagccggcacccaggccgagctcagccacacctgaagagccgctccggccagggaggacatgcccggcagagacagggtgcagagacagcctcgcccccacacggcgccaggccccacagctgccacagagacgggagccagccgcacgcagaggctcaagcccacggccctgggaggcgccctttcctgggcagggtgggcctgactgcctgctccatccaagcactggggcctcgggccgcgcggaggtcccacaggagggtcagagcggcatcttcccttcagggccctcgcccgggcaccccccggccaatggaccacagctgcacccggttcatccaccgccggggaccacccactcggacccgagccggcttcaagaggggcaagaggccaaggatccagcagaggcctcgggctcgagtctcaggtgaatagagcagccctgggtggcctcctacctctccaaggccaaggcctccctgggacgggtgccccatacccaaggaagtcagtcggcctcatggggcaggggcaggatccacacatggccatgccccgctgctccgagagaggggccagctgtgggcgccgggctctgcaggcacagaggggagctgtcgcgctccgcggcccagggttccgcctggctggcaccacccctggaagggcagcccctcgtctcccggcctgacaatggccccttgggtcacccatgacatcatcatggacattgtgacccctgccctccagggaccatccctgcgtcacgtctgcacccagcaccggcctcacagcccggcccctgccctgcaccaggccactgccctgttggtgaggagggtcggaggggcgacctccctgccccctgctccaagctccccacccccacctggaacctgccggcaggaagcctggccctggagggtggtcacggcccctccccagatgtaagcagtccccaggccgcctggtggggccagagctcgggctgaacttgagccccagacgggccagggggattgtccagggtattggagaaatgggctgggagcaaactggctgagccatgtccgggctgagtgggcagctcccgtagccaccccggtgggaccccaccccgttcacaggcccggcccacgagaggccaatggggagcagccaggaggagggactccggtgtcagccaagccagccagaccacgacgcagatggacactgtgggccggacctggagggggcagaaagagcctctgccacacccggaccccctgggctcctgaacagccaccggcctgcagactcggatgacactaacgccgccgggccctcagctgccctcctggaggggctcctgctggggggtgggaagccatcgccccacagcacccggccggggcccttcttctacattggaggcagcaacggggccacaatgtgagtagcggccctgggcgcccgtggtcccactgaatacccaccgcctgctcccggggcccagcccggcctccgctggccgcccgccatccccaaccccttgcctcggcccccaggtcacccccgcccccacccctcgcagcatcagctcctactgcaaaagcaagggctggcagcgcatccatgacagccgccgggacgactacacgctgaagtggtgtgaggtcaagagccgagacagctacggcagcttccgggaaggtagcgggagccggcaccagaggcgggcagcctgcaggggcctcctgggccggagcacagggcaggttggaggggtggggaccgaggtcctgcgctccctccacacgagccctggcctctgacctccaggagagcagctgctgtaccagcttcccaacaacaagctcctcaccaccaagatcgggctgctcagcacccttcggggacgggcacgggccatgagcaaggccagcaaggtgccggggggggtccaggccaggtgagtctgcccctgcccctgcccccgtccctgcgcccgcccctacgcctgcccctgcccctgcccctgcacccgccccacccctgcccctgcgcccgcccctgcccttgcccctgcccctggccacccaggctcccaggctggctccagcccctgcccctgcccttgcccctgcccctggccacctgggctcccaggctggccccagcccccacccgtcagcacctgcctccaccttccacctgtcctttaaagggccaaacccctgtcccataaacccaccctcttcctcgtggctgaacggggaagatcccacacgtccccaacccactgggcctgacacccacccacctgtccatctcacagacccacccaggtacaacccacctgtcaatctgccttcaccccaaacatccatccaatccatccacaatcccacaccgtgcccaccgtcacctgtgggtgccctgagtgaggccgtccatcgctcacccaagtctgggccatccatcctagcgacttcgtcctcctgctcccagccctgcccactgcccttctatggacccacctatccctcctcacttcatttggcccagacatttttgcaccaagcacccgcccagccaaccgcagctgcctccatctgcaccccccgcccctggttgcctgtgacaccagctttacaccatgtccagcgtccacttccagcctagagcaacacagctgtttcccccaggcaccgccgtccacccagccacctccttccaccacaactcacagtccgcccactcaccacccatgccccatcccccagtccccacccgctccaagcaccatgagctggcccctcagtccaggccctctgtcccctgggctgcaggctggaaaaggacgcagcagcgcccgccctggaggacctcccgtggacaagcccaggatacctcaggccacagaggtagactcagcccagctgtgaggggcccttcagaccgaagttcagacctaaacctggtgtcgtctgaaaaggagaaagcggggcgggggtcccacacaaaggaaaaccacgagctagagtcagaggttcagccaggccaggccgagatccacgctgaccccccagtgcacacagagctggggcagggccaggggctcaggccacgctctccgcccatcccagccgtgaggacactgccatgaggtggtggctcacaaatggctgagacggtgccagccgggagagcaaccatgagggaaaaagcagccagcgggaggggcccgggtgggggtcagcggccagaaggatgcagccagcagcacagcccgttgggggggtgctgcaaaggggcaggaaacgcaaagtccccacaaggagaacggccgcgggcgccaggtgccactgcccacactccctcccgccgggccacaggctgggcctcaaaccgcccacccagccaggggcgaagggacagcagctcatcctcctgcctccctgccctgcagggtcctgagaatggaagagtttttcccagagacctaccgcctggacctcaaacacgagagagaggcctttttcaccttgtttgatggtgagacgctgctggccggacaccaggctggccctggggagacagggtgagggctggaccaaggcgggggctgatgagggcagggctgggtctggaggggctgcgtggggctgggacgagacgaggtggtcaggaaggggccagggctgggcctggtctgggtggggactgaggagttggaaaggggagggtctggccttcgtggaggttggggtatgagggcactggggccagggctggagcttggtccgggtgagcgtggtcgaggcacgggcaggagctggggccaggcgtgtggttagcgcagggccaaggttggaatggccgggccgagggtcgcagcctggaggggagggtcctggtcgggccctaggaggggcgtggctgggttgggggcgaggccaggggctcaggccgcgctctctgcagaaacccagatatggatctgcaagcccacagcctccaaccagggcaaaggcatcttcctgctccggaaccaggaggaagttgccgccctgcaggccaagacccggagcatggaggacgaccccatccaccacaagacgccgttccgggggcctcaggcgcgggtggtgcagaggtgcggcggcgggtgcccggaggggtgagggtctgggctggctgacccgggccccactggtgcagtcagcagggccgccgaggagcccttggtcgtggaaagcagccgcaccaccagcccctgtgcagaccacagccgggcccccgtgtagccagcagaggggaggggtcacaccaggccggggtcacagacacaggatccagggttgaggggttagtcagtttgtccttcagctggggccccctctgtcctgcaggtggcctggcctgggtggcctcccggctgccagcccccctactccccggcccagccagccagctgcagccttcaggcctatggccaagctgaccactccttccctgagtgggaaggcttcctccagaaagccccgtggctgcacgaggctgaaggtttagacctgtcgacctcacccccggccctcgtagagcctcactctgaccacagctgccgtctgccgtccccagcttccatcggctcctccctcgcgtccctccacctggcgagctctccgcctggcgcaccccctctgcctgctgtgctccctctgcctagcgcccgcctggcgcgctccttcccttcctctccaaagccaccttcatgccctcctcctccaggcagccctccaggctcctactgcggttatgccctggagcacccatcagggtgccaggcctttcctcccaattcccctgacatattcaggcccagaaatgccccctttccctggaggtcacacctgggacagaggcggggcgctgaggaaatggaacaggcccggggtggggtgtgaggggatgcaggccaggctggccccgtggctcagcccagcagccccgacatggtgcccccaggtacatccagaacccgctgctggtggacgggagaaagtttgacgtgcgctcctacctgctcattgcctgcaccacaccctacatgatcttctttggccacggctatgctcgcctcacccttagcctttacgacccccattccagcgacctcggcggccacttgaccaaccaggtgagtctgccatgggtgagggccctccctgcagccttgggatgagattagaaggaggttctcactgctagggggtgcagagggggtgcagctacagaaggaggtggcccaggccgggaggtgtctcaggcctggaagtagcctgggctgcccccgctggcagtgagcactgcctctcacctcccgcttttggccacgtcagaagaagggcgtggcagggaccccgttagctggtgaaagggctcagagccctgtagccctcagcgtgcagcctggctcccaagccgcagctgagttttctgaggatggggtgcgggtgggcgtcggaaccgaggggattctgaggctgtcagaggaggggccctgtgggcagagatttctggggacgggtcttcatgggagagtccagggtagggaccttctgagaagatctgtggggtcctcacggctgaaggggggtctcagcggatgaaggtttttgtgggagggtctttgcaggcaggtcagggtggggccgggggagcaaggttaggggcggctgtctcagggacccccagagaacaggccttctaggttagggggatgttctcttggggacccccgtgaggacaggccctccggacagtctgggagccagtctccaggcaccgtgtgcccccagttcatgcagaagccttctaggttagggggatgttctcttggggacccccgtgaggacaggccctccggacagtctgggagccagtctccaggcaccgtgtgcccccagttcatgcagaagccttctaggttagggggatgttctcttggggacccccgtgaggacaggccctccggacagtctgggagccagtctccaggcaccgtgtgcccccagttcatgcagaagaagagccctctgtacatgctgctgaaggagcacacggtgtggagcatggaacacctcaaccgctacatcagtgacacgttctggaaggcccggggcctcgccaaggactgggtcttcaccaccctcaaggtgcgtccactgtgccctccagtctgggagtgagatccctcggggcgggggtgtgtggtcaggctgggcaccaggcacacagatgtccgtggcgtgcgtgggcggctgcgctgaagtgtgacctgaccgtgtggaaccaaacccttccagcgtctctgctcacttagctggcagtgcctgtccccagcagccagcaaaggcccggacggaaagcccagtcgggggtctgtcggcacgagtcccgcgggcagcctcgccgtagggtcaggggacagctcggcttcagtgacagccaccatgtgaagagtctttgttcctttcagatcctccacttggcaggcagggccaacagcagcccccgggccaggtgtcctggagcagcagcagctgcccgtgcaggcccggactctccctagctaagggccatgtgcggtggagtgtcctaattttgcagggttcctttctgtgggggtacctgtggggtacttcaaacagccctagcagcaaaggcccttgagcagcgcggtgtgaaactgggataaaaacggggcttggccgaaggacttttatctgtcttggtcaccccggccaggccccggaagcagcagccagggatggtccttcctcacccacaggcgtgtgtcactgtggctgggacggcagcgctcagaggagcctccagttactttcctcacatctcccaaactctctcttaattgcgataattcacagaacataaaattcacgatcttaaagtgtgcagttcagtggcttttagtatttcaaaagttgtgcaattatcaccaccaattccagaacatttcatcacctcaaaaaagaaacactactaacgagccatcacagctacattgccggccattcctggtcaccgctgatggaccttctctctctctcctgtctcctttctcttaccgtggtgttttcagggttcatccacgtagttcacgtatccttttcttttcttttttttttttttgagacagagtctcactctgttgcccaggctggagtacagtggcacaatctcagctcactgcaacctccacctcctgggttcaagcaattctcctgcctcagcctcccaagtagctgcaactacaagtgcccgccaccacgcgcggctaatttttgtatttttagtagagatggggttttgccgtgttggccaggctggtctcaaactcctgacctcaggtgacccgcccgcctcagcctcccaaagtgctgggattacaggcgtgagccactgcacccagccatgtatccctttcatacaacgttccgtcatatggatggaccatattttgccatcagctggtggacacagttttattattgagctgttatgaataatgttgctataaatattcacacaaaaatgtttgtatgaatatatattttcagtgctcctgggaaaatacccaggaatggagtcgtgggtcacagggtgacacacttaactttctgaggaaccaggaatcacttttccagtttctccagatctcgccaacacttgttattttcctttctttattaaagaatcaccatctggtcggtgtgcagggatatctcattgtgggtttgatttccattttgctaatgacaaataacttcatgtgttcactggccagctatgtatattctttagagaaatgtctattcaaacgctgtggctgttctttaccatccagttgtgaaagttttttttgtttgttttttgtttttttttttttgagacagaggctcgctctgtcgtccaggctggagtgcagtgatgtgattctcggctcactgcaagctccgcctcccgggttcacgccattctcctgcctcagcctcccgagtagctgggactacaggcgcccgccaccacgcccggctaattctttgtatttttagtagagacagggtttcaccgtgttagccaggatggtctcgatctcctgacctcgtgatctgcccgcctcggcctcccaaagtgctgggattataggtgtgagccaccgcgcccggccaaaagttctttacatattctaaacactaggcctttatcagacatatgatttgccaatatttttctggaatattgtggctgtcttttcactttcttgataatgtcctttgaccacaaaagcttttagttttgatgaaatccagtttatccatttttttcctttggttactcatgcttttagtatcatatctaaaaatccattgtgccaggtgcggtgactcacgcctgtaatcccagcactttgggaggccatggttgttagatcacctgaggtcaggagttcaagaccagcctgaccaatatggtgaaaccccatctctactaaaaatatgaaaattagccaggcgtggtggtgggtgcttgtagtcccagctacttgggaggctgagaaagaagaattgcttgaacccgggaggtggaggtagctgtgagccaagatcgtgccactgcactctagcctgggcaacagagcaagactccatctcaaaaaacaaaaaaataaaaatccattgcactttgggaggctgaggaaggtggatcacctgaggtcaggagtttgagaccagcctggccaatgtggagaaaccccatctctactaaaaatacaaaaattagctgggtgtggtggcgtgcacctgtagtcccagctactcaagatgctgaggcaagcgaatcacttgaacccgggaggcagaggttgcagtgagtggagatcgcactgctgcactccaacctgggtgatggagcaagactccatctcaaaaaaaaaaaaaaattgccaaatccagcagagtgaaaattacacttatgtttctttctaaaatggtatagttttagctcttatatttaggtcttggatccattttcagttaatttttgtgtatggtgtgagttagggatccaacagcattctcttgcatgtggctatccagttatcccagcaccatttgttgaagagactattctttcccccatggaatggtcctggcatagtatcaaaaaccaattgaccagagctgcaagtgtttatttttggactctcagttccattccattagtgtatatgtctgtctttatgccagtaccacatggttttgattgctgtagctttgtagtaagtcctgaaattgggatatgtgagtctttcaatattgttctttttcaagattattttggctattcaggggccccttacaattccacaattccatatgaattttaagattggcttttccatttctggggaaaaagtccaatgaaattttttttttttttttttgagacagagtctcattctgttgcccaggctggagtgcagtggggcaatctcagctcactgcagcctcgcctcccaggttcaagcgattctcctgcctcagcctccctagtagctgggattacaggcacccaccaccacgctcggctaatttttgtatttttagcagagaccaggtttcactgtgttggccaggctgatctcgaactcctgacctcaggcgatctgcccacctcagcatctcaaagtgctgggattacaggtgtgagccaccacacccagcctcatcgaaattttaataggcattgcattgaatctgtaagtcacgtagcagtggcatcttaacaatatttagtcttccgatccatgaatataggatgtctttccatttttctaggtcttcttccatttctttcagcaatgttttctagttttcagcatacaagtctgtcacctacggtaaatattattctaggtattttattattttgacacttgtgaatagaattattttttaaatttcctttttggattgtccattgctagtgtataaaaataaaactgatttttgtgtgttgatcttgtatccttcaactttcctgaattcacttattagctccgtgtgtgtgtgcactcttcaagatttttatataaggatcatgtcatctggaatagaaacagctttacctcttcctttcaaatttatatgcattttatttcttttcttacatattgccggctacttccagaacaatgttgaatagaagtagcaaaagcagtcatccttgtttgttcctgatctgaggaggaaggccgtgggtttctcataaatgccctcgtcaggttgaggaagttcccttctgttcctaattggttaagtgttttttgttaatatcctagaaggatgttgaaatctgtcaaatgctttttctgtctccactgagatgagcgtgtcttatttccccttcattctattaatgtgttgtatcgcactgattaactttcatatgacaaaccccgcttgatgatggtatagaaccatttaaatttaaatatgctgttggatttggtttgctaatattttaatgaggatttttgtgtctgtgcttataagcaatactggtctgtagtgttcttttctcgaatgtctttgcctgggtggtattaaggtaaccctggcctcatagcatgttaggatgcattctttcctcttttatttttggagtctttgtgaaggattgctgttaattctttgtttgaaataattcaccagtaaagccacctgggttttcctctgtgggaaagtttattattattattactaatactgctgcaatctttacttgttataggtccatccagattttctaatctttagtctgctttattttgctaagaatttgtccatttcaccaggcacggtggctcatgcctataatcccagcactttgggaggccgaggaaggtggatcatgaggtcaggagatcgagaccatcccgggtaacacggtgaaaccccgtctctactaaaaatacaaaaaattagctgggcgtggtggcgggcacctgtagtcccagctactcgggaggctgaggcaggagaatcgcgtgaacccgggaggcggagcttgcagtgagccgagatcgcaccactgcactccagcctgggggacagagcgagaccccgtctcaaaaaaaaaaaaaaaagaatttgtccatttcttctaggttatctaatttgtttagtgtacaaagtattcccttgtcatccttttaatcaatataaagtctttctcccctgattttagtaatttgattcttctctcctttttttttttttctttttggtcagtttctctaagtccttatcaattttgttgatcttttcaatgaaccaactcctggtttcactgattttctctactgttttctattccatttatttccactctatctttattatttccttcttactacttgccttgggtttagtttgctcttcttttactaattttttttttttttgagatggagtcttgctctgtcgcccaagctggagtgcagtggcacgatttcagctcactgcaacctctgcctcccgggttcaaatgattctcctgcctcagcttcccgagtagctgggactaagggcacgtgccaccactcccagctaatttttttgtatttctaatggagatggggtttcaccatgctggcaaggctggtctcaaactctctttttctaatttcttaaggtcaaaagttaggttatgatttcagttttttcttcttgcttaaggtaggtgcttagtgctatacattttcctctgaccaccacttttgctgcatccataagattttgcgtgttgtcttcattttcatttgtctcaaagtatttttatttttattttttattttatttgagatggagtttcgctcttgtcacctaggctggagtgtaatggcgcaatctcagctcactgcagcctctgcctcccgggttcaagcgattctcctgcctcagcctcccgagtagctgggattacaggcacctgccaccacgcctggctaattttgtttgtattattagtagagatgggggtttcaccatgttggccaggctggtcttgaactcctgacctcaggtgatccgcctgccaaagtgctgggattataggcgtgagccatgatgctcagctgcaaagtattttaaatttcctttgtaagcttttctttgacccattggttgcttaagggcctgttatttaatttccacatatttgtgatttttccaattttccttctgttattgactt

SEQ ID NO: 776 - DNA, 1104 bp, Homo sapiens
cccagcaccggcctcacagcccggcccctgccctgcaccaggccactgccctgttggtgaggagggtcggaggggcgacctccctgccccctgctccaagctccccacccccacctggaacctgccggcaggaagcctggccctggagggtggtcacggcccctccccagatgcccggcccacgagaggccaatggggagcagccaggaggagggactccggtgtcagccaagccagccagaccacgacgcagatggacactgtgggccggacctggagggggcagaaagagcctctgccacacccggaccccctgggctcctgaacagccaccggcctgcagactcggatgacactaacgccgccgggccctcagctgccctcctggaggggctcctgctggggggtgggaagccatcgccccacagcacccggccggggcccttcttctacattggaggcagcaacggggccacaatcatcagctcctactgcaaaagcaagggctggcagcgcatccatgacagccgccgggacgactacacgctgaagtggtgtgaggtcaagagccgagacagctacggcagcttccgggaaggagagcagctgctgtaccagcttcccaacaacaagctcctcaccaccaagatcgggctgctcagcacccttcggggacgggcacgggccatgagcaaggccagcaaggtgccggggggggtccaggccaggtgagtctgcccctgcccctgcccccgtccctgcgcccgcccctacgcctgcccctgcccctgcccctgcacccgccccacccctgcccctgcgcccgcccctgcccttgcccctgcccctggccacccaggctcccaggctggctccagcccctgcccctgcccttgcccctgcccctggccacctgggctcccaggctggccccagcccccacccgtcagcacctgcctccaccttccacctgtcctttaaagggccaaacccctgtcccataaacccaccctcttcctcgtggctgaacggggaagatcccacacgtccccaacccactgggcctgacacccacccacctgtccatctcacagacccacccag

SEQ ID NO: 777 - protein, 177 aa, Homo sapiens
MGSSQEEGLRCQPSQPDHDADGHCGPDLEGAERASATPGPPGLLNSHRPADSDDTNAAGPSAALLEGLLLGGGKPSPHSWGPFFYIGGSNGATIISSYCKSKGWQRIHDSRRDDYTLKWCEVKSRDSYGSFREGEQLLYQLPNNKLLTTKIGLLSTLRGRARAMSKASKVPGGVQAR

SEQ ID NO: 778 - DNA, 134108 bp, Mus musculus
  misc_feature (1)...(134108): n = A,T,C or G
tttctgtcgttctgccttctttcttcatctgcctctactcccttcctcagatccccttctattgtctaaataaacttccttttatactaaacctgtcacacggctgatacctgagtaccgaggtgcctcagcatgggcccactgaagcaccccacacacaaaacaaaactcatgtagaaaaatattattgtgaaatttgagtatgtacattttaataaggacaaatgcttttttgatagtgtgttcagaaaggccattaacatgataaccttccccgagagcgcttgtgtgaggatctccaaccaaaggacaaagggcagcttctgtaactagactttgataaagtacaaatcctaacatgaaaatctggcatgcaatgaagcaaagaaagggagtgaaagcaagccttttaacatttgcccacatttttacccaacacactgtagagaacattcaggtttagggagctcactccttctacagatctccttcctgctccgtggggatgggtgagactctatttgcagtgagtacaagtgccatagactagacgtcccctggccagcttcccactgtcaattataaatatgctaccccactgcatcacgccactgtttataaaaacacctatcacctagatttatgcctttcttagtttaaaactatgaaactgattctgtgatgaaatatggaacttggggcaacctaaaaccgtgttcttgcgtccatagtcacttgaaacagctctagactaaattgtctcttactccctttaaggtgagagctgtagagttttgtttttgttttctttttacatctacatgcttatactttctttctattgatgctccatcaaagcgacaccacttgggatatataacaagttaacaaccctttaagctggccttttggatgtctgcctgtatccgaagacccaagtttcatctccatggaaggatgttcaagaacttccttagaggttttgtttgttgcttcctcctcctcctcctcctcctcctcctcctcctcctcctcctcctcctcctcctcctcctcttcttcttcttcttcttcttctccttctccttctccttctccttctccttctccttctccttctccttctccttctccttctccttctccttctcctccccctccttcccctccccccttcttctccttcttcttcttttaaagttaatttgggaacttataaagaacagtgattaaagggattatttttaaagatagaattgagtttatcagccaatatcccacaaagagaaatttattaatttattcacaattcaacgagtgactcctggcaagttggaaggtgaacttacccatcgggtgccaatttcacaaaacagtgcctgttgaagaacaaatctcagagaggacagtttatagtgtttgtctcaaaatacagatgctcaaaatgggtggataggggtagaaactgaaagagaaagatgttattggtttgtttactttttacctcttggacaagatccagggggttgttatcctaataatcagagccgtgtgcctggtttgacaaatttcccaatggactttgttcccaacatgagaagccaagaaagaagttgaatggggactgtccacttgccttgagccatcgacagtgttgtgtgtgacaggggacctacctaacagcagagaaaacacaggaaacaggctattcctagcaccttcacagatttagtgttaagattagtcctggaggaaagggaataattagaataggcaaaatgttcttccactttaagaatagcagaggccagagaacagagaaaacatagtgagagaagcaggagtgccgccgcagagagaaagggagcctacaccaagaatagcagggttataaggagaatgagcggctgtgggtggagggaagcccggtggtgcagggagcttagggaaggggaggagggaagccgggctgggtgctagcttgaatgtgcagcaggtacttgtgttactgaggtagtgggaggccagcatgagctttgatatgctaataggcatcacaggtggccctaagtcccttctgccagaggtaagggaaatgactgcttttgctggaggggaattggctttactgtttctgagggatgctggctttcggctaagctgcggaaaccctccccctcctgtagttcaggctgagctcatctctggacacttggactccattttggggtttgtggaactggagtttcctttggagctgacactgtgtgaggagaggagaggggaggagaggagaggagaggagaggagaggagaggagaggagaggagaggagaggaaaccttggctgcttgagatgagccatggagacccactacctgtcagcagcctgccctaccaggaaaggagaaggttaataagagaaaggaaaccccaaacatcagttagggtgtttaaaacaacattcatacattggccaccgaacggaaaagacagaagacaaggaaatacttacatttctgactcaggccttagaaaagggggccaatcccagccagcctcacggcctctcagctgctggggaattgcactggagataggaattctgggaagaaagagtgcagagttttaaggtgaatctgcctccctaggggtggtccccaaccaggtccctgacctatccccatctccaccattccttacagtcatgtagcctagctctgttctggtcttactgtgagttgtcatcttactgtgagtcttgttagatggttttcactgctagcctgtttctgtctctgtctctgtctctgtctctctctctctctctctctctctctctctctctctcactcacacacacacacacacacacacactaattattaataaagaaaagaagccttgagtttgagagagtaagggggtacatgagagagcttagaggttgaaaagagaagggagaaatgatgtaattataatctaagaaataaaaataactattcttacaaagctgtttctttcactgacgctttgttccccagtctctgattttgtcccagttatttcctcctattagctttgcatttgtattgctttctagattcttacaaaagagcttagattatcagttagagatgtgactctttcctaatgcatgcacatactgctataaaattgtcctttgctgctatttatttgtgtgaatgctgtattttgctttttatttattatgcttttttgtgttttcttcagacctctttgatcttgggctttctggcaagtacattatttagttccaaatattgcttggagatatttccattattaattttatttatttatttatttatttatttatttatttatttatttatttaattgagacagggtcatcctatgtagccatggttggcttggaatttaatatatagaccaggtttccctcacactgagttctgcctctgcctctgcctctgcctctaaagtgctgggattaaatacacagaccaccatattcagttatcttattaatttttgttattatattacatatttgggtttgaagtgggtttttttttgtttgtttgttttgttttttgtttctctgaatgatcagaaaagacagcatgtataactgcagtttttggagttttgtggtggtttgatttttgacccagttgtagtttgacttggtatagtttgtggtgacccagtttatggtctgtcttgatgcagcttgtggtggtagcccagctctggcctgtcttgttatgtgattcacagacatttgaagaacatgcatgttttgctatgttccgattccctgggcttggttacagatggttgtgaggcactgtgtgagtgcaggttctctggaagagcagccagttctcttaacagctgagctatctctgtatactgtatagctttttaagagccacttcaggctttacattatttttgcaacctctattggtgacaccgtttttctccaggtgaggaacctcttttatgtatttagacaatctttatcttatccttccatgtaggagcctatggatccatttccagcaactcaatattacaatctttgtcttggtccaccattacaggttagaaagaacaggagagaattaaggagctgtgtgggtctctcttctcctcaggggtccttggccattggcccaccagggtggaggtggggtgagcaggaatctgacggctgagatcacagaagaacgagatggcatcagtgagagagcacctctttattgctcagaaggttgggtatataagggtttttgggttatgggtgggaaggttgactggtcataacacagttcctaattatcatatgtcgggaagggctgagtggaactttcgtgctgaatcatatagtacttgcaggaagctctgtgcagggtcatcctctagataaggtgtgtcacctgtgctcagggacagtctccagataaggtcagtggagaaggggaagccccgctggaaaggaagtcctccattttgctgcgaaccccaagagctattaggagacagatggtgggcggcgaccttaatgaagcagggtcttctgacagagctgcctgtgttcttgctgtctgtatttgttcttcttgccaggattccttccttgatcgattcttttctaattttaggtcttccttgtggttttctttcaggatagatcagctgatgataaatgtcttttgtttgtttgttttgcttttcaacatggggtttctctgtgtagtccttgctgtcctggaactcactctgtagactaggctggccttgaactcagagatctgcctgctgggtctcccaagtgctgggattaaaggtgtgcacctgcacttcccagcaaagattcatgttgttaattttctttgatcttgcctcatctttcatttgtcagagggcattctggctatttgtagaattctgggctgactgacagctactgtctttcagctctctggaaatctctccccctcccctctgccaggttccccttgagaaatgagctatcacgggagttgttttctcgtttaaggtcagtgttgtgtttctctgctttcgggaggactatgaagttcggctgtagtgggtcttagtgtgaatttctttgtatgaggtttgttcaacttcctactctttggcatcttaacatcatttgccaaatgtggaaagtttcagccattatttctttgaacattgtgtcagctctgtcctcttcctcctctgagattctgatgttgcaaatggtaaactgtttgttgtagcttgggagaactattaatgactttcccttccttccttccttccttccttccttannnnnnnnnnnnnnnnnnnnctccgccccaacggccgagacacagaaaggcgcagaagggcacagagccccacgcgagggcgggccccgcgggggaggcgggaccgagccacccgggttttgtttttgttgtgacgggacacgcccgcgggagggcggggggacaacaggagcccaacccgccgcccagccccccgaccaaccggccggcacgccgagcggccgggggggggtgggggggggcctgtccatcccttccttcctccctcccactcccttccttcctcctttccatcattccttctgtccacccacagccatcactgcagttcagattagattattactagaataagcagttcattgattcttcattctatcctgtccaccactgtagtgcattcctggagtttcggtttgtgctcctgtattattagtgccaacattttcacttacggccttccccttcctcttctgcatcttctactgctttacctggacacccactttctcttcttcctctttcctactttcctccatgcctccttcacttcctgtctttcttaggctatttgccccaagcatgtgtgtaattgtactttgaaacagttttgtggtggctgatttaaagtccttgccagacagtcctaacacgattgcatctgagtgttgtggtctatagatggtcttttcatttagttcaagttttccctgtttttttttttttttcttttttgtaaatacagtgagctagttactttcacacaagcttttgggttttatacctggattctgctttgatatagactttttgtttgagcccttcactgagactgccttgtcacagagaggtacacagctcatctttactgtctatgacaggtgctattacgagcccaggtttcccactctgccttcatgtaaaggggattgaggcacgtaagaggctgaggctggaggattaaaattcatagctagccttcccaaaatgaaaataaataaagatgacaagtcttgaggaacactggtatgtatggatgattacctggcttaatgacttcatcatgagtccaagaacgttcacactccctgtaggctctgtagcctacatggaaagatagaaggagcagggatcctgaccctacagtgaatatacagcccagcagcctaatagtgtctcccccttttttaaattaaagatttattttgttactattattattattattattattattattattttgtgtgtgtgtgtgtacaaagatgaaaataaaggctgggggactttcaggatagcatttaaaatgtgcatatgtgcggatacacatgtgccatggtgtgtgtggagctcagaggacaatttgtcgtagtcagttcccttctacctagggaccctaggtatggaactcaggttatctgtgacccttggaagcaagtacctttatttggtgagccagctcaccagtccctccagtccttgtttcctgagacacagctcactgggtagcccaggctggcctgaaactcctcattctctttattctgcttcccaagtgctggggttataggatgtactaccacactcagttatgtgatgtacaacatagattgtatatggaacttcttttttatttcttttgaattatttatttagcagttattatattttaaaattatttttttaagatgtgtaccttcacacccagcaaatttttatatttgttcgtattggtgttttgcctggatggatgcctgcttgccgcatgcatgtagtacttccagaggccaggagagggcgccagaccttctggaactagagttagggtgggttgtaagccaccataagggtgctgagaatcaaacctgagtcctctggaagagcatccagtgctcttaactgcttagccgtttctccagcctagcaactgttcttggtagcataagtaataactttgtgtctaccattcaacagtttcccttccttctatgtattgagtcccaaagaagtagctacttttgatacacattggaaagaagcagacatgtcatataattgcaatgaggtactcttcacataggtggagatgctctgtacaagactaataccattgttgttgttattattattatttattattattgagaccgggtttctctgtataaccctagctgtccttgaactcactctgtagaccatactgtccttgtctgttatcattatcatttattcattcaatgaatacatggtcaggtgaggggcagagtccttggataggtgaaaggtcacaaaagggaggcagagatgtccaaattaggagtgtcagaaactccaaatacaaacaccactttatgtacaaacttttcagacagattctgtatgtttcttatgtgccacgtgaaatttacgtatgggttaaaaagggttatctagcatttaaataaatacaattttatagatgttatggcaatacccaacaagaagagagaccatgggctccaagaaatgtatataaatgcccattttatattcaactttattaacattaagaaagcatcattccatttagttgagaatatgaggcacaagggtcacccaggggtagcagaccatgtgacaggaaagtatcatagttcttaaaaagaaaagaaagaaaagaaaaaaaaggaagtatcaggtcctttaaagtggtatcaatatgataagcttccgagtctacactctacacacacacacacacacacacacacacacacacacactcactcactgcagtactggtagcagtaacttgctctctgcacgcacatgtgcctctactcttttacatacagtttcacagattcaagcccctgctcccccagggacatctctctgcatggcagggaaataagctcttgaagggaatgagaggcaggagagaaaagggaaggttccttcagagcttggctcattacactggaggccttcccgggaggagaggaactggagtcaggaatcattggttcagttctgcgttctcctcccattcccggccccttcctaattatatgactttaggcaagtcctttaaattgctcttagttctttccctgtcaaatggaatcttgtcagctgacttctcgggtcattaagatgatcacaggagaaatagcacagggaggcactgcttttaagtcctgagccgtgtcggggaggagtcttactgcacacgtgactgcacacgtgatcgcgagcgtcgtcttcaggttggctgcctgattcactgttcaacctcagctccacagagtcctcctttgagaagtcctccttcctcatcaatctctctttcattaccccagtttatttcagccaagacatttctcacctgtgaaatggtttctttgcttaccggtatattggttttctccctatgtaaaggctccactgtggaggtcagaggctaagtgtctttctcaattgctctcttccatattatttgagataaagtctttcatggaacccggagctggccagttgggctagattgactggccaagctatgcttggttctgcctccagctctggagtacaggtgaaaaacagcttccttccttcctttctttctcttccctttttctttctttctttctttctttcctttttttttttttttaaaaacatgggctctacctgatcaaccttcggcatagcaagcattttacaaattaatttctctctccatcccaaaggcgaactcagtcttttattcccatggactattatgaacattacagtcctatcctgtgtctctctccttctgagaggtcctcatatccctgccctggctggcctggaaaccactatgtttaccagactggccttaaatgcttagaaatgggcttgcctttgccctctcagctggaataaaatatgtgggccaccatgcctgtctgacagtacaggatggatgagatcagataacagtggctaagactcaagactaccatcaaagacaacttagacttgaaagtagggaatcaaacccagggccttgtgcatgttaagcaaacattgtaccactgatctacagccccagcctttccaggacagcttctcagttagctagctagctaggtgacaaacggcacgttctttcctggagtctaagaattttacagtatttaaagtgaataacttgaaggttgttttcattattagtgtatcaacagtaataatgtaagtgggtgaccctatgctaggctctgatgcttcaggcttgtcagtcaagccacccattcttctatcaccccagagcacagcatcatccggtttcgcccgcgaggggctaagcggaagtggaggtcggttcttagccacccacaagtgctattgctaccggctctccgagccggggacgaaggagcatttttctggacggttctcttaggatgggaagtccggacttagagagaccccacgccgcgtctgtctggataagagacgctccctggaacttcggccgcaggaccgcgagctccgattcttccctttggctttgaaatcgcggaaggaaggtgggacactggcgctgtgggcagcggagggcagaggcggcgcggcgagggggcggggccagggaggagccgggcggtgggcgtggccgatgggtttggtcagcgcttgccgagctccgggctccgcagtttggacgtcgctctgtcttggcttgtctcggcacgcgctccgtcaaggtaagaaccaagggactctcggcgctcacggagttggcctccacctgcgggagactgaccttagtgggattagggaggatttttctacccttctcacggaggtgagagcggactctctgcgtcaggtcagaggcccgtcccccttgggccaggaagaagggacaggtgcgctcccctgatggccgcgccttccccggtggctgcagatctgagcccttttggacttggtatctgagccgagaggactcgcgattgagttcctttcccagttgagcggcagggggcctttcttctttctgcttgtcccgcggtaaagttcgaatccaggaagacagtccacagttgcttgtgcccgagcaggtgcacgtacttctttagctatttttctcttctggaaagtggtatctggatcttgataaacagggactcgaagaatcaaagtgggaaaaactacgtggaccttgtcccgagactgtgcaatttcccctggatctgacatttcttaactttttcctgtcgttggcgaatatgtttctgtgtaccaggtcccattcgggcttatctttggaaagtggaatatttggttagaagagttgatcgcagtgttaaattgggacaactgggtggctggcttggttaagtgggtttggagcctatccagacagaatagttgcatgctttaagcagaggttttacatttttccagtgagttcccattttcctctaaggaaactctgacaacctattcccgtctatataattcttttacagagccgaggcgcggtaggaggaagcatcgagtctcctaagtaagatttgggatttaatagctgagtgatcgacactgtagctctgtggtctatagactcaaaataaggaagagcttgatttttttccgcgaggcgggggttggggggagctgtggctaaacttacacattaagtatttgaaaacatccatgtcgtccagttacattttcattgtttaagacagacctatcttttcgccatacacttatgaatccgatcactattcctctccttgccagctcaggggtgctttctgtagggtgcctatgtaaatcaccctcgttcttcccacaagggtgtgtgccttcgggtttgtggaattgtgtggggacaggtattgtaaacacatgcaaatcagtgaagcgctctagtaggcgatacctttgccctacatggatctttggcctagagtttccctctctttctagattggaaagaatctagggtgggaatgcaaggtttagcattgccacactgttttcttgattcccttacaacaaggtggtcttgtttacagacagggctggggctatgtgtaacctctctccctacagctgatccttaaaggaggatggagatactgtggacaattactggcacatttgtgttcttgaagaatgcctggcctccccctatcccccccctcgctcccccccctccccgccccgcacccagggcctctaaccacacctcttcctacaggttctccaggctgccctggttggtgcctctcttccttccctgcacccatcctactagattttggcatttacttcaccccccccccactccctccactcccatctggggaagatcatttgttgatactcagcttgctgatggctcccctgtggattctcagtaagtgtctgtggactttgtccctgttcagagcccgtagaagctctgctctcgtccagtgagcagcaggtgaagcagagtctttgaagttgaattcgtatcaagcattaaggtccttcgcggggcattcaagtctgtaagaaaggaatgaaattgacttctgatcatgggaaaatgatctcattccatgtgattatgctgttagaagagatttgttggaaaaaacaaccacaagccacctagaggagagggcgtagaccttatctgtatctccatgcttgtctccacctaggcctgcctttcaatctctgcctgggtcagccagtccttacttgggtcagattataactactaatttgactgcatgtttgactgctcagggcacagatgaccaaagctaccatgaagtagaggttgaaaattacatttccattgtaaaggcaaaaaaaaaaaaaggaaggaattaaaacaacagcagcagcagcagcaacaacaaccaaaaccccataaacaggttgctattgggaaaccagaaggagcaaacaaatttaaatatatgtaggcacagaatctgggctctgaagtagctagatcaagataagccacacgatttatggctaggtcaatattcacagctcagctaaacacatatttttgtgttccttgggattagtaattgtttggcgtgtgtgtgtgtgtgtgtgtgtgtgtgtgtgtgtgtgacttctcattaattcaatctgcaactcttgaccgattctccaagccttctcttaaagaaaccaggttttctctctactttatttgccccaagaagctgaacatgaaccttcttgtttgccatacacttggagaggtggactttttttttttatgtattgcaactgtcactcagaggctgctctgtcactagcctcctgggaatccccattatctctttcctgtgtcccatctcctgggttttgtgtgtgtgtgtgtgtgtgtgtaatcctcgaagcttcctggaaagggatgcacaggatctcagtctttctaactgaagttatccattttcccttcacaatttgcagactggctgagtgtggaatcctgggatggaaatttcaaaggcactgtttcagtatcttctaggttatgaacttctggctccttaatctctgcgtgtagctggggtggaatccacagccctgctgtgctctttctgtgaggttatgaactattctcttctttcccaccatctctaagtttcctgatgctgtgcgctggcatgtctttgttcttatcagtgtgcgggcttttgcgtgtgggagtttacatcttttagtttggggaaaattttttgggttccttcattggtattttcgtccgatttttctgtaatgtttgtctaaggaatttgttgtttggatgtcaggtattttggatcaatcctctcactttgtgcctttcataagtttctgtcttgttatttcccaagtcttttaggaaggttttctcagtatcagtagtatccaagtttaacactggggttttcccagtgtctttaacattattatggttgttgttattattgagacagggctttgctatgtagttcacaccagcctagaattcattgtatagcttaggctgcctaacaggcggctttccttctgctttaacttcacctgtgatagagtcacaggtgtgtcaccatatctggttctaagcatgtttttagcatttttaatttaaaagtgttctctctctctctctctctctctctctctctctctcgttctccaagttggtacacatgtgtgtttatgtgtatgtgtgtgtgtgtagttttgtgtctatgtacttcttgtttttttatcttttggttccagggtcttatctctctgggggaaactactggcttttttggctagaagtgtacactagtgcagtgtgttggaagtgttccttctggtctggttaccccctcgactttggggtaggagggcagttaacaagctgaaggtgaggatgggcttcttggccttagcttcatcttaggctcatccagttgggcctcccatttgagggtgatctctgatatcattgctggtcgagtgagagtgatctgagagggctagtctggtcttccagaggctaaaggcgtgcctggcaggtgatctgtaggctggctggcacaggggctcagaaccctttcttgctgtttgtccaagcttgactggaaggaagaagttcagggtagtcacttaacttctagaagaggctgaagggatgttggacggtccagctgacttttctcttgtactgttggggaatgaacccggagccttaaacacattagatactctctacctcatcctcactgaagccagctttccagagactctagccgatccccttgctgtcatttaagaactatacatctcattgttgtctttgcaccccataagtaccccacaactgtgtctagtgttatctctttggttctctctgactttgctggtttgtacatctaagaaaaatactttgtcatttcgtttcctgggacgtcagcaggggaagaacgtagatgctttcgttcctcctgcctttatggtgcagggatgaaggttccctcagcagcctcttcccaggctccagtggcggggtctgggtgttgtgctgtcgttctctctgcctgtaccatgagtacatgttttctaactagcctggtccagagagtctcacttgtccggctcagaatgccttcagctctccctagtcattactagttgatcagagttgttgcaggaagccaagtgttcatataaaccaggctcagacttgtgggcagtatgacgcttaatggtgtttgggtcatggtcctatttctccagtccaggttgccttcgaagactcagtcacttgggccactatgtcttgcccaccggtaaagctcagcttctttatacatgtctaacatctcactttgaaggattcttgttggtggctgtgtagcctcgggagcaaatacaatttctctggaggccagctgccttcccagaaccctctcttcctgctctcgtgggtgcccttcttggaatgtgtaccaagttcctgtttctggattgctgaactgggatactgacttaccctgcccatagcaactttcccggccccagcttaccagctgagtcactgcctagccttccttcttgaatcatgacctccagcattttcttccaagagcctcatggcatcagcgttctcagaggtgacacacagaggaatggccccaagcatcagcctccatagaagcaggaagagcattctttcctggtcatttcaaatgccggctgggcggacctctgtacgcttagatggcaggtgcgcatgcgccaagggaagaggcggaccacaagcagtgggcatggctgcaaaacagccagagctcgtgggactgtggtgactgagagaaaagatcatatcagcaaagagccacgttgctgttccccagtgggtgcctatatgaatgcatgcttatctgggagaagcctattggtctattattattattattattattattattattatattttgtcatcatgactgcaaagtcatcatgactacgtagtccaggttggtcttcaacttatgattcttttgttttagacttaggagtgttgaaactacgtaccaccatgcctactgggcctttttttccaaaaggaaagtgtgtgtatgtgtcatctacctgtctgtccatctgtctatccatcaacctgtcatctattttctgctttgttttgagaaagggtttctctttgtagccctgggtatcttggaactcactatttagagtaggctggccttgaactcatagagctccttctgcctctgtctcccaagtgcttggattaaagatttgcatcatcacaccgttctccccccccccccccaaagccatggctttcctaagcatgcactggcctagaactcacccagtgtagctgaggtcagcctcatatacatccgactctcatgtttatgttaaaagactgaagctgttgaagctccatttgcacacgtaatcgttttctccacaagcttatgtatttcacaggaactggttttgccttctcagctgtctcatatacactcttctagagaaagcacaatattaaaaacactccggtgactttccccagataattgtagacactttgcagttaagaaagattttgttacaattaaccatgctctgtccagttgtggaaattccctgtatccctgacttcagtttcaggttggctgtatagacggaagcatagaatatttgtgttcttcccggcgtattgtttcccatattagttagaaatattcttcatggaaatgtgctgctgttgtttctatttcccatctatacttttccttagtgtagagtcattgccttggcttctgtggtaaagccaacaacttgatagggaaggaagtacacgtggttagatggtctatggtgaaggaggcagacctttgattacagcaccatatatatatatatattctcgtgtaactagatccttcacttccaaggttaaacgcttttgacatgcttagctactgagtgtcaaagtcacaggctttaaatccccattcattgtgtacgatgcaaatcctgcaggctcctgttagatatcccactcccttctaactcatctcagtggtcagcagctttacctcttcccctttacccgtcacagacttttaagcaggagtctggtactctttccttagagagcctctgcttcctcatgtggtctccagtattagatttcaggcacaacccgtgacatttccacatgggctggaccaaaaatggactgaaccttttattttttatcttttctacacagaagtgatttctataggtcctatgctttctgttcccctttggggactatttttcatagcatcacccggggagtaaagtgcttctaatttctatcaatggccactggaggaacataagcatagccaggaagaaaagcttgctagctgtttattctcacgtctgtctgccctgttcctccttttggtcctctgggatggacgacagcctcacctgtgtagagtgggtttagccagatggcttgaggccatgtaggcagttgttgggttgcaggtcaggtcagaagaagctggcagacttgtgtgtgtggtggtgcacacctttaatcccagcacttgggaggcagagttaagaggatctcctccgtgggttgggggtcagcctggtctacataatgagttctaggataaccagggttacacagtacacagggttacatagtgacagagagagagagagagagagagagagagagagagagtgtgtgtgtgtgtgtgtgtgtgtgtgtgtctcgggcctgggtcatacattttgtttagacttttggtaagtctccaagggtccttaacaaagggtggagaggttttgatggtaactttgtatcactctttgccctcctctatcctttctcagtcttcctgtggcaaactaaaagcttctcactcattcccctattcctctcccgggcaagtaagccctgctcagtagtgcatgcaggccgacacaggccgccaggggcagccgtttgccataaggcgctagggtggagggaattcttgcttagatctttcttccccagacatctgtcctgctatcttgttcccatgtttaaagcctcgactgtgtttctcagtcaactattaactggaattatgtcctcatgcttcagcctttccatctattaaacaaagcataacgacacgtaattaataacccacttcagaaaggtacacagccgaatgcttgtaaagaaaactttgagctgttctgagagtgttttatacacattcacgagcgatgaggtggcttcttctctgtttggcaaagaacacctatattgtgcccattttatagacaggaaaagtgagccttgctgaggatcagagggtaaatttaacataatgtctacgggatttttctcagacttgttaggacaaataaactataaaattctccctccccactccagtgtgtacatgtgtgcttgcgtagctcatgtatgctttaatcaaatgcaccatttgggggattctgctactactttttagcttcattacttctccttcattaaaaaaaaagttcatgcttgaaaagtatattatttttttctcttttaaaaaaaggcttattatttttatgttcatgtgcctatgtgagtttatgcacaccatgtgcacgtaggtgcccacagagactggactgcatcacatctccagaactggacttagagacagttctgacccacctgctatggatcctgggagctgaacccaggtcctctgacagagcagggaatgctctgagccactggagctccttgttagtttccttaaagaaaattaaggcattcagggggaaaaaagtttcacattcaaagtgatttttggaactgttctatatacagatattatatggaacccgtgggagtttgggagacattttaaagagatgagtactcaggggaactgaagtagcaaagcatgggactcctctcaggatacaggcatgatctaacagtctaatgatcatttgaaaatagatgatgtgcaagaggtgggtgctgtcacatcgctgtaacaaaatgcccgacagaaacacaaggagaagcgtttatcttggctcacggtttcagagagatttcagtccgacttagcaggagtgagtgagcctgatagacaggaaatgtatgcacacatggaaggattggggaggcagagaattttatgtttcagttgttctatacactgagataaatttaccccctggtccctagcaagacaccatctcctacagggctcgcttttcctttctgtaacctttatcatggccgctccgtaggtggtgctgggagtgtgagactgtagcacgctcacgtggtagcagacaggagtgggagtgctagactggaaaccggtgaatatagccttcaaaggcatcctcccagtgacctgcttctgccagccccacctcctaaaggttcccggtcttcaatatagttccactagccaggaaccaagtgttcagaacacaagcctttgggcaatattttggatcctaccatattagatggttagtgaactccataatacgccattttccctcagtttttctaagtttgcattgatgtgtcttgaaagcaaagtggactcggagaagccgatacatccgctcttttctcagtcttctactggcatcgtgatcctcttctatttagaaagatcagcgaggcaacgagtgaccagcatctcataaacggagccagccaactcagggaggcctgtgtgcttgatagttctgtgtcaacttgacacaagctagagttgcctgagagaagggaacctcaattgaaaaaaaaatgctcccataagatcagtttgcaggcaagcctgtagggcaccattttcttagtgattgatgggggagggtccagcccattgtgggcgtggccatccctgggctggtggtcctgggatctgtagccgtgaggaccacaaaggtaagcagtacctctccatggcctctgcatcaggtcctgcctccaagtttctgccctgtttgagtttctggcctgacttccttcagtgatggactgttacctggaagcataagccaaaataaacctgttccttcccaacttgccttttggtcatggtgtttccatcgcagcgacactcctcacctgagtgctccttattcctcaacagaaagcatctcaagtgtttattgggtttatacagtgtgcccggtcctatgctgaagtctacacacggctcattgcattgggctctttaaatacctctcaagtgaggaaagttattattctttggcattttgtagacgaagagactgaagttccgtgcggttctgctatcctcgtaagtgttgtctgagcctgtagctttctcctctgtgctctgctgagccccactcactgagcttctgctttttttttctgccacggacttttctcgaagagtaagcatagctgagagcctagggtcatatacaaagatctgcgtctaatacagtgaagtggtcaggttcttcaggtgtcgctccagacccttgatgaggcgtgggtcctgagaatgcgtcccagcaacaaacagatcaactccgtgaaccgcagcagcttgaacatgtctaacagtgccgccggggctgtggcggaggctcagtgctagtgtgatcacctgagacatgcaaagccttgggtttgatatctagccctacacccacagagagaaacagtaacagctttgaaaaagagaaaggcaagtgaaattaactttcataacatgcgctgtataacctaatatttaaaatactgtcattttcttatatataatcatatagtaaatttttaatgagaagcagtttggagcaatgcaagatcatgaacacagtacaacagaacgtgttgtggttcagtgcagtgtctcacgtatggcagttggtagtgaaatgttcttccaaactacacagttgttgttcaagggaagatatcttatactgcttcagttttcgattagaatttctgcggtgggagggctttgctctccccagcactgagaaggcagctgtgtgagtaacagctgcattgacagcagcacagagccaaaggtcccctgttcccaaaggcctatgactcaagtgttgtccctccctcattcagtcttgtttacctgcctgtgtctgaggctgccaagcacagttgtgcggattattgcaacatcatgggatggccttcacagcagagacttagtgggtctgcttacttttcgtagccacagtttagagagggtaagaggtaacaatcttaagggaattattttgcttcctaacttatgtagaggtattttttgcgggggaggggggaggggggagggcaggattttttgtcttattctcttttttttcttattgcccatcttctgtttcttcttcttatcatcattatattctcctcctcctcctcctccctctttttccctttcctttcatcgtcctcctcctcctcctcttcctcctcctcctcctccttcctcctcctccccttcctctcctcctcctcttcctcttccttccttccttccttcttcttcttcttctctccttttcttattcttctccttctcctcctccttctccgtctcctcctccttctttttcttcatcatcatcactttttttttaatgcttaacagggtctcattctctctgccagtggctggacatatggaagcgattttagccaaactctccacctgtagaaagtgtgcctagaggctcactactcttcacaccgttgtactttggagccctatgtgtcttccttgtgattgcattcccaggtgcttaacccatttcttgattggcattgagacctggcctcaactggacctctggcttgtgtcctgagttgctctaatgacctttgaccctagactgaccgatgtaaatgctgacatggctttccttcacggagtcccccgctcacccttcatgtggtacaggtcttctcatgacactcattgtcattatggttgcttctaataaataggggcgggctcttgatcgcttgtagcaggcatcgttcggagctgtctatgcgtgtctttgtaaacatctccaggaggcaggcattataccccatttttttttataagaaaactgaggcactgagaaatgaagtattttacccaaggctatacagctaatgaggcccagaggatctttatagcctgcccctgacttcaaagctcttctgtgttgccattactggggttggacttctgcctatggtcccagggtctttaggaacaggagccacaccatagtagacttaactgtttgtcgacctagacttcttttctctggggagctggggttcatgtggtttgggtaggatacatagaaccctggtggtcatgtgacttagctctggtcaatctatggagtccttccatcagaccttgtgattggctcaggagctggtacttgacccaggctggctcccaggctccctttaaggaaggaggttttctctgacttaggagagtgaatcgtcacatggtgggggagaggccatgagctgcggggagaatagagacagccgcctttgaagctctgcattcagctgtgttccctgtgtccaggacttagacttacgtgggacaggtgcttccgttgtggtgcagccttggcttccctactgccatgttctgtcgctgggtgagagcaggcattctgggatcttgctatctacttggaacccagatgtttttgatccctgcagactttgggtcccatcacgctgtatcctttccttgtgggttgttactcctttccctagtgaaaggagataccacacccaaccatcccctagcccccccaccctatttcctaaggggcagcccacacacgtggatatgggtagggtgaatgttgaaccatgagtagaatattagagaactctcttcttcatagacactggggaattaccaatgtgaccaccatcccattctttgaatgctgatcaaagactcctgagcatggaatccatctggccccagacactctctgggctcccagccagcttgagtcagagcctggttctcagccccactcgccctgacttccagcctttctggtctgctgtttgcctgtgatctcacactcctgctgtgattctgtcctccatccttcccgctggcttccttcccacactttaggcagccctccaagagctagtgcattgttccattgtgaatcaactctcccacacagagcccgaacactcccttctccacagctctctgggaggttcacagggcacccctttctgcccttctcctttagagttcaagccattgttacacacaccctcctcctaccagcctgttgttagtcattctccctgatttgatggcttctgttctctcccaaccctgatccctgttttcgtgtgtacagttaactttatacttgcagtagggggtctgtgggggtctgtaatggaagtgattagttgtgggaaaaggggggatttcttaagagatatcctgtaatcaagaccttcagaagtgaaaggattgctgtaggtaggtcaagagtggaagggctgtccaggcagagctaactgcttgggcagaagtctggagatagaaaaagtcttgctgggatactaatggtaggagaggaagagagagcccagtttgatgaggcgtggttgtatttatttacaattaagggatgagtcagacaggagaaagagtgagatttttgttgtgaagacaagatgagaacttggttggagattttataaaggaggactagcgaaggaagcagatttaagacattcttgctaagactcagggtgtagagaaagatagtgaataagtttgaagaacttgcttggctacgagggagctgggagcagggtggaggattgaggctgggatcttgcttcttaggagcttggtgagagtgaggtcctgcccggtgatgagagacttacaggtgttctgggctgccaggagacagcatctgtgtacttgctaggaatcaaagttcttagccctttaattaccttgtgcattaaaagtaagataacttccttcatgagggtaaaaatggcctacactatataagcttgtgatgtttctcaaagcatgttttatagaatgctacaaccctgagagatgttaataaggttcaagggaaatacaatgagttttgtgaccaaataaagttgggaaaccctgtggctggtgtgattcatagagcatgttcacatattaaaccctcccagaaatgcacacaggaagcaggcttgatgtttaagtcaggttttacctaatatgtttatgtgctcattcattcccctatccagcacacatgtaggaagtgcacactgtcatggagtgggtatagcatgctggccctgtgccctgcagtagagaacactggcactccatgcccctcctcttatgagagtcagctcaggcctaagtgtgtgtgatcatctgacatgtcctactgtggcgagaagcctgacatggcaaagcctgtgtgccagttgtttaaaccttcccacttgtactctggagtggagtgatgtggagtgattgattatctatcggcccatccctctggcctcatccctctggtcttcatcagtctctccacctcttcacagagtatttcctgcccctcctgctctgcatggccagagcgcatggcaagggaactttcaggtctgggaagctggtgactcgcctacggttacccagcaggttgcgggagaaaagccagaacctaacccaactggttctaagttccatgctcattgcattcttagtgagaagggacaacctgaaatgcttaaaaatggggggtggggggaaacacccatttaacatgttaagtgagggcctgtggacagtgacagtttaatcagtatagtataagttctccattaatcagtatagtataagatctttattaatcagtatagtataggatctttattaatcagtatagtataggatttctattagtcagtataatataggaactctattaatcagtatagtaaggatctctattaatcagtatagtataggaactctattaatcagtatagtataggatctctattagtcagttagcacaggatctctattaatcagtatcgtataggatctttattaatcagtatagtataggaactctattagtcagtatagtaaggatctctattaatcagtatagtataggatctctattaatcatatcagtaaccatgtgcctggccaagtactttctatgcatttctttaatttctcagccctgtgaggtagtaattactaccttgtttcataaacaaggaaggaagctcagagcctgagtacggtgtccattttacacagcttgtaagggcagagccatacttctattttaggctgttttgagcctgttctgtgcaacaggaaatgtttattttcaggttcaaactggcagagtcagtgtgtcttttctcttctccattttagcttgtcacctttgtaaaaactgactttcagccagatgcctgtacacaactctcatctcagctctcaggaggccaagaggaacactgcaagttcaaggccaggcagggctacttcgtgagactaatctcaacaaaactaaacaaatccaccatacaaacaaacaaaaagacagaaagacaccacacatgcatgcacacagaagcctgcgtacacagcatacactcatacagggacacaaataaaatatacaaaatacagaccttctctcacaaaggagctgatccactccctgaacaactaagccagggagatctctcacagcctttatgaatgtccaactaggtgacggaactctaggagctgaggatctagaggtgggcacacgttcttggatattattcttgtgaaacttaacaaccaattgcaagaggatacttagtaaaagacacagaatcaagaaaaacatcacagtataatgctaagaatgcaaattaagcagaataaaatggactggatattttattttctcagttataaggtttgattgtgtgtttatttatttaaatatttatttttattttatgtgtctgggtatcttggctgaatgtatgtatgtgcctgatggagtatcagatttggatctagagttaaggacagttgtgaacccccatatgggtgctgggaattgaactcaggacctctggaagagcagccagtgctcttaaccactgaggcagctctcagttcccactgcttttttttttttttttttttttttgagatagggccttcctagttagcctcggctggacttgaagttgcagccctcctccttcagttcccccagggctgggattacaggcttttatccagctagtctgtgtagtttagatctggcagtgcatgcgttacctctcctgttgctgtgactaaagcatcacagggaacggtttgtgtcagctcacaagagtgcagctcatcacagcaggaaaggtctggtggcaggagctggaggcccctggtcacattgcatccccggctaggaggcagagaccagatgatacatgctggtcctcagctcattggccttcatcttattcatcccagggatccagcccgggtgatggtgtaacccacaaagtgggtcttcccacctcagtttaacataatctagatcagaggcttgtctctcctaggtgaggatagttctgccaactgttggtcaatgttgcgggtcgtcaaagcaatgcctttttgtgaaagtgacatgtaaagtaacattcaaattagaatgagtagatggggtggagaaagaaaggggaagaaagagataaagagatatagatagatggaacattcataggaagaaggagagcgcatggatttctctgttggaagaagaaggaatgcttaaatcatgatgggtcagtgtgggggtgggtactaaatacagttggagttggaggtaggctaggttaaagtggcttttagtgtaagcatataaacagggattgcaacatggtcatgactcatgcttttagaagattgtgttgactggtgaatggagaaactagtacgaggagataaggaagtggtgagatccactggggatattgcgggagttttgataagattatgatggtggttgcagttttatcagttatcactgcagtaatgctgtgtgagacacaccccatacactcagcagcatacaacaacggtccactgttgctcaggagtttgtgggctgtttatatcattttcctgctctgagttgggctctgttgctcttgactaaactagcccgtgtacctgtggtggctgtggtttagttcagtagctttgccatgctgtctgggttcttacctcttttggggaggaccagatgtcacctgctttaagatgactttgctggcatggctctgttctgtcccgtaagtccctgatccttctctaggagcctagtgtgggcttcttctcagtcacctttttaatgaccgtggcaaaggaccaaagacagaggtacaacaagcaagagtgtcttaagatcatacctttggttaagtttgcttctgtcctgtctgtcaacgcaggttgtttgagggtcttcatagtcagcgtgggagggtctggcaagaggcaggcactcatgtgtgaggagaatacgagaaaccaaggtcaggccaaggtcaggagtgtgaatactagtggggaggaatgaaagagagagtcgaatagactcagaaagtggtttgtatttatggttcaaagaacatgccgagcaattggatttaagaccggagaggttgtgtatgttggtgagaatcaaatgaacttcccagctttgagctctggatttagtgaagcatttactcggataacaaggcctggggcaggacaggtttgatagggtccctgaagttctgagataactgataggaactgagatgaaggggtgagggttgtggtggatgtaaaagatgaagttcttgaggaattaagggccgagcaagtagatttcagaggcatccctagagactgtatttgaagccatggcatgatgcgaggctaaccataaagggagtgtctaggtgtggaaacaaagcaggcctcagatggaatccggcactcctgcctgagaagtaaaatagaaaaggggaaacagcaaagtggccgtcttagtccatgttctattgctgtgaagaaacaccatgatcgaggcaactcctctgatataaagaaagcatttaattgggggcctggcttacagtttcagagggttaatccattatcatcatgttggagagcatgacaccaccacacaggtaggcatggtgctggggaagtaactgagagcgtttacctcttgatctatagacagcatgcaggagagagagggagagagagaacagagagacacagaaaggcagagagacagagacagagaggcagagacagaggcagacagacactgggcctagcaaacccaccctcagtgacacacttcctccaacaagaccatgcttcctccagcagaactacatctcctgatccttctaatccatctcatataattcaccaaccgaggaccaagcatgcgaatatttgtgtttgtgggggccaatcccgttcaaaccagcacaaaggctgagaagctgcagcgtctaggaccaaagaaatatagggaatgtctgtgccatgggaccagggatggggaaacacctacatgtgttgaatggagccagtaggatgtgaattaagaagcagggtctggttacgtggacatccttagagattgacaggcacagtcttggtagacagacagagcctaatgggaggggttggaggagaaagaatgtgaggggaggtagactgacaggaaagctaatcccgagtttcaagaataaacatggtacttggaagtgtaagtggatcaaactggtggtttctttaggggattgtaaatgatacactgtgccagggcacgattcgtagagatggtggggtgtactgaagacagggtactacgtgaatgccagaaaggatggtctgaaaattcagaatacgctttattcaatgtctgaccttcaggtgtatgtctccgtgtactcaatggttaatttggagtgaaagcgtatgtctgctgttgaaacagtttcttctgtcaacttgagagtgtctgaggtccttctgggcaattttagtgagtgtgcattaggcccagccaacaggtacacacactcggacaaatacactcacatgtacattcacaaattttccttttctgttttctttgtttgtttctttgagtactgggacccaaactcaggaaaaacactccctactgtgctcaaagaccttctcacactagtgatgtctcctgtggtggggttgagtgagaagagccctttgaaggatcatatatttgaatgtgttcccattggtagactgtttaggagggattagatgccgtcttgttggaggaggtgtggccttgtaggaggaggtcaggtccctgtctctgtctctgtctttgtctctgtttctcttcatctctgtctctctttgtctttatctttcaccctctccctgtccttctatctctctgtctccctctccctccccacctcttcctctcctcctctcctgcctgagtaacctctctgctactgcctcagtgtgtgcctgtctgcctgccatacttcccaccatgacgatcatggactaaccctccgaaactctaagcaagctcccaatgaaagatttctcttctaaggcacccttgtcacggtgtctgtccgcaacctgagtcaccctaagtaagacatctccctaagtaggtcgttctcagtgtgtctggcactggcttctgactgatgctggtaactccaatgtcttaggtttggctgtggtttacaagtctggcagatctcaggcagagctaggaagggggtgtgaattaatgtgctacattctcattcagggtcttaggccagcatggcttgacttccctttttgattgatataaagaaccaattgcatctggcaatgcaaagattcccatttattcacagactagatgccagcagcctgcaacttgctggcttccagagaggcacacattccagaattttagctgagccacgacttcctttttgtggtttttaagccattgtaactggacttttgaagtgtcaagtaggaactagagagatggctcagtggatctgagtttgaatccctagaacccatgtaaatccaaaaatggtagcacacactaacacatgaaggggagacaggagagtccgtggaagtgcatggaccagctagcttgcatagcaggaaagcaaaaggggaggctgtctcaaacaaggttgacagtgcaggccaacagctgaagtggtcccctgatctccacatgcgtgccatggcatattgtcctgcatccatacacacattctacacacccatcacacagatactcaaagatttcagaaagtgcacggcagatgtctcacagactgcacatttgaaacgtgttttggctgggggcaggcacgtgctcaccatttgttgagcaccggtgtttgtgagccctctgggaatgtgtgcccagtgtgtgccaggggagtgagtgtgcttgtgtagagagagatgaggtgccttgttggtgtttagtgatgaccttggagaagttttgttccatggcctcaataatttgtttcattgacttaaaatactaatgtcttcttatggtgtaactggaaaccacgcctctgccagtctgccttcttgcttgccttttctttcccccctctctctctttctctctcagactcccttccttccttccttccttccttccttccttccttccttccttccttccttttgataattttaaaattatctttaaagacttattttgtagtttatgtgtataaagttctgtctgcatgtatgtatatacatcatatctgtgtcttgtgtgtctagtgccctcagaggtcagaagaaagcactggcccttgtaaaactggtgatatgcgtggttgtgagctatcatgtggaacctgggaattgaacctgcctcttctataaaaacatgcagtgctcttaacccctgagccatctttccaaacctcccagagctttctgatttgccagaaataatactgaaaagaatatctgccagggtcttatggttcttacccttaataattggagatatcctaggtcagtgttagtgggagtaacataaatgatatcaagaaacaaggcttaaatcagatgaaaattatttttttatcaggcttggtggtttaggccagtaaatcctacttgtgaggctgatgtgggaggagaagctgaagttcaaggtgccccagtgtgttcagagtcagccgggacaaagtagtgaaaccctgtctcaaaaccttaaaaaagacccgagcatgtacctctcagtggtggaatgcctgcctagccagaggttcaatcaccagtacctcagtcagtcagtcagtcagtcagtcagtcagtcagtcagtcagccagccagccagccagccagtcagtcagtcagtcagtcagtcagtcagtcagtcagccagccagtcagtcagtcagtcagttaatcaatcaataacatggtgttgtattgtgtgaatgcctccactgcggggctgtggttcgctgagacttttctgttacattccgttcattttctgttacggagactcattcagccagtcatattataatagacctcaacctccagaaaggcacatgtgaaccttttcccaatcgatggacatgttgtttaagtgacactattgtattatcaatgagtgacttacgttcctgtcacacagggagggagccctgaaccgcttctcattcgacttttgtcaagaatagaattgggataatacttaatatttctagaccaaaggccatattacctttgcctattttttttaaatgttttattgccgtttctgagttaacaaagagagtaatctacttggctcagccaacatggaaatgcctttcccaaggcttaactaagccttcaccaactgttagtatctgaagtagcctgctgggggaatgcttttgttatttctggccaaaccctactgaagatattaggcttcagttttcatatctgttctgtctccatcagcaaatttcctgttggtattcagtaatgggaagttgggaagtttgtcttttgataaattgttatcataaaaataagatcaccattttatgaggcacatggctatcttcctctccccccccccccccccccgggaagttccagtttcaacaattgaagttctgagttctgactctcagggcggagcagaatcattggatgtgtgaatgatgagagcggagggaattccattctggggggggggagggagggagggagggagggagagagagagagagagagagagagagagagagagagagagagagatatgtgattccatgctctgtgtgtggatgaatgccctagagcgcatggcctgtgctctctcctcccccatcccactgccgctcccagtgttaactggcaaggcttctttcccatctgtgtctgcggatgccaacagggagtgtggcagttaaaagcaaatgccttttcacaaagacggccttcaaagcccaatgcagtaactacggtagagcgaaaccaagaaaatggatgtgagcttttctctggggtaccttatttgaagaaattaaaaaaatgtcctccttttctctactctgtcttctgccctcgggttgtctctctccttcttgactctgggcctggcaagttgactggctttagccagtgaaacaagagtgcatggaaaacctcagaggtgtggatgtgtgtgtgtgtgccttgggtcttggtctctttgctctgggaacttgagcccacagggctgagtgaagaggccacacatgttccaactaaaggccttaaggtgccaggccaggactgcttgtcctatagaatcaagagaaataatgtattcaaaccgtttgatgctaatgctgattatagtttatttacctattacgtttattaactgacatgtgcatgtatgtggggtgtgcatggaccagggtagttgtggaggtcagaggacaacttgaaggagttgattctctcctgctatgtgggccctggggatggaactcaggttacgggcttggaagcaaaagcttttaactactgatccatcttgccaggtgtatgtttttaattttgtatttttgacaattacatacatgtacagaaggcgttgtgatcgtattgatcaacattatcctttcttattccatctttgctggtttcccttcttcccaaatagtcctccttctactcctatggtgtgtgtgtgtgtgtgtgtgtgcacgcgtatgtgtgcacattcatgtgtgtcttatgcaggtagtcacagacaatgtgttttatttttgcaatggctatgtcatatacagaaatcatcatttcaggttgtctctatcctctccctcttactgtcttcccaccccttctctgtgatggttcctggtcctgggaagcagatgtgtaaatctcatttagagttacatactcagcagtcacttcttctcagtactttgacctgagggcagcaccgctctgtgggtatggcttttgtttttgctcttatcaaaagttggcagaatttccaacagcttctggacacttttgctcatgctgtacacttactctggagatgcagcatctgtctccacggtggcctgtgcctcctggggaaccaggcagaactcattttcctacaccctctctcccatgcatgcagagaacacataagctgtgtggtccactccattttctttttgcttgtttgatttctaacttgtttacttttaactcttatcaatgggttgtttatctactatccacatgtctttcttttccttataattctttcctggagaataaagtcagtgacatggaacacactgtttatgacatcatttgaaagtgtgcgggccagtgactgagtctgtctctaatgtgcggcagccatcactattatccaagttgtgaagacctgttatcccacccccaacacacactctcccctccagtgccccatcttcccttctaatcagtactttgctttctgctgatgtggatttacgttttctaaacatttcatataaacagaatcggttctatcgcataatgcttccaaggtcccagctgtaccatgtgtcaggatttaattccttcccatggtgtgatcctatcccatcataggtacatgttgttctgcttgtctcttcagcagttgatagccccctgggatggtcccacttttgggctattattggcagtttttgtatgaatatgtttccagttctcttaggtagagatctgagtcatatggtaactctgaacttcagcatttgaggacctgtcactgagtcagcgtctgggccacttcacagttccagcagcagcatggggggtggggggtggggtctgacttctctgtgcttgtgtggattctccatctgtttctagtttcagttttagctgctgtcctgtctgaagtgggactctgtggctttgatttgcattttcctgctgacaaatggacccaaacactgtttccttgctattggtcacttgtgagtaatctttggagaaatgtctgctcgaggactttgcccattgtaacaaatgtaatgtgtttgtttgtttgcttgctttgagatagggtctcatagctttgcctgggtcagtcttgaacttctgggctccagcaccctcccgtctttgcctcccaagtgctggggatgtttgaagtgtgttactgtgcctcactccactgattaccttttccttggtttgtccttttcttttcctttcctttcctttccctttctctcctctccttccttttctttccacactccctctccctcttattttggtcctaagcattgaaccccaggccttgagcattctaggctgtacccctgtgctgtgggctcagtcctctagaatacttatgtattcatttagaatgtctttcactgattttttgatgacgatctgccccccacccctcaggagttcagttagtgctgcctggtggaacaaggcctgatcctgttggcttgaccttgtgtcaggaaccacagctcagtgacatatgatcacaattgtcatgccatgtcttggagactgtgtttcacagtggccctcctcctcttaactcttaagtctttcttcctcttctgtgccctgagcaaggagatggggtgggtgggggatgatatagatgtctcactaaggactgaacaagtaactgtcagttattctcagtgttacgtgtgtggtgtgtggtgtggtatgtgtgtgtgtgtatgtttgtatatgtatatgtgtggtatgtgtatgtgtgctgtgtgtgtgagtgtgtttgtatgtttgtacatgtatgtatgtatagtatgtgtaggtatgtgtgtgtgctgtgtgtgtgtgtgtgttagagagagagagagacagagatagagagagagacagagacagagagagacaagttggagtcagagacagacggatgcatgaacagagacagtcagggtcttgctgagttgcgtaggctgagttgagttgtgtaggctgagttgagttgtgtaggctgagttgtgtaggctgagttgtgtaggctgagttgagttgtgtaggctgagttgtgtaggctgagttgtgtaggctgagttgtgtaggctgagttgagttgtgtaggctgagttgtgtaggctgagttgtgtaggctgagttgtgtaggctgagttgtgtaggctgagttgagttgtgtaggctgagttgcgtaggctgagttgcgtaggctggccttgggttgtaattctcctgactcatccttccatatgtctggattacaggcctgtgccaccaagctcagtaaagtttgctttttgattgtttaactctaagttatattatttgtgttctatactttcttagcaaatactttctcctgtttttagttataaaattatgaagatttatttatgtgtatgagtgttttgtttgcatgtatatgtgtgcaccgtatgcatgccagtgcatgagaagatcagaagaggatgtcaggtcccctgaagctggagttagggataactataggctaccatgtgtgtgctgggaactgaacctgggtcctctgcaagagcaacaagtactcttatccacagagctatatctccagccccttctcttaacttgtttttttttttttttgataataaaatacaaaagcttttaagttatataaacccaatttattttttatttttaatttttaaaaatattttattgttatatataagtatactgtagctgtcttcagacacaccagaagagggcgtcagatctcattatggatggttgtgaactaccatgtggttgtgggatttgaactcaggaccttcagaagagcagtcagtgttcttaactgctgagccatctctccagccccctaatttatttttttcttatgctattatgctcacatttaagaaatccttgttagctggacagtggaagagcatgcctttaaccccagcactgaagaggcgaggctggcctggtttacagagagagagttccagggcagccagagctacactgagaaaccccatctcaaaaacaaatgaccaaataaacaacaacaaacctaactcaacggaaaccagccaaacaaccaaacaataacaacaaaaaaactgtgtttagtctaaggtcattgaaatttatactcatgcttcttttaagagttttgcaattttgttgttttcatttcttgtataaagtagggattcactttcatttatatccagctgtttctgtgtggtttgttagaaagatcattctttctctattcactctagtcaaaaattagttggccatagataggtttatttctataccatcagttcttcattgttgagaatatatggtggtattgatagtataatgttgtttatattctccttgcttgtatttattcacattgcaacctccctgaacatctcagtaatttatagtaatgctccaggaattaagatacaagagtaattcagatggcaatcacctccacagcacatatatgtctaagtgatctaagtgatttatattcattagctcagttaataaagttgaactctgaataaggtataactataataaggtaggtgtgtgtgtgtgtgtgtgtgtgtgtgtgaaattttaccctttcttaatgattattttgggaaaatacccaatactaacttttgattctcaaaaaaatgtgatggatagtataatatctccttttgttcacatgtaatctagattaaaaaaaaagatgtaaacataggaagactgtttgggaagaggaagtctaacagtgggagggggataaactaagaaaaccactatgaaaatgtctcagggcagcccatcagtctgttcaatcaatcctaggacagcccatcagtctatacaatcaatctcagggcatcccatcagtttgtacaatcaatcccaggacagtccatcagtctatacagtcaatcccagggcagcccatcagtctgtacaatcaatcccagggcagcccatcagtctgtacaatcaatcccagggcagcccatcagcctgtacaaacaatcccaaggcagcctatcagtctatacagtcaattccagggcactcatgagtttgtacaatcaatcccagggcagcccatcagtctatacagtcaattccagggcagcccatcagtctgtacagtcaatcccagggcagcccataagtctgtacaattgatacatggcaaattgagtgcaaaagcagttaagctgttagtcatagtattgatgaagacagggagggagttgatattggtcaatgttaatgtctctcagtagagaaactggatctggtgacttttggtctgcaaatgactggcctcacaatctggttttctgacgccatgcctcactgtcacatgtagtagcaacacagaagcaagctgcaagggagtccatcaaggcatcacatcaaagcccactggggtataagcccagtgaagaggagaccttcccttgtgcatttgtgtctgtcacagtacctgatgtcaagtgcagctgcaaatgaagtgtttctggaaattcttaggaacaagtaaacccaatgttgtaaaggactggatggattttgttttaaatggtggaaatagttttctttcctcaggactgtttatactgaatgagaatggagaagatggaggagccttaaaatgggatgtatttaaattagggcaagctgtttttactgcttgtgtttcttcaaccactgtgcatttctcagtgctgagcccttgaccagacgtaggccctgttccgttttattccatgggtgacgacttactaggttttttttttttttttttttttttagcttaacccagataccactgttttttgtttgtttgtttgttttggttgtttggttgtttgtttgttggtttgtttatgagagaaacttgccatgtaacccagactggcctgaaactcactgtgtagcctaggctggccttgaacttttggctgttttcctgcctccttttctgcagtgctaggaacacaaatgtatatggcactcccagctctctggcattcccttactgctgatcatctgcctcagcagaagccatctgtggtctagcacatggtaaataaatagttagctttgccatgcctgctctttttactaggctgagtggcttaatctaatggcactatctattttattttgttttcaggagcctgagaatgtatctagcacttactagatgttcagttagcagttgtgtatggacatgtgaaccagttcagaataaagatacagtgagagctaacttagcaacatttacccccaccatttgtgtatgtctaagaagttgcacattaccttgcttgttcctatgatgttggtcctttgaggttggtgcgcctatcctcagcctcatgagcagcacaacagcacctaaggagttagaactacctgaagttctgtgatgataagctctgagtcacgttcctcagctcagccattccagtttcttccaataacccttgcctcttagttcagttcactctgagtaactggcagagtgaggtaatgtttttctggtaccaggaaaaacatcttcaagataatgctcagagaactattgcttcatcaggagacacgttaagagtggcttcttattatagtgttgcatgttcatagtcccagccaccttggaggctgaggcaggaggattgctaaatcctatgagttcataatcaacaacagagagatccttacttagaaaagaccctttttggtcttttcatatatgaaaaggcacatgcttgcctcctagacagtaattttcctgtttaagccagtagttctttggtgagccagtaggtttctagcatattgagctagcataattggtttttaaaataatagggctttaaagtcaacgttggaggtcattagcttcagcttataaatcttacaaagaatgtcacagagccctcagaatttgagctttggcctccgttttcttgcttatcctgtacagggggtcttctctccctgagaggccaccacatgcatgttaaaagtcccctcagaacagcagtgaacacagaatgcccccattcaaagagacaagactgtaagagattaattatgttggcactggtgtaggcctgtctggtgaacaagctctgaatctccacttctgtcaggaaaggctctgtacagagcagaactggttcccaggagcaccagagaaggggcaggtcctgctggctggctgttaacgattcctggacactgactgaaagtgcagatggatatttgcattacagagatcaccagcttagggtgagggtcttgtgatgtttaacttcataaaagacttgattttccttacatctgtccagtgacatctggagaccctgaaaatgagaaggctacaaagtagacactttggtgccctctgaggttttgattctaaagtaatacagttaaggccttacaccaattacctactaaatggctcttttatttcaggcaaggttctggctgccaggtaatgctaactgtatattctttttgcttgatttatataagaccaagtagtcagacttgaaaatacgtgtttgagaaattggtgtgggaccaaatgaaagcttacatatatgacatatatacagtcattcttttttattgcaatgttttcatacaatgtatttccctcacccagtttctcccggatcctcctcactccacacccacccaactctgtactctttcttcctctctctctttgaaacaggcaaacaaaaccccaaataaaccagaattaaagccaacagaactaaagaaagaacataagaaacgcacacatacatgcacacacatcatgaaaacaaagaaaccggaaaccataatatacaagcaaaaataccagtaactcacaaaacaaagcaacacaacaacaaaactcaaaatgctcaaagaaagcaagcactacgagacaaagtctataaaaataccattgaggccattttgtgctgatcatctactactggactaggacctacatttaagtatggtttctatgcccagtgaaataccatgggagaaaactacatttccctttgcaagcagatgtcagttggagatagcttctcggttagggatgggagttccggtccacttcccctcttagttctgggatcacatctggacctgtgcatgctgccacactctatgaatccctgttactcctgttgtgtctgaaggttgctgttaccttggagtcacccaccacctctggttcttacaaccattctgcctcctcttcagaagagctcccaagccctgagaggagggatggatgaagatatctcattgaggactgagtgttccaaggtctctcactgaacattcctaattgtgggtcactctgtgttagttcccatctactgggacaggcagcagtttgcttataagaatttcatagtgcactggaaaaaagtaggcattgatttattttatggactctgtggtaaatcctcaagtcatgacatttcagactatgttggcagaatgtaatatagagatttagtttaggtaatgtacaaaaggagaagtgcccagtgtgaagattagtatatcttagcagatgttacaggtgatggaactttgatttggggatgacagtaaaggttttgggatggaggtaaatgggaagtcatagaaagtgggagaactgctcaaaccttcacatcatccaggaggttctgtggatcctccttagctctctaacatctcgaatgtcctgggtgtccttggttctttctcagcatttgtctcatgtgtgttgaattttcttctttctccatgagaatgcatttgggtcaaagaattaaatccaagtgagaaaactcagtttaatttcagccgtatgcttgggctgcctttcgtttagaaagtgaagaatacatgtaattaatttcttgtgttttcttgggtgtagttaacttctgtaagttggagttttccttctagtatcttctgtagggctggatttgtggatagatagtgtttaaatttgactttgtcacgagatatcttgttttctccatctatggtgatggaaagttttgctgggtatagtagtttggattgacatttgttgtctcttaagagtctgtaagacatctgtccagaactttctggcttttagagtctcttttgagaagttaggtgtaatttggataggtctgcttttatatgttacttggccttttccccttgcatcttttaatattttttctttattctgtacatttagtgttttgattattatgtagcaggaagattttctttactggtccagtctatttggtgttctgtaagcttcttgtatattaataggcatctctttctaaaggttagggaatttttcttctatgatgttgaaaatgttttctgagcctttgagctggtaatcttcttctattcttattattcttaggtttggttgtctcatagtatccaagatttcctggatgttttgctagggactttataaatttaacattttctctgaccaatgtatcaatttcttctattgtatcttctacacctgagattctctcttccatctcttgaataatgttggtgatacttgcatctctagttcctgttcacttacctaggttttccatctccaggattctctcagtttgtgctttctttattgctttaatttccattttcaggtcttgaacagttatatttatttccttcatctatttgattgtattttcttgtattttttcttttcttttctttttctttttcttttttctttttttttggggggggtggggggtgggtttcgagacaggatttctctgtatagccctggctgtcctggaactcactttgtagatcaggctggtctcgagctcagaaatcctcctgcctctacctccctagtgctgggattaaaggcgtgcgccaccacgcccggcttcttgtatttttctttctttttttccttgtatttctttaagggatttatttatttcttctttaaaggcctctacattcttcttaagattggatgaattgtcattttcttgtgcttcagctgtgttggaatatccaggatttgtagtagggtagctgggctgctatacttctctggctgttgttgattttgttcttatgctggcctctaataatctcaatttggaggttattataggtttagggctgatttctaagtttatctttgctagatgggtgttttttggattttttttcttggcttctgtttcttctctgccttctggcctgagtggcctgagtttctggtgaccagtgagtatttaggttcattggggtacctgtactggggttcttgtggcctgtatgacctacatggggttttgggtgacaacattgccgctagggtccctagtgtcagcgtggcctgctgtgtctggtgccagtatggccttggggaaggcaggtgaagttgtgggctggaaaatggaatccagggaacatggtatagtttatggctgttagatgtactttaaggggagttggcaggtataggacatggggcaaggtcttacctgttacctctggtgcttgcgtggcctctgggaaagcaagtggagttgtcacatttaaatgatcacaattaaaagaatcactattgtttagttaaggttcttgtttttctgtttagcttcaatcatataagtaatagaatactaaaaaaatgaaagctcattccagagtttaaatatccaatattaaaactaaaaaaagagaaaatcactatcaaacatttgaaaatgaaatagtaaaaacatgccttctctctgtatgattctgactgaaagtggatactctttagaaggaatttctatgtcaagatgtggccatcaagatctgaacattgacatctactttattcacccgttgatgtgtctcttaccttctgtcacattatgctagtatgatatttcctcactgaagcaattcgttatactctgaaagggggcaatggtttactgtttcatgagcacagcaggaagaacattttgggttagtaataattccaacatatgtcacgcaggtcactttcatagccctttacagatcctagtgtcctttctttttgtctggttttctcattgtacagatcatggcttgttcatttttgtaaccacctgcatgcctcataagtggctgattgtcatgctagatatgtaatcagtgtcagaatgagtgattatagtcacgtctgaaagcattcctgcgaaaagattggctcatacacctagctcggaggaaagttgagcaagtgaagaggtgggtagctggggaaggaaggagttcaaggtgaagaaaacaagactggtgaggttaggaatggccaatgtgttctagttatctgaggtcgggtgagagaacagcccctaacactgcaggggatgtaagagcaactgtcccactcacatggcttctgtgggtaacagctgggcatcacacagtgggtagggagaacagctgggcagcacacagtgggtagggggacgctagtctctgctcatcctgtgcctgaggggttggatggtctacagtgtggtaccttggggaggtagggtttagaagtcattaggattagagtagagttgagtgttctcctgaggctgttgtaaaagccggagcctgccctcaccccccactctctggtttccaatatggaaatgccactgctggcttctcgtgccctgttgcatgttccacagtgtgattcagctgagagaaccacagaactaaacccatgtaggcagcagctctagaacctccagagctgtggcccaagtgaaccagttttgtttataaagttaggtactgcttgattatagcaatggagagctgaacgatataccagtaaactttgatattatcagtataatttactacccagttgacacattgacaattcatgcttgaatatcaccatcgaaaccaagttcacctaactttctgagtaaaacaaaacaaagtcagtgtgattcgggcatattctgaaaaataaatatattttgatttttatctaatatttagcccctttagatcattgctgttaactcctaacaagagtatttttactttccttccacaatttttgtgcataaatacatgctaaaaatcactttagatttggatttgttagcactattttaaagagagaaagcttgttctttttttttctcttcgaaatcattagacttctttctcagtttttacaaggctttcctattaggaaggaaaaacgttaaaccacgataatgaagaaactatgacatgtcctattttgatgacttaaagaattcttccatacttatatacatacatatatacatatatacatacatatatacatatatacatacatatatacataatgcattttcatcatatctcccctcctgtctgttcttatcctcaccccacctcaccaagtttgttctttccagcaagttcccgtcctgttccccacccccacatgtatcctccactacatttaattagggttgcttgtatgaacaagggtcacagggttatttagcagagcaaggtcatcttaccactggccacaccaccaaggaatatattactcctccccagtaactgttaactgcccataggtcctcaggggggagtgaggcctagtggtccccatctgtgctggagtgtcgatggacccccatcagtccttgcacgtcttttgcgggtcttgcgcagatgcccactgctgctgagttcttggctgtgccatgtccaggtgacagagctttacagtgctcctacccatcctctgctccttatatttttcctgttccctctccctccgtgctcctgagtctggcaggggctgtcctagatgctttactcgaggctgagacttaacagccacttctctgccctttgctagtgacgagtctgctagttgcccgctgccaacagaagcttctttggccaatggagagagcagcactaactgacgtgtagtgtctaaaatcagatagacgttgcttcttctcctgccttttgcctgccttctggatgggctgcccgaggagcccttgatcgttaaagcttactcttttcaggcagtctttcatgatcaatgaggttctaagatctgttcgctgcaactgccagattgtgaaactgaagcattcatcttgactgcagattgtgcaacactggacagagaatataactttggtggcttgagtttttcactactgagatggtgacattatttcttagttatctgcctcaggacatatatatgttcaaagtccaataatgtctgttttaagctttaaataggcgccgaggtaaagggtaaagttatctttagctccagtgtgacatagaaaaggggcacttcatttggcagttattatacaaagacactattggcagtcaggtgtggtggcatatgcccacaaacccagcgtttaggtggcagaggcaggaaaaccacaagttccaggccagcctgggcaacataatgacagtttttctgtcccccagagaaactaagaaagttttaacccagagtcttataatgtctgagagatggatctggaatatttgaggatactcttactttcaacaaccccccccccaatacaaactgtgatattcctgtctttcaaaggctatcatccacagcagtgagcagatcagaggcgatcaaccctttacatggaaaatcaacgtgcttgggtccgtattcaaagaagatggctccctttagttttggagatcggaaggttccttttcagtcataggttgtatcctctgaagatgaacagttgctttcaataatattcttaaatgaagctgctcagagaagcacacagctcagctccctagcgttccctttccctctgccttcctttcctggatagtgcagtgagtgggattggtgctaaagctgcagcttggaatgacacgacgcatctgagggctcagtagtctggactgtgtcaatatagagcaaaatagaaaacaaaaccaaacaaaccccaaaactatgccaggtgtggtgctatgagcctgtactgccagtcacacaggctgagttaggagattctctggaggcctgggagttcaagactagcctaggcaccatagagggaacttatatcacaaagcaggtaaaacctgcttaactttaatcacgatgcttgtaattctaatgtcttttctgtgaaaagggccattcttctgtggtctgcccagccttctggattacacaggtacctttggaaggtcactggggcgacctttcaggacacggatgagtgtttctggggaaacccgtcttcagcttccttccttgtgttgatgtaggttccatagtatttgataggtagggatatcacaggttgtattttggtgtttttgtagcttcttttttgcatccgcagtgagatgatctgcctttggctttaatagtttagggaagaagagagccagctcatttgttactccattttctctagagtttctgactgttagagatgatcatttttattttgtcaaacgttttaggactggtatctttttacaacaaaaatcatgggaagctgtgattttgatggggtttctgttctaggatcccacagaccagactaagaaaatcaaaatggagtcacttgtgctacagcgccacataatgaacacacagactgagtgcgagctttcagacccctaaggtggctagttctccatgaaaacagatcttagtctgaggaagagtcctctttgctttaaatcttatctaaaaaattcatcagaacaagtgagatctcaggtcacagtttaaaatctattgattggcttccatgtctcatggtcctaaggtcattgttctgtcaattttcaagggtgttcttattctattttactattttactattttcaaagagtagactttgccccatttatcattttcacagaaaagccaagcttatctgtgcaatcttgatgtaattttatctcttgataatctctacgtagcaccttgcatgtatcacttgatatttcaaatttaggttctattttacttcctcttccacctcgttggtcactcctgaagagaatgtggctctcttgcacaacctaccctcccacacacacagaaaaacacttcctgccccccaaaaacatttataataatagcaagattattacttatttatattattttgatgctatagattctgtttagatagccaggtcaggatataatatggttgctttcgtatggcttttctgtatggtttttattttccttggaattaattactttcatttcttatatcaataatgtttagctaatttattatgagctgccccaggtattcagttttatcttctacaagagctcttcccaggaaccttctaacttgatcttttgaagaggttggccacttggcttgctgctgcctgtcatttatcttggaatttcccttcattatgatgggagattggaatgtcttttgcctttttgtttttctttttaaaaacacttttctttggttctttgtgaatttcatcatgcaccccagtcccctcatctccccctctcctgtacctgtccttcacccttgcaatttctccccaccccaacagagaggaaaaaaatctcattgtggaagctgtagtgtgtcacagggtacccttttgtccaacagttctttacttgcaaatgttcattgcaatgacttgttggtctgggactaggcctctggcttctgctactctatgaatactggaacctcactgggattcctcttggatatcacattattgccctgtgtcttgtagatcttatcgttttggatctgtagaactggcctgctcatcaatgggtagatgttggggtaggccaattcaaagccctggatcttctcctgagagatcagtctgacagctttcctgctcacaccctttgggccagctcactggcaacccccactcctagggccagttctactgtgctgcccaggtgaggggcagggcctgccctcctaagggctacaacaggtgaggggcagggccagttctcctgacctgatgatcttggggccagctctcctgcctgccataggaagtaagggatggagaagggggcatttctcttatgtccatgtcactgcccagcagacaaatagtggagccaactgttcctcactccctccctcaggccagcctgcctgcacccccaccaccagtgtcagctctactatgctgcccaggggaggagcagggcccactctcccaagcgctttatttggtgaggggcagggccagctctcctgctctcatgatcctggggctaggtctcctgcctgccactaggtggtgaggattgagggtgaggagggtatctctcccttgtctatgctaccacatgggagatgagtggtagggccagctcttccacatgtgtatctttgggtcagcttacccacaacttctgcaatgtgcggcctgctctccccagtattaaagttggctaggtgtgggggtctgctctcttgctcttatgcccccaagaccagctctcccacgatgaccaggtgaggggtggggccagttctgcacagtcctcagacatcaactcatccctaggtggcagaccagaccagggatgtctgctgctatagggccacaaacgcagacgtggctccctggtaatagcacaggctaggatgccaccgcggtcccatgtggcatcaccagctactcacattaagttcttccccagtacccttgcatctctggttctgctgctcttcattgtgacctcctctttctgtttctctttctcttccatttcttcactgttcacttgttcctcttaggtggtacccggggtctctgagtgtctggggtcattatgcccgctcatgcattacagtattaggcaagggtcatctcaggcatggtgtggcacccccatgccccccaggcctgtgaggtgccagactggtggttatctctcaggctagctccccgtcaggcacaagttgccccttgtgaggggatctgtcttgggctcattcctgcctgggatccaggcagggttcttctgcctgtctctggcttgctccacatgctaagagtccatctgggctttcctggtaccagactggaggacagctcaggccagctccctgtccggagcaggaaggtggttatctcagcctcacttctttcagggaatgttaggctactattcagatgttcataggtcacatatgaatgctgtatttatgatcctatacctgtattgacattctgctgagaataggacttaagttagcagactactgtcttctggtggctctccctacattttctcaggtctcagtttcccctagggggaaactctctgcttctgagctgccaggactgttgtggtgactgccattcggagttttgatcttttctattattattagcttttaagccttttgaaccttctgtctctttccataattttgaaattttataagatgtgacttggttatagtttgaatctggatataacctttattttgaccaaaaaaaaaaaaaaaagcctacttttttgcttttttttttccccccattgttttgtttggttttgcccttgaactctcaagtttcagtccctgggcttctgggtgggccctctaatgctattgtgttttcttcccaattcattgtttgtttgactttctgttgtagttcgtgggagacttccttagcttgcattttaactctcctgagttttttgatttctactgtgttaatttccagtgtccacaccccacctcctttgggtactttattgtttattttgcctgtgtcacagccttgtgtcatatgtgtttggtgttaagatctccctcgaattccttggtgatccaaactttccttcattttgtgtttagggttgggcctttctggcgtctttttgtactcagtgatctggatcgtgtggcacgagagagccgagtggtcacacatttacttacatgtgctcagagcctttcacatcagctccctttgcagggtggtacctctgcctcagctcttcatttttcctgagatagatcctgtcttaagtttaatgaaacaacaacaacatcagcaataaaaaagcaaacaaatagaactttagttctaccaagcattgagagtagctacctatgacacagaaaagggggtattttttttaaatagacctgcaaaaaattaccttggagctgggcatggtggtgcaatgcctttcatgtttgaggccatagagagttttaggtcaaccagagttgcatagtgagactctgttgtagttgaactttcactactttgtgggttcttctttctccctctgttctccatcctttttcctcccttccagccccctagcactagatagaagagaaaaaagatagaaaggaaagggaacaagcttatcattacactacttcctgcagattaggggcattgagacccttgggacaaatttgattttcgccatcaggacatctaatttcttcttcttttttgtgaacaactacttaacaaaccgtgaccgacagcaaccaaccaaccatgaccaacagcaaccgaccaacaccaacaacccactctcaggggcctagcatttttataccctctgaaaagtccccagaattccaaatatcacacaatggcagaaattgtctgcagctggcaaaatcacgtgtcctcatgaagcaaatcacagtcagctgctgtgacaatctgaggcaaccccctattccagtcctgggattaaaacaaaaacatattcttacaatatttgtgtgtttttaaaagaaatcaaaattcccactacaccctgtttcagtcctttcctctgaaacataattccttcctttaaagagttttgaagagagttcagttggtaaagtccttgccatgtaagtatgagggggctaagtctcatttacaggcatccatagaaaaggcacagcaggacatgcctgcaatccagtgctggggacacagaaaggcgtgcgccaccacgcccggccagttaatttcttaataacaagtaaataaaatagttatttttgatggacttccaggaaggaagtgggtgttttttcagcccttcatctttagctgaacttttctaagagaagaagtgtacttccgttaaaccctttgagggacaaaggctttcgttggctagaattttccattgaccagtgaattatatcaagacagtgtatttatgtgggaagagctcttcatttggaactaggagggaatgttttttttctggtcttggtctacattactttgggcaagatgctttaatgatgtttaacctagccttagatttttaatttgtgaggcaaaggagatgatgtgtaagatcccttccagctcagatggtatggactattaatattagtctattagtctctcagtaaatcagatcggacgattcctcctcaccctgaagtcattaaacagacatttttcttatctttgctgtctggatttttgctttcagaactgcagttaggacatgctgtagccagtgccttccaaagtctgtgtactgtgaggcaacactggagctgcttcctggatgagaactatgtgttctatacacgtgtgtctagagcctagtctgctttgctcctggtaacctttcctaagtagccattttctttccttcctgaaaatgtctttttataaagatttctaaggaagtagagtttgcataccagtagtttctcaggaaaacaatatagagtctatctatctatctatcatctataatctatctgtctatctatctatctatctatctatcatctatatttatctatctatctatctatctatctatctatcatctatatctatctatctgtctgtctatcatctatctatctatcatctatatctgtctgtctgtctacctgtctgtctgtctatctatctatctatctatctaccaatcatctatcatctatatttgtctactatctatctatctatctatctatcatcatcatcatcatcatctatatctatctatagtctatatctatctgtctgtctatctatctatctatctatctatctatatctatcatatctatctatctatcatctatatctgtctatcatctatctatctatcatcatcatctctatctatctatctatctatctatctatctatctatctatcatctatatctatctgtctatcatctatctatctatctatctatctatctacctacctatctacctacctacctacctatctatttttgagacaggatcttattatgtagcccaggtttggcttgagtcttatgatcccttttccttagcctcctgagggttgtggtttattactatacaccaaaatgcacaggccaaaattgtaatatagtaagaggaccaacttagatgcaaagagaataaactttttttgattgctcatttatgatctacgtggattaatgggtccaggtcgcaaatgtttatcaagcagctgggtggtaggaagaggcacaaggcttcaggttcttctttaagagagtgggacacagttccacttacgtgtagagttaggatgtccaggccccgccgcaaacctagaaaatattaaagaaaaatgggagcagagcctagatacctacctgtattttaaagcattgtttgggtgattctaatgtacaccttggtagatcaacagctaggtgagaagttatgctgtgtccattaattgttagacatggaagaatttgacgagcttggtgatgaacgagagagattatgagcccaggtattggcaggttttcattagctagagacatgaggaagggttgtttcaaggaggggagttccgagttgatggaatttttatagatggagagagaggattggggagagttgcggagaccagaggctgaatatcttgaggaggggtggccctgcacgtccaggggctatttttgagcaatgtttggactgactgggggagagttgggggtagctattggatgtccggttgcaactggattgtgagcatctccagggtcagactaagtttcggctttatcctgcaggtgtcggacgacactgaggacacagaggatgtccgaagaatgaaatgagcagatggaactttgaaggctgagtcaacgggcagaggggtaggtggtaggtagagttcagtggggcaagagtgtgggtaatgggagagcagtcgggaaggtgctgccattgtccagctatgagctcaggatgctgcgaactggggaaatgacagaggaactcaatgtaactgtaacagatgcttggataccacattcacaataagttaattatctatatcttatttaaacttcacactgaccttgcacacccgacacaccttataaatcaaggggtggatatttggaggttatgctgttaaagagaccctcataaaaaccagaggagcccgagtggttggtggtcgtcagaaagagaagaacacgaagtcacaagattggaaggaagcatggtggaattttttagtagctcagggtccagtcgcaggttacattattaaattgtgctaaatgtgcttcaagagactccttttatctctgtggtttgattgtaattgcttcttgaaagggcagggaacaggcaagggaaagaaagctacccttaagtcagtttgcctcagagaagagtctgcaggcctcttctgagtacctttgggttttcaagtggttgagaaatatggttgaattttacctctctctctctctctctctctctctctctcccccatcctcccttcttgtccttcccttctttccttttctataccatagtgatcagaaagacacatttcaggagttgtttttccactttccattctggggttttctggggattgaactcgagtcatcagatttggtggcaggcacctctacccattaagccacctttccagctcttgtttacattttaaaaggctccaggtacaggactgagggtctttgtatccaggcaccttgtcctgaggaggattagctctgacgaggtggacttcttttctcttgtggtctgaataacatcaatggatcatgatggtgtatttatcaggggactagcaacagcttccctgtgacaccacgacgataccagatcaagatgacatcttcacttacagatgagtgaattgtacccactaccatgctcgttcatcgtttaaatcaattatgctgttttgcataccaagatcttgaggtctaaatcaacaacacaggcaatggaatacactttgccatctgaagtatttgttctctggagttcaagtagcagaaggtactagagagctaagggatactgggagaaacagaggcagacatgtatcaccatcgttatcatggccatcatcatcatcatcgatcttgattagattttcctaggaaatggcagggcaggatggaggctgagtcagagaagagctctttgccttgaacaatctgcattaggaaataggacattatgaattaggaaattaacaccacatcctcactgtttattttcttaccgtagaatccggagatcgtcaatggcaggagaaagagcaaccagaagaccgagatgaatttcaacactatcctagaagagattcttattaaaaggtcccagcagaaaaagaagacatcacccttaaactacaaagagagactttttgtacttacaaaatccgtgttgagctactatgagggtcgagcggaggtaggagacaatcgcagtctactctgttgttttcagcgttgacactgttgctctccattgagttaatgaacttgagctgtcattttgctgtcattgagatttgggagctgagatttagcatgtgatagaacgcagcacgagtctttcattatagtttaagataggtagccatccatttggtggcagctctcgaatgaattaatctgccagagaaaatccattcctgtattttataggtccttatagaatttattaggcatattcagcactcggcttttccccacaaaccgccatattatgcatcaaagcccaagctactttgtgtgaacatttcctcaccacctgcagctgatcagttatttggtgaaccatttattgcagtcgatctactgaaggggaatccttcagctctcgatgctaagcatctactgtggtgtttttgatggggttagggagactaaagaaccatatgtttactgagcatctgatgtgggatgttgaggtacagtgggcaagacagtgttggttagacagcgtctggcttcccacaaggaatgtgagtgagtggctatctctgtctgacccaagttaaaaccttgccatggtggacatgatattttctactactgccatagtcttttctgttagaagtaattttaggttgtagagaatggctaggaaccggatttcccttgacaatgtgctagagcaaatgtgggcagggtgaatgcctggtggccctggtgcttggactgaattgtgactattcctatcagctgctgatttacttgttttgtggttgttttcttcttccgtgttttggttccagtgatttatgcagagtggcattgtttctcctgaaccagtcttccttctcctgtggtgtaacactatgaccagcgctgatctcaggttcactcaccattggaccatgttcccttaactataaacccctgcaaatgctgacaaccaaagcttcgacacttttaattgtaaaactaaggttgaagcaagaccaagctcacccttcattctacccatgtccaatacatatgtatgtgtaacgtgactagttatgtcaggtgcctattgagaactgtcatagtatatgatatgcctcctacattctcatgttatccgagaagttcacaaacccaaaagagtttcagataagaattgtttccagaagtaaagattattttaaaattgcaaacatatttggagggagagattggtaagtttttgcattttatggcaatgatttgttataactaaaatttaccatagtaaatccaggaaaatagacataaaacaacacaagtggtaaaaggcggtaacaggtagtaaaggtaccaaccccaaacgtgtagaagcctacactgtcaacttaaatatggagtgatgccattacaatacaactcagcgagggcagagagatggctcagaggctaaaagcactggctggtctttcagagaacctgtgtttgattctctgcatctgcatggatgctcacagccagctccaactacagttacaaggagtctgatgccgttctgtgggagcagcacatgtgaggtgcgcagatacacatacaggcaaaacaccatacacataaggagaaaatgtaacacactggccaactcactctgaagatccttagtatgcgattggcccttgatatctgtgagagggctggctcctttcaccacctcctcagatgctaaaatctattatgtaaaagagtgaaacatttgcatgtaacctgtatacaacctcttatgtattttaacttacctgtatattgcttataatatcagatataatattgatgctataaaactactcattctacactgcttaggaaatcatacgagaaaagacgtatacgttcgaacagatgcagtttccctccatgtattttccagggttggttgattctatggactcagaacctataggtgtgtaaggccaactgtgcaaagttcaaagtgtcctgattgtttaagcagagaaaagacaggggagcccctcgaatttcagatcccagtccactgtctgaatgtgaagcagcttcagtggttgtaagaactggaaagagtggaatgatgtggttgtccaaaacttagaactccctcttcaaacccttattcactgcccttgttttttctggctgtcactcactggccccgtgaccccagccactagccgagttcctttcctgacgctccactcctctaatgtgtggggtggtgtttggattgttcatgctttctgctgtcgtgggtggcttgttgttcattagtgagttgcttcttcagctgatcacaggtttgttgcctctcacagtaagaagtgaaatagtcaccaggggtagggatgctgtagccaggtggtagagtgtgtgcttagtatgtgcttagcatgtaccaagagattgattagatccacatacctaagacaacaaatacttgctatattgaattataatttaaagataagaatcagaattctttaactatctgtacttctaacaatactgggcaggttttcaaatgactcctctctgcctattatctagaaaatccacgaagcccttcatactggagttacttccctgtttgtgggtgtgtgttcatttcctgtttgcagggatgagtcgtcttctttttgtctccctattcttagaaccacaactcaaaaagtccagtgaggttggaagcccatgagaacgttgagttagaaagtaagattctagagttgggctgaaaaccactggaaccatttgagaagtttaaattgtctgtagttcttttgttttcaaaacaaaacaaagcaaagcaaaacaaaacaaaacaccaaaactaatggacagtgaagaggctgcctcttgctttagtagtctccattcttagttccctcatggccattgaatgcttttaatggcaaccctttctttagtctctgtacccagctcctgtgacatgatggccagaagcctgtcctgaaactgttccttgctaatccactctgtgtgcttttcaaagtgtactgagaaagtttgttttagatagatcttcagaaacccagttaaattatcacattggaaaactctcgggccattcgtttcttcagtttgcgtctcctctcttccggtggctagtttgttcacgtttgcgcatgttccagggaactgaggaaacagagagcttgacagcttatgttacccaatcttacaataacacagaccatggtgcgtggtgctgctttctacttagggagctaaatgcctgatgagataggccccttgatttcctggggaggctccattcaatacggggacacaagtcagggaagcacaagactggagtttgttgaaaaagcaaataaacaaacaaaacctcccaaacccaatggcaataacaaaaacaacaacaacaaccaacaataaatcctgctgaataatggtaaagactaaagtgtggatacttcatttcttcttagaatggggaacaaaatacccatggaaggagttacagagacaaagtttggagctgagacagaaggaaggaccatccagagactgccccacctggggctccatcccatatacaaccaccaaacacagacactattgcatatgccagcaagattttgctgataggaccctgatattgctctctcttgtgaggctatgccagtgcctggcaaatacagaagtggatgctaacagtcatctattggattgaacacagggcccccaatgcaggagctagagaaagtacccaaggagctgaaggggtctgcaacactataggaggaacaacattatgaactaaccagtaccctcagaactgtgtctctagctgcatatgtagcagaggatggcctagtcagccatcaatgggatgaaaagcccttggtcttgcgaagattatatgttccagtacaggggaatgccaggatcaggaagcaggagtgggtgggttggggagcaggacagggggagggtataggggacttttgggatagcatttgaaatgtaaatgaagaaaatatctaataaaaaaagaagttaataaaaaaaacaaacatagattaaaaaaagaaaaatgttgagctgtttagtaaaagaaacccagtactatgtgaattttgcaacaattattactaagaaagcaggagactttagttggacagcagctggtttgctggctgcagtactgtctgatacagcacagagtctataaagtcaaaggggccagtgtgacaagccaggtgtcccctccctcccctcctcccagtcccaccctcccaacctcttccccccattctgcctgcctcttctcagagaagggtagcctcccaaccctggctaccaacccaccctggcacatcaagtcacatcaggactaagagcatcctctcccactgagaccagacaaggcggctgagctcggggaaagggatccacaggcaggcaccagagtcagagacagcccccctccaattgttaggggacccacatgaagaccaacctgcacatctgttacctatatgtagggggcctaggtccagcctgtgcataagcaagcctttcttagcttagcattctcaggcacactggttataacttttgaaacactgactacgtgccagacacagtgctaagtactttacacacacgggcttctttgctttcatttcagaatgaggaaccaaggcaaagaaagataaaaggccttgcataaagtgtgccatgctagaagttgcatattcttacaagaaattgcagggctgtttcttcaaaacctatctttgaaaccatcttgctactccgggaaaaattagagtagagtagagtagagtagagtagagtagagagagagagagagagagagagagagagagagaggaaggaaggaaggagagagaactgttataacctgtaatacagataaaatttaatttgagtgtattttattattttcagttacaactgttgtgaatttttttttgtattaaaaaaaaattcacactgaacaggatatttttttggtcctgtctgcctctaattggatcttctaaaataacactttcagtttgtatatgaagtttaaaattatcttatgtagattgaatcttttatatgcttaacttcattttcatctccattttgacagcagcacagatctgaaatgaaaggctcagagtctcccagagtggtagacaagaacaggctcttgtgccaggtggatggtgtcatatcaccaggttccatggcgacaggggctctggggttggcacccctagctcacacctaagtatctattactttccttgggtggttcatttgttgtaagtcagtggtaatagggttgcctggtaaattctagaaaattctcaaacttcaagaagaggttgtgggaagttgtggtttggaatgaagtcagttcctaataacctagggacccactctgtaagcattatctctgacgcttgcagggctgaagcctttatcagcgagtatgagctccggcagtgggtacatgttgccgcactgaagggacatcctttggggctttccctaaagaagtggttccgtaccaaagctctgcaggggccgggtatctcaatgcaagggttaacagcttgataggaagagggtggtttctctggtgagggctctgctctgcagggcaagggtttccccagtgaaagttctgctctggcagggggaggtttcctcagtaaaagctcgtcttgggcaaaagtgttagagctctgctcagagaatatccttacaggctccagccaaggaataccacaaagccggtctccactccacggcaaagttcacttgtcagagatttattgggagggaaaaacccaggaggggagctgcctctgttgggggagaagcaacagggaacctagcaaaaggcagggcttattatacaggatttcttggggacgagatttccaggttggcgatttccagggtgaggattggtgggatttaaatgtctgagcttgggcaagcgctgggattggattgttgcgttttcctgtttggggattggtgggtttctatttcttggctttggtcttgggcttggagtcaagtcagggtcaagatgtttttcctttgccctttgaccctacacagtctcagaactgagtcctaaaaattgtagctcagccaattggtgtctagtgagtgaggctaaccgaagttcagattctcattcttgtacgtttctagtgtgatatgtggtgctcgaggtattgggataatgaaaaagaaagcctttgtttgcttgcttgcctgcctgcctgcctgcctgcctgcctgcctgcctgcctgcctgcctgcctccctccctcnnnnnnnnnnnnnnnnnnnntttttttggtcctgtctgcctctaattgggatcttctaaaataacactttcagtttgtatatgaagtttaaaattatcttatgtagattgaatcttttatatgcttaacttcattttcatctccattttgacagcagcacagatctgaaatgaaaggctcagagtctcccagagtggtagacaagaacaggctcttgtgccaggtggatggtgtcatatcaccaggttccatggcgacaggggctctggggttggcacccctagctcacacctaagtatctattactttccttgggtggttcatttgttgtaagtcagtggtaatagggttgcctggtaaattctagaaaattctcaaacttcaagaagaggttgtgggaagttgtggtttggaatgaagtcagttcctaataacctagggacccactctgtaagcattatctctgacgcttgcagggctgaagcctttatcagcgagtatgagctccggcagtgggtacatgttgccgcactgaagggacatcctttggggctttccctaaagaagtggttccgtaccaaagctctgcaggggccgggtatctcaatgcaagggttaacagcttgagaaggagagggtggtttctctggtgagggctctgctctgcagggcaagggtttccccagtgaaagttctgctttggcagggggaggtttcctcagtaaaagctcgtcttgggcaaaagtgttagagctctgctcagagaatatccttacaggctcgagccaaggaataccacaaagccggtctccatggcaaagctcacttgtcagagatttattgggagggaaaaacccaggaggggagctgcctctgttgggggagaagcgacagggaacctagcaaaaggcagggcttattatacaggatttcttttttttctttttttttttcctccttaaatgagatttagaaaacatttaataagatgtttacataaatcagtttttcaagttttttttttctttccattttttattaggtatttagctcagttacatttccaatgctataccaaaagtcccccatacccacccacccccactcccctacccgcccactccccctttttggccctggcgttcctctgttctggggcatataaagtttgcgtgtccaatgggcctctcttttcagtgatttcttggggacgagatttccaggttggcgatttccagggtgaggattggtgggatttaaatgtctgagcttgggcaagcgctgggattggattgttgcgttttcctgtttggggattggtgggtttctatttcttggctttgatcttgggcttggagtcaagtcagggtcaagatgtttttcctttgccctttgaccctacacagattcagaactgagtcctaaaaattgtagctcagccaattggtgtctagtgagtgaggctaaccgaagttcagattctcattcttgtacgtttctagtgtgatacgtggtgctcgaggtattgggataatgaaaaagaaagcctttgtttgcttgcttgcttgcctgcctgcctccctccctccccctttctctctctctctctctctctctctctctctctctctctctctctctctctctctttcagcttcctgagagctggggacagggatcatggctcacccatctgtttactgctgagggttttgcacgtgtggatgctcagtatgtgatgtgatacatagttaagtggattgcagatgagctggggaaacctttactcaggaagcaagtagagtgggattatccatgaccaccagatgtttgattcggtctttcactgagattccctgacaggaaatgaaagcaattagttatagctctgacatcacagactgttgaacatcttggaaatcttttatattctagagggcatcctgggtcatatgagggttgttttctttagctcggcttggaaagctagaagctcttagcatcacagggataagagccaccaagatgaatgcttcttccttgtaggttagttcatcaccaggtggatacctcaggcatacaggccttctagtccctttccaaaagtttgcatctcatagcacctcattgcatgctgggaagttggtgtggcatgggataataattcattcttactgcagaggctctggaagcatttgcatcacgctgtagagctattgctgtagatgtcagagccccctcatcccagggttgcagcaaacactgtatgacttaaatcatgaatggaaccattccttagttcttccctacacatacatatttctgataaggcttaatgtaaattttatatatagaaagagattactaatatttggtagcaaacagaattagctgtatcattacatgaaaactcatttttcttattggcatttgagcctctctgtttctgaaataaagtggagttataccaacttctcgtttctattttacttccctttcttctgtctggtcttccatttttgagttttgtttgttgtcttctccttgatacctgatctgcctcattaattatttgaaaatgacaagatattaggtcagaagtcataggactgacattatcttaatttgctaaattaattatcttcattgaaaacattccccccttttccttaggatgcagaggccttttaaaagggtttattttattttagtgagtgttttgcgtgcatgtgggcatgtgtaccatgtgtgtgcgtggtgcctgaggaggtcagaagatggtatcagatcccctggaactggagttaaaagtggctgtgaatcaccttgtgggtgttgggtattgaagttgggtcctctgcaagagcaacacgtgctcttaagcaatgagccatctctccagccccaaggtggacatctttttatacccacagaacaatggtacagagataaatatgcaaacattgcggcagagtctgtagtcacgtatcattcaggtgcccaacgtctttacagctgtttctctatcttcttccttcttcaccccaaagtccaggatataattcattaacacattaacttagttggccctaaaattgttttttagtgctcttgatgaaggaaaagaaacatctgtagaacacaagtatatcaaagattcccagtgagtacgtataccagggcccagcaaaaaatcacctcaggttctcgtgctctggaaagattcaaagattcactcatttatttttttttttcagttgtgtgcatgtgcctgtgtgagatactgtccactaagtgcatagctccccgtggaaaacagaggacactaggtcccctggagctggagttccaggtggttgtgagccttctgatgtgagtgctgagaactgaacccaggtcctgtacaagagcagtggttactcttaagctccgagtcatctctgtaccctaagatgctcgctcgcatccttatgctccatgtctttgaggatggatgacctccttcttcacaaatttattgtttcagcatggtctgctaggatgttaaaaaaatcagttgttatttttgccaatttccttgatgttttattattttgtgtcaaatcagtcctggggtatatgaaaggctttgtataaagaagaatatagtatccccaatgtctaaccaagcaaaaaggaaacctgatcagaatttaatcctcttagaactttaggtagggacaataacaaaaatatctgagagcaggctgtggtggccgtgcttcactggttatgtgtggtttaagagagacaagggctataagagagatcagcagtttccctcagaagtggtattgtctgctttaatttatttataaaacttagctctcagcagtgcttagcaatatcaacaagacaatttccataaaagttttcttcattgaaatttcacaagccttagctctcagcaatttttagtggtaatcaaaagtcaagcttgcatcaaagttttatttagctcttttttcccccactgaatatattcaacagactgtgctggagggaccgaaggcaattataaaaggttggcttccagaaagcttgggaagtagcgcagttgaagtcaactggttctccccacctctctcttcccatccatctgctttgaagtgactgacttgtctttgccacgctgtagtcagcttcttatagaagtttctttcctaagcatgctgatgtcacagtcacagtttatgcggtgagcattttgtctctgttggaccaggaactgccaggcttagagatccttagagccctggagttgcttccttgaaatttcattttcctctaaatgtcggttgataagaatagggatgatgctgggagataagcatgctcaaactctcgagcacgcgcgcgcgcgcgcgcgcgcacacacacacacacacacacacactctaacctccaaagcatacacacacacagaggcacatacaccctatcccccaacacacatacatacatatagcctattccccaaaagacccgcatacacataccctatcccccaaaacacacatacgagagagagagagagagagagagagagagagagagagagagagagagagagagagagagagagagaacaaagaataggaatggttgatcttacttggagactgtttaaaaagagatcaaatttagggaatggatatgctttagctacaaacacagaaattgtgatttttaaaaatttattatttatttattcactttacaacccaatgttggcccttcctctcctcccagttaccccatcatgcatgtcctccccccacattccaccttcctcttctcttttgaaaaggaaaggccccccccactgggtgtcacccaccctactcacacccccctttcccccacagttttctttgatgtatagataggggttgggaaaggtctggccttccaagaccaagcacatgagaatggttaaacagagagaagacactctgtgcataggggacagcatgtgcaaaggccctgagaataaaactgggcttggcgagactagaacttttatggtcccagacctgtgtggatgtatataataaatagtgatatggagggatagttggtgtgtcataatgagtaattatacatttttagagcttgaagagactttcaaaaatggcctccaggtgttccagtttgggaaactgaggataaagagaagatttgcttcaggtcacctgattaactggttaactgatttccagcctagacagaaaacccctcgttttctgattacaccacctcagttcaggagaggatgtgtgtgggttgtgcaaacaaatgaaagcactctaccgtatcagataaccgccgtgtgaagttagagcagatcccagcagcctcagcatctcactcgggggaagaacaagtgactggtggggctctgggttccatcccagctccaggtaggagggtgtgtgttcctgctttccctgaccagctagcagtacatagtggtttcccaaactgttgttggataacttaagcgtgtcacagagtaagtacttcacagtattaactcaggacagcgtctgctgtttatgactgcagggctgtgatcagaaagtatgtggggaaagcagaaatatcattagacaccgtcacgtagctgcccttttcatttagttcctttttattgtttttgaggacatctattatttatattaagaaaggttttttaaagcatttactgatgttaatctctctccgagtaaaaagtggacattattagtatataccagaagacatacatgacagaaaaagtagacgttattatataccaggagatgtcacatgacaattttaaaaagtggacattattattatacaccaggagacatcacatgacaatttgaaaaaagtggaactaccctttgaattgtttttcacaagtagcaaagtataagcagaaggggacttagaagcctgcgtgtcacacaaagtgacctcagtggggtggattgttttaattttatcaggaaaatcctaacactgctagctttgggctttgtgagtagactgtacatccaagataaatgttgaagtttaataattaccaatgacaactgttatctatttcttagaccaactttatgtttgtcttttttgcttttaattttacagttcttttctttgtatgtaccccagaggtgtctcaaagacaggatgaggtcactatgtagctcaggctggccttgaactgcccctccttgctgggttacaggcatgaaatactattcttggcttaaccttttttttttctctttctcattttagaaaacaatcgccaagatttgcaaataaatacgtttgtaagtttccccaaagaaaaattgttcagaatgtgacaatatagttgtttatccagtaaacaactgacaaagaagctttacagactctctagtgctttgtagtcagttgtggggacagcatttcccccattatatggtatgcgaaaacaacaacaacaaccaacaatgcttcctattccatctttattcctagatcctttgtgcagagccacctgcactcactgctgcagaaggcatgcaaaccaagccttcccttgctgtccagactgcagcatgcaccctcactgagggtggggcgtaacctactggtagcaagcaccatcatgtaatatatggggtttggctcattttcccaagcacagtggcgggccagtcagtcggtaccaaacaggggaagcagacttattagagagtaaattctggctcagctcagctcacagtctgattgaaccccactaataactgtaggcttctgctagtttctcctgctgtctggaccccatggggaaggtaacctggcctcctctcctgcagtttctgttccctgtctttgttggcagggttgtttacagatgctgtggctttctaattaggctggattcttagctttccagatgtgctatggtgccattgtgcctacaggaagggttcagggttcccttctatccgtaaattggttctggagatcgatggagacacaaaggttctgcgtgtgtcctggtgtggctccgtcttatcagctttcccataaattatgcctgtaaattgcccacagcattgtcacgcgctgtttcacaagtgaagaaagaacccaggacagccaagtcaggtgcacgctcatttgagtacatgcttcaggatgtcttatctctctggctagcaccctgactgtgaaaccacactgtactactttccacgcagggggacttccatacacatcttcactgaccacctagccacatgggcttccttctgcctcacttcccttggctctgtgtctcaggcctcgtaaagggccacctttgccacccatttacccctgtttcttccttaaggcactgtgggaagtgatggctaccttatgatttaagaatattagagccaatgtctacttgcatttattgatgtgtccatttgagcatttttcctcctaggttgtctgtctttcttttacttttttttttaataagatataggatatgtgttctaaatcaagatatcaccatatacaccatatatacacaaggatatatgttttatgcttgtgtttgtgcttgtctagtctcttcttctaaaattaaatttcaatttatttatttatttggtgtgtatgtatgtgcgaatgcatgtatacagttcttcttcctgcagtaaactaggcatagcctgaatttactattgtaaccatttggaatgagccagtgacagagatgagttatataaaagccacaagaatttagtttcagaacattttcatcaatccaaacagaaattgtccatattttaaaacaacaacaacaacaaactgaacacgattcccctcttctcccacctcctggcaaccatcagcctgcttcctgttaagaagggcttctactcagttgattatgtaaataggatcacaccagtcatctttgttcctggctgctttcactaagcatgatggtgtcaagagacattcgtgtagtgtgtgtttctatttcaccccttcttctggctgcatagtactcctctgtatggatgtaccacattctattgttcttacgaatagatagatgttaagattccttctccattttggctactgtgaacagctgctatgaatattcatgttttgtgtagacataggctttttacttctcttgtgtacagagggctacactgctctgcctttgagaagctgtgtttatttgtagtttgtttgtttgttgctagtctgtctttgaacttgtggtccttcttcctctgtattacatcggtgtatagcgaatcctccatcactcttggctctggtgtactcctggccttcccagtggccaagaggtggtgtctcactgtggttgccttgggctgacgttgagagtcttttcacataccttaatttaaaaaaaaaaagaatatagataaaacttgtctggcaggactggtgccctcccaccctcaaagaaggtctgctcatcaatattaagcagctgggggccccggtttttggctttgtgagattctgttggagtaagcattcccactatgtcttctgtctgctgtccaacatgatactgaggacagtgctaggtaaggctgttctcatcagtagctccagagcaacaaaggaggggaagggagggtgaagggagctgtactgaggctgcctggttgtgcgtgcaggacagtgcaaagccacacagagtaccattcacacagtagtcagaagagaaaaggatttaatatttactattgacccctaatctttaaacactgtctcttgaggcatgctgtactgttgtaagagaaatccaaagctgaggggacttaattaaccagcctattggctcccagctgattagtgtcaggatttaaataacccagatcttccttacagcagggctctctcctgttcatcaagtattatgggttggagttttcttagtccaccctctggcttggtgatttgcagattcacaagatttagcacattgctgtgttcagaactgtcatttgttaagtgaaaagaggcagagccacatgaagaaagggggaaagacttatacagtgaagtctgctaggaaccctggtgtgagcttccaaaagtcctcttgcaggggtatgcttaattaaccccagcagtgactgtggaattcgctgtgtccgtgccttcttcattgtttgccttcaattccacatttccagggaaaaaaaagcaaaacttcggtttttataaactgagcccagtgagtcagtcagggctgggaatgtgacagtgtccccaagccttctcaagaagagctgcccaccgcagtgtgttgttttcttcacaggaaccagattcagaaggggtgaactggcaagaggagggagcaggtctttgttaccatctgtagaaaactggatgttgtatggttgtctaaacccgcctgccccagtcgagcagatgtgcgcacatgcgcagcacctcttgtacagaacgcagtggctgcttggaagtttctgtggcgttccttccaagtctgatgagttctgactgcccagtgcagatggctccgagtggcttcagaagcctgcctctggaatcttggtgactttctctccccaacccgaaccgccccccgaaaaggcttttaccagaacagctgagccctgcagtttgtgttccagaaccccagacaccctgtctcctctgattcacattttacgctgttgaagttagatgagaagcattttcctctgcctggcttcctttgtgtctgggtcacgtgcagaggtgactgaggtgtttgtgggtgtccagttgtgggtgcacattccaaacactcttctgggggtggggggagagctgttctgggaggaatcagcccttgtgcctggaggcttctccctctaacgaattagcctcaaaccgagggaaaggacacactggctgctacctgcttctcagtcctcaagtcaagggaagagttctttcctgctgttttcttggtttctgctccgttggctccttcggtgtgaaggctggaaggtgtgagagttgggcagagcagtttttttggctgacttacaaaaagcactggtcttgacacccaatggttctttgcacttactgttttacccgacactgagcaggtagatgcatcagcgccccgagatgatgacagttacaacttcatgggggtggggggaggcggggtgggagctgggcagggcactacatccgaccacttttctgtagagcaccctggcttgaatgagcctccaaggaaagtcagtaacattgctgatatgaggtctcagggtgccggaatcaattttagttgtgagcgcttgtattgacttaagacaacaaaatgcttcacactctccatcccattcctttgagactttaataattatgttcagatggaatttactgtgtagcatttttaatcagtaacgaacattttaaggttattgtttgaaaggattatcagtgtgtgtgtgtgtgtgtgtgtgtgtgtgtgtggtgggggatgggaagaaacaatctgtccaccttcaacaaaccagtgaactctgaggctcattccagctgtcgctcatactggctcagtgaactgaacacttggtcagatgcgcaagaataattttcattgtttctcctaccacaaggatcacccacagtcttcagccaggtagaggccagagttgtaaaaaccaatttaaatatattcctggggtcctgaaaaagacttctgtgtcagcttaagtttatgttgtaggaattgaaattttagccatagtttttaattttgttatcttctattttaaaaaaaatattttattatgtattttcctcaattacatttccaatgctatcccaaaagtcccccatactctccccccactcccctaaccacccatccctactttttggccctggcatttccctgtactggggcatataaagtttgcatgtccaatgggcctctctttccagtgatggcggactaggccatcttttgatacatatgcagctagagtcaagagctccagggtaccccggagctcttgttatcttcttgatacttatgagaatacattaagtcttcctgtcatgtgctttacaaaaaaaaaaaaaaaacaacaaaaaaaaaccaacaaaccatactttttcttatagctggagacaaactttcactcttgtttgtagcctaggttgtctttgaacttgcttcagcttccagaagactaggaacccaagtatgtgtcaccacccctgactggaaaccattgctcttaagaactttgtcttcgcagatctcctaattctttactcaacccccccccccaacaaactttttaaaaaaagaattatttatttatttgtttatttatttatctcatgtatatgaatacactgtagctgtcttcagacacaccagaagagggcatcagatccattacagatggttgtaagccaccatgtagttgctgggaattgaactcaggacctctggaagagcagtcagtgcgcttaaccactgagccatctctccagcccctaacaaacttatatatacccctccaccagccctcaccagaaacagagcactgagagcttccttatctccttacccccttttgggggtggataggcagggtcttactatgcagccctcgctggcctgaaaccctgtaagtgggccaggcttacctcaaactcacagagatctacctgcggctgcttcccaggtgctggtgttaaagccatgtgccaccacgcatggccccgtcccttcatccactttctccatctgccttgaggctctctgggtccttcctagctccctcactgtcagcacagctggaggaaatatccttggacctcctcgatggccctgactctttgtgcagcgaatgattggcagtgtctgcccatgcgagttccacggaccttgatctggtagctccttttctccttcaaaaactctgcttccccagcatgcctctcatgtgtgccccttgctcacggtctcttcccgcttggcatttgccatagtgtacactgtcttttccgtggcttctgttagcatcttgtcctaataagtttccctattcctgcgtctcattctgaggtctgaactcatccagttctgggattctactttctgtgtatagctcagtcctgccctttgcccttttcctccccccccccacgcccacccgaatccacaccaccaccgcttctaaggcaaatacagtaacctctgtctgtatcaggacagagttacctgttaccacgagatccctgactggtttcaaatgtagaaagtgtttttcttctctcagtgtagatactgagagtaaagcccagaggcagctcaggattcgctccagggctggatccaaactaaaggaccttattcttgcctttcttgccattctcctcgtttaccttctttaccgtggcccaagatgacaacttgcgctttagccatcttatcccagtggaagccgcaagaagcaggagaggtgggtgggcaggaggagctgtctcgcgccagagccagctccctttagcaaccttctcttgtgtttcacacagagccttttcatcaaccatattggtgagaacttagccacatgatgagattgaggtacaaactcttttatattcttgacaactgcataccttccccagagtgggtgccgttagtaagaaaatgggcattgtggtagacaactagcagccactgtatatccactttcctccatctactgtgcacagtggctctgaccagtgataaatggacaaagagaatcatgtgcttccctaagacttgataggaacatcctatgattcccgtctgcatcccagaagggaaaccactggctaccctgctcccagggacctgtatcccggcttctcttcacttcccctccactcttctgagttctgatcctcaaaggtttcagtgcctcccacaccccactgtggagtctaggcattggctgctccctctttctagaacacacgtccctcagttgactgactcagagctatctatttcaaatctcagctcagtgaccccatcttctctaattctactccgttttccctgcttagggtaggtttccctgtgtggaactgggatgcagctcattggagtggatgtgctagcatgctgcagggcctaggttcaatctttaggtatcacctgaaacaacaactcaacaccgtatatgtatatatctccctgtgtgatggaattttccatctttatgttacttgtctcttttaacacatgggtaggttttaatttactattttaatttattatcagcatgattatattatcttctttctctggagaatttgggattcaggactaaggaggcctgtgtgcagacttcttttgtgtcacgtctctggaaaggagaacgggagagagaagccttgcctggtcatcagagatacagagcaggactcagagccatatttagagccatcctaccatgctcacttgctgctgtctgttcttagggaggtggttccctaagggcacaagttctaatctttagagccacacagctatgtttgtagcagtggcagcaggcattggagcaaactcgagtctcaatttcttcacatgtcagtggagcaaacaccctctctgcaaggctctatgtacatactaacctgttggaatattccagattcctctcactgtggcttagaagacaaggagatggtggaaacagagatggaggtgaacagcttccctccatcaaatacttacacagcacgtagagaagggggcaaagcctcttcttctctgcttattttagtttttttctggcagagaccctaaaaattagataagcagtaatccttcccagtgcgtgggcacttccataggaaaaggaagatggaaagatggcagttaaagctaaaagctcgtgctctgggagacaagctgtaaaactgtgacaagcggatgcggctttggctagcccaagaagcaaagatggataaaggtgacctgcacagggcgtgcatgcatatgagttgcttttgtgttgtgccagaacacctgacagagaagcttaggagaagaaagatgaattcggcttagagttttagtctgttgtgtcagggaaagctgctctctggtagagggagtgtgtagtagacagagctctttacagcagccagaccaggaaagcaagagagcagtatccaaagcagggctagactggaacccaaggcatgactcccatgacccaccatcacctatggttctcaacctctgggtcctaactcccacaggggccacacatcagatatcctgcacctcagttgtttacattatgattcacggcagtagcaaaattcctgttaggaagtagcaacaaaacaattgtatggttgggggtcagcacaacatggggaactgtatgaaaggcttgcagcattatgaagggtaagaaccactgatctaccgcctttcaatatagcacagcctggtacttaaacgtacgcctttgggaacattttcccaacaatacacatggttctctgtcagctccttgtccaaggtgatggggacatgtttcttactgtggctgtggagacactccccaccgggggggcgggtggggggggacttcaaggaagagagtgcaggtcagtgtgccttgcctgtatttgatatttccagtgctttctaacagagaattgtcctatccatccctgtctactgggggtggcattccatgtgaaaatatgtcccagactatgacgcggaatcagaagggaagcacaggcagggtgatcccagagccacccacaccagtgtttctcaacctgtgggtcttgacccatctgggggtcgcatctcaggtatcttgcatgtcagatgcttacattacaattcataccagtagcaaactaacagttaggaaatagcaacaagataatgttaatgcttgggggtcagcacaacatgaggaaatgtattaaagggtcacaaaaggttgagaatcactgctctatgctgtgttacccctggataagtctctgatcccctttggctggccaaattgtgcatttgcacaggagtctaccgtgcactaatgctgctatttgctagcatccgaggccatcttagagcctgcctgagtggtatgtgcgtgcctttcaactcttactgcttgagtgaagaggagaagctttagccaaaggtgtcccctgcttttgttcacagagtgctcctggcctctgggtgagtcagccccctgctctggtttcaagctgtaagtgagacagcttaaataagctcaaaggctaaaaatagcccagtcacatgaaccgtcagtcatcttttttagagaagatttgcaaaacccgaggaagtcaaggtaaattggttgaaaacaacagatgttgaagccagacaggatggcacaggcctgcctctgggaaacagatgtaggaggattgctgtgagttcgagtctagcctgatctacagagtttcagggcagtcaggactttatagctagaccctgtgttagaaaaacaaaacaaaagaagaaggaagaggaggaggaggagggggggggaggaggaggaggaaaagagcagatgttggtggacagtggtcatttctgtttcctcttaaaatcttagagaacttactttatcccccatgtcccaagctggactctcatttcattttatttggtaaggcagctgatgtttgatacctgacctcccgtgagcctcactggagtcttgaaggttgcagtgagtgagtctttccttatgtctaggatccagtgctgcacctttcctaggcctcctgtggttttagagtattagtagctaacttaaggtagcacttgccatgttcccgtaatacaaccaatttaagcttatcccaactagtttacaaacaaatgagactcagactatggttattttatttggctttgacaattactacggagtaacccctaatctactcttctaactgctggcttggctacctccccagcggtgtaccccaaaatacttgctatttctcctggccatgtgctcatggtccatcttcccccatggcggcttcctctgtcctccttcctccttctccccctggtctctactcctccaaccaggtcagtctaaacccacctacctctaatccctccagtaatcggctgtagccaattttatttaactagtagttttaaatcagggggaaaagttttgcacaaaagcttgtacacatgagaaattactcataggtctagacctttggtagcattacagtacctagcagcagaccaaacctcaacacagcttttcccctaatgcaacaggaattgacagtttaaattcttactacaagccaacagagttcttgatgctgttactcatcgcattttatagctaggggaagaggtacagggagcttggatcagttgttcaagaagagtccagacgctggccacttcccacttcagctccccaggtacaagcactcatttctttatttctcgtgcgcgcgcgtgcatgtgtgtgtgtgtgtgtgtgtgtgtgtgtgtgtgtgtagggttctgcagagcaaactaaggccccgttacttataaagcaagcacatcaccaactgatgtcctcagctttactttgatgcatcttaatgtaccagtcacccggatacttaaagtttctagtcctggcagagcatcttggaaactacatctctccaactccccatgctttgtgcctcccacagtctttcttcttttcttttttgggggaaactcttatctgtgattcaaggtctgattcagggaagtgtctccctcatgaggatttctctgatctgtcccctggaccaatgaacctcttcctgggtcccactgctatatcccaccccactatagaagttcttcgtccttggttgtctggttaacagttccctgtatcttaccagtagaagctgtataaatgttgggtaatgaagctggaaggaagaagatgtaggagagagaacaggtagtgtaaagggattcaattgttagtccctatttattgtccttcccaagaagcatgtaactttgatttagaagtggacactcagtgtgaacccccatcctttcatgacaaaacgtttgataaatcatgatgtttacattcataatctccataagccatgtaatcattttggcaatcaaaattgcctataatgtaaaatgattacccctattctaggttagttaggtgaatctagctaattaaagctaatcaaattcaaacattttcctgggtcaacaccagatatcattgcactttgttggaagctagtggtggccacaccacacgtgcctctgcctgttacctgttcagtccagcacaggtagtaggtactcaacagaaggtcacacagataggaacagccacagtgctaggtgtgcaggctgcttgtggtagatgggcaggttcaaactgtactgagcagaataatttgaaataaccagtattggatcatttttgtcctaaaaacaggacagtctgtgataatgtgacctactaaccccttggcgaattagcaagagaagcctagtctctaggagaccacttaaaagctggcatttggtagaatggaggtttcagatttgttcagtgatttcatgagaataacctatataatttcttgaagccatccaaggcagttgctgtctggatgtgtggtacccatgctccactcaccagtgcagaggtgagaggaccagacagcaaactgctgccactgtgtgtcgtcgtcctcagggcactttggcagtggatggtgctgagagacttttttgagaatggacagatgttctgcaatctggagctgagagttaactacactatcgagcaagctaagtggggatgaagagttcacgggcacctcagctgcgagagtcggtgggtgaagagagtagccgtgtagcctggagtgagcgcctctagaaaccctttctactctagatggttttccatgggatccccagcttgattcacccctagctggtttatttcagcctctgtgctgaaatcgacaggcagatgctaaacctgccatcacgtcggtagggcccatagctctttgattaacagtggagaactttgaactgaatggtggatgcaggttgctgtgtgcacttgacttttgagaggtgtcatgtagatagcagtattgttgggtctccaaagctcatttcctgttttgagcccacagtgcctaagaacagccagtgcttttggtagtagcagttaaaagaatgtgcccatgtctcagctctgtacattgattataggccctttctgtattcccatggaaacattattaaaactgtgtttctgacaattttgaccatttaacattttggtaagcatttattaaaatacttttaaagttttaggtttttgataagctttttaaccttttattatggcatatttcaaacttgagagtggacagagcagtgtagtaaaccccttgtacacagtaagcagcacatagcatactctcctgcctgttccctgtgctggcctcaaaccctcaggcccatgctgtgtggcattcacatcatctctactccagagccttcagaatacaagctccacaagacacagggtatccagtttaagcaaaggcacagtactagctctattcctaactataccaatggaacttccttgatgccatcacgtacccaggctgaggaagaaattgctttacaaataactttatctatagaatgtgtccaagtgataggatgtgttacaaaaaatactgtaaattgaattttttcaacactaattgaaaggatattattataggtattgacagtacgggagcttacagtctcaggtggttagagtccatgattatcatggtgggaagcatgacagcaggcaggcaggtatggtgctggggcagaagctgagagcttacgtctgattcacaaacacaaggtaggggatggtgtgaattttataagctcaaagtccacactcagtgacacatctctaacgaggccacacctctagatccttcccatacagttctacccagagggggtgaaacatttaaacatatgaggcggtgggaggcattctcattcaaaccaacacagccagttttaccatatgtttggggggacccgaactcatgtcctagtgtgtgacagtaagcacttcactcaccaagctgtctcctcagacccagcagtttagtattttaaagctagagacccatgcagacagcaagaaaacagcacaactctcaggacagcttttttgaagggcaggttaaggctctgcctttgcagtgctctctctgcttggctcagtttcaaatagttcatgtttgcagtctacacttacctgcatgcccctgtgactgtgttcccttcgtggaggaactttccaggtatgggcactgttgaggcaaagttctcaacaagctgtgagcttcccaacttggacctttctagcaacctagccctggggcaaccccagggtaacactgtagggtaatacacgggctgtcatttctcatcagattaaccactggctgtggtggaaatgttgattgagtcccacaggactgtgtcttctatgctgtgtatttcatttccatgcaaaagccctggggctagactcccgtctcagttgatagttacctctggtgctcacacagtcctcaaacgccaggcacacacttaatccaatgggagagttgaatcatgattctaattatttctactctcatgaagatatgaagtgttaggaagaaaaaaaaaaaatacagatcacatggagatagacagacagacagacatccccatcacagaagcaaaatgctacctgtcagtgtgaactatagaaactgaatccagagatgcctgggcctgtcttcttttgctgccggccagtgaggtgtcctgttctggtcagcagtgagcaccatagcagaggcaggggaatgtcctgactgcatttactggatctgggaggatttcaatgggactgttaggtgcagtaacgcatgtctctaggaactgtaattgcctgcattgacacagtctttttttttttttttttttttttttgatttttcaagacagggtttctctgtgtagtcctggctgttgtggaactcactccgtagaccaggttggccacgaactcagaagtcggcctgcctctgcctcccaagtgctgggattaaaggcgtgcgccaccacgcccggcacattggcatagtcttacatgaatattgtcctgtgattttaggaatggaaatgaaagttttgccttgagattttcaacatcgtgggtttttttctctgaatattaacttgatctcacctaattgtccgagcagtgataggaaccatatttaaaaccataatccttaaaaaccataatcttcataactaagccactcttacgtgtaaccactaagttgttaatattaaggcttttatttttctttaaagaatggcagaactttatcaggtggaaagcacccttattagaatgttaggttttgtcattctttgctttatctcattcttattaaagagaagccatcaaccatcaaataggaaaaaaactttggttttattcattctagttctcctgatcctggaagagttcatatcgaattatttccagtggacacaggaacatgtcatagccacccaggactttcctgcctctccctgattaatggcacctgccacacttgggccttgttctctgaattgtgcacaggtggaagaggacaaagttacccgtatgaatgggcctttggtgctcatttgagacttttagtagaccatgtccctcatttctgtggatgagcaggtggaacctcaagaacagagttcaccctgcggttgctttactcctttttgtgggaatgccaggcaagagcagcttaaggaaggaaaggtgtatttggctcattgctagcgtgcacgcatccatccatcatggtggcaggaacttgaggctgctgggcacattgcatcaacaactaagaggcatttttgtttcatggatctcttaggcacagtaattaaaacaaggtaactttggctcttacaccaagttacgccgtgtctactccacatgcaccgggaaagagcagaaatctgtatctataaagagggcggtcctgagcacttccaggtccttccaaacagcccagctgctagttcggtagtcgcagcattggcatgctctggcctgattgtcctttggttttacctgtcatagctcatggtgacactcaaaccccaaactgtctatcattgttcatgcacaaggctgtgacctgactccccagtgccacagtaacagctaataattattaactgccgcgtgaagaatgtgggtgctgtccgggacgccagcagggctgtgtacttcaggtgagatataatgaggttctaatggaggcgtgtagcagtgatgcccagggtgagccaggcacagagcttcggagaaaaactaggagcactggatatggtgggaagcgtggtaatggtttgaaggatggtgtgtccccaacaataattactttttcaaatatatgccttgtgattgatctatatctatacctatcatctatctatctgtctgtctgtctgtctgtctatctatcttactacttgctacccattgagacttgctcaggagagaccccaattcctcagccttatatgtgagcattgcctaatctggcctcaaacagccttcctttgtgtcatttcctatactcctgatccacccctgtgttcagccactgtgctttggtttcagttccccacgtactctcagagctctgtcgtttttgcagcctggaaccttccttgctttctccacagagaaagctacttccttagaagcccagcttctcctccatccacttcctggctttctcattccccgattaggaaccatcctcttcttccgcccacagcattcctgcgatgacggtttccacagaccgtccgccctctcccgcagccccgagacttcaacacacagcccgggactggctgaataaggcaaatacgggacaacactaatgtgtgctgtgcgagtgcgggtggccccagaggccagcagaggcttctggtcctcttgaagctggagtttcaggctgctggaagctgacccctgtgggtggtgggaaccagcaagcagccttagctgctgagccacttctccagcccttcaaacttccagctgtgacacaggataaaaaaaaaaaataggaataattgaggggtcctggaaagagaatgaaacccctcattttggagtcatttcctgctgactgagtgtccaagaaatttcagcacaacagataaaatcaagatagcttggagaaataatctccccctaagggccattcatgcaggggtgttcgaaacaacagatgaacgtggcttacttaagagtcaaaatgtctttgaccttgatcttaacttcattagtgatcccctctcatccctaaaaccatttcactgataaaagcaattccattaagaaaagtacatacaacagctcatttgttattttcttaatttaagtataaagctttgtggggctttttgttgtttgtttgttttgttttgttttgttttgttttaaaaaaaaaaaggtttttttttttttaagctgtcctggaacttgctctgtagaccaggctggcctcaaactcagacatccaatttcctccacttcccgagtgctgggattaaaggcgtgcaccaccactgctaggcttgaaatctttgatttatctttgaaccctgtacaacatatcctttgagcagtgtaactgagccacagagtctggtgagagggcaatcaggctgcgacgtctgtaccgcttgccagggggatctgccttgtctgtctgtctgtctgtctcctttctccctgaccgtccacttgcctcgggctcttcaagaggctgcatcccatgggaaggaggacagactagcagagggctgttccccaccaagggtattggagtatctgctgcccgctagaaactccagggaaaccctctgaagagacgcacgctggcgtgctctccctcccgctcctccccagctcctcagcttaaagtttaagtgctcatctcttaagctcgtattaactcctctctgccaacttcgttaactttgcttcgccctcactcatcctgaaactcttttccgtggattcggggcttttcccgagtgacggtccttaggccctcacagtggctcttttgaccactatctctctactaccactgacgatgctactggaagatctttggagccgaaagttcaaatactaattagcacattaggaaattttcgtagagggagtgtatcagttagcctagtatcaaagtcatcctgtttccctggagataatgacctaactctgaccctggcctgtggtagccatggctgaagtgatttgaggtaggcattttggagacagaccacgccttctgctgcgggatcattgagaatagcctccaagggctgagcaaagatggggtaaacaccactctggcctaaagccattgcctctgagggtgagggatgagggctcacaggatttctgtgctgtttctcagctttctacaatgaacacacgtgacttggtaatagaaggacgatgctgttagtgagtgcaggcctgaggagcacggtgggaaacgctgcctgaccagacatcgggtaccaggcccctgttcactcttccatcctgccttaagctgtcctcagtcactctggtctgcttttgagtttttatttagaaaataattcagagtctgtttctttgagccagacatctttttaagcacttctgcagtcttagctcatttaaccctcataccatgcctatgggattgatactgttattagtcccacttttcagatgggggggggtgatgtaggaatgtgatttttttttttccttgcctggcttgtttattctcctggggtctctctgtctctgccattccacctctgacacagaagccacagttctgaatatctttttgttattagtgttttgagacagtttctctctgtaaccccgactgtcctggcattcactccgtagaccaggctggccttgaactctcagaagtctgcgtgccactgccttcaaagtgatggggtcaacggtgtgtaccaccactgccctcctttgtcttgtgatttttctttctcttgatgccattattgacccaaggcagacggtggattgagaaacccaggggaaaggagagaagcaacattgggatggcccagaggcaaagctgccatagaacagtgtcgatgctcttttggtcagaaggcaaggcaggctagcaattccgccaagcttggtcactgctgaccttttttcgaggttgccttgagccgactgcgggggttgaaggttgcgagtggttaggagagtggatgggaaggaagtgtaggctgaatattcagctcttctctcaaaaaggaaggagaaggctgacggcagtaggctagtccacaggcaggggcttgatttagatgtctgtaagcagaagcaaatacttggaagagaacaactccacggcttgtctctctttgtagccctggctgtccagtaactaaccatgtaaaccaggttgaccttgaatttgaaccaggcctggagaacttccatgctccacatctgaactgtccagcctgggacttgaccccatagtcctcccacccctcgcagctggagcatcccaggggccagagggcttcagcagcactagaggccctcagggactgtcttcagcatgtgtgagctgtggtttcatcacccacagagtgagtagaacaggcctacctcatgggatgctgtgagcacagagcttaaatgtcagttgccatcttacagcctctgtgtcctttttatcttgtcttagacacagggttaaaggaagagatctaaggttaatgctaagatcttagagtgctgctgagaggcagaatagagatgcccagagcctgcacctggagtggctatgggccttcctgtaaagcagttagagcttatcctctgagggaatatggtaagggagggggaatgtgtgtgcagagctgatggcctctggagcagacacaaaaaagactggagagcagcagtgagggcccacctaagtgtggagaggataggccatctgtagcccacttgcaagggaccaaggacagaactgaagatggattagagtatcaggaagtagaggggagggaaggagagaaggagaaaaggagagggaagaaggaagggtaggagggagaggatgagtaatgaacaactgactgagaatatatatgagaacacatacacacacactagtggggtaacagaaatgaggctagtgggggagaagctgctgatggccatgagcaagggcaggttggaagtgtcatcccctcctgcttccccgccctgggatgtagccctgactatcctggaacttactaagttaatcaggctggcctagaactaacagagatctgcttgtctctgcctcctgagtactgggagtaaagtcatactccactatgcttgcattgcgaagtcttatgtttgaagatgtcatgtgtgtccttggtcacagtatggaggcagagccgtggccaagggagaggccgccgagcgctggataaaatcattttctttttgtctttttatttttgtactgtggattgaactaaagtgctttgctactgggctacactggtgttcccgtgcccctcctcgctgcttctcacttagttgcccaggttagccttccactttctgtctagccccagcagtccatgaaccttgtgatcctcttgcctcagccacctgagtagctaggactatgacatcaagtctagcttaaaatggacctttaattttaaaataatgtttagtggttgattccagggctattcaattgtgtctttctctcctcttccttcaatgcattacttttaaaaaaaatcccccagagtaaccttagtctttggagcacatcttgtgtgccgtgtatcagacgtgttatgtagcaaatgtgttctatctggatactgtatttgttgttagtttttcatgcatgcacactcctggacccttgcacatgcttctttggattcttttggattctttcctggaatgaattttcatgtgtgaagttaatgtactccagggtgtgggtgggttctgatggactgctggcagatttgcagtgagcagggagactgggaggatgctgggggcggggcgggggcggggcaggggggcgggcgtccagtctctcacacagttgttcaggtcgagttccatgtgtttatgggcagtccacctcccatcagttaatcctgaactccccaatgccaaggaaggcatctccatacagggggaacacaggaggaagtacacttggctggagtgtatgtcagtgactcagtaactggagctctgtgtgtttggttaatttttttttaaatgaacattattgtcaagaggtcgaacaaaggtgtttctagagggaaaggtagcaataaaagggagttgatgcctctgtttcagaggtttgtgtgttgaagagaggacagatgcgggggtgaaggcagcccggcatgggggttctttcttgtcagttctccttgaggcagcaaaggggaagagtgtcagcggagggtaagactttgtcttatgaggtatctagggttgctgtataagaaaaagtttacttatctaagtcaagttaatatgctattgcagctgacctgccttctgtgttcctctgaggtcagagactgcagtctcaggcacttagcacctcttcctaaaacagcaggagatttaagtaaaggattaattgctagagccttttccctattgtccagatgcctcttgcttgtcaggctagggggaagtttggagcagtaaacttctgttgaaccaggagaagagaataacacttgcagaaggaaaaacttttaataagcaaatatgcataatctcacataaattcatatatagattcatgcatgctcatttatatacttccattcaaaccagttgggtccagcttgcatgcattctcacaattacagacttacacacacacatgcatacattctcacagttacatatttacacacacatccattctcacatatgcatgtggagcaaaagaccaagcaccggtgcagaaagaactcactcattctggatgaaaaatgagctccaatctttattgcatagagaaagaaaaagcttctacccttttaatgctaaatgaattaaacccatgtttgttaaaaacaaaaaaacaaaaaaactttgttccttttaataagactaagcctgccttgttattaagaaaggacctgttctgtcccatggtaaggagaagcctgcctgctccttcctctccgaagattctcctttgttctaatttccctctgcattctgcatattgctctcttagtttttttttttatgttacctatagtttctgagttattccactttgcattctccttctaatcttgttctctcctcctgctctgaagtcacaacaatgctcttaactttcaatgccttttctcccaaagctatgcctgaacttctaagttcttcttgagttcagttctgtctaaaaagtgttctgtctacaaacttctcctcagctcagctccctttcacagctcagttcttctcagttcttctcacctctgtccctctcgcctcagtccctcagttctgactcttctctttgtcctcatcccttaaacatctttcagaatacatgatcacatgttaaaaagttcatcaaaagttcacacagaaaatcaagtcataaataaaatagacgtttacaacagagaatgttgacatgcatatctattaggagtaattatctggctaaacatccattacctgtctcagctccacaggttcacggaaggtttaaaaccataactaagttattagtaaagttttgtctagataaacccagtcaatatttatcttctgtcctagcacttataataaatcattagttccctttttatgacctttggttaatggctttacaacctcttgaaatgtgctctgagtaggagagagtcgaagagcaattaactggcaacacttgggagactgacagagttctcattgcagttttggctatcagaaaaggacctaatagcagttctactataaaagagattaatgatcacagatataattttaggaattcctataggataatcattaagacttaagaagtcatctatttgtctatatagcatcactacaagacagtacatctttgtggatgtgcagagatctgctccaaagaggattgttattacttagtaattgttatatatgtttaataataacaggaaaagcatattaatagcaggaatctttcctaaaatgaatccctttcagccttgcttaataagggcgaatgtatcgcagattacatgataatctgaagcaggccatctcaggacaatcacctgatagttattagtttgtcccattatggctcctgacagacagagcaagttcaccactagaaatgaaaggatctaatgacttccattgtagtcattgcaaggttagtatttttgaacaattttaggagttaagggagatgtgatttatataattattgaagaaatcatactgtatccattggtgtgtgcatgtgtgagcatggctttgttctaaataactgtccatctctctccacttcatcatggccactggatccctcctcagcattggaatgtcaaacatctccctgtgcctggctgtttttgcatggtttctggggcatcaaactcaagtccttacacttgtaaggcagacactttactaactgggctatccctgtgaaatcttgcctgctctaagttgtaatcttctgagtcagtaattttatcattaactatagtcggccattaaatagttttcttatgtcctgtgctctgctcgtgacatgtctcctcttcttctcttctcacagaagaaatacagaaagggcgtcattgatatttccaaaatcaagtgtgtggagatagtgaagaacgatgatggtgtcattccctgtcaaaataaatttccattccaggtgagttggctgccaacgtaacagggtttctgactcttacaggttttcatgggacaggcatgacatgagctggggtttgtagaaggaaggagactggtaccctagaatcatcctagatatcaaactgcctgagatgcaaattacatgtttattattctgattaagggcagtatttctagaagttcttgtacaaatgcaaaaatggcccatgttactaaggtaatatatagagctaaatctgctccgtcaatggagatcctggctgctatacagcttaagccaggcagcatctgttacatgtttagatcaaattagggagtcaataaattattacactaaacagattattattataacaacactgtaagttttgggatggtccaagcacaagcttttctttccagatagaaaatgacaatccttgccaatgacgttcctggttatctaaaattcactctttaattgttcagtgcagagctggttgcacagataaacctgagtaaggtgtggaaaccaggtagcaaatatgaaaccatctctccaagtgtccgtcagcaccgtgtctctggtatctcacattctgtcttataatatggcatttccagatatatcttagaagtatgttggacacatcttttatcttgggtattcccaccaaagtgtagctgttgaagcaaatcggaagggtttacctgacaaactgggccgggaccagctgtgaccagtgagatagtgagatttggttttcactgtgacgggtattgtctgggtagagggaggtttataatggaacacattatgttgtagtcagtcaggtctgccttgtgactaaccattagagagaaagtctctgagcagtgataggatcctaggtaatttttcaaggcttattattaatataaaattacaaaagaagattaatcattcactaggaactacctttgaaagatgcctgatgcgtgaaagcctgggcttaagatttgaaatccttactttttacattatctacagaatggtaatggacagttaggtgggacatggttgggagacactatttttagtacctgctgtatgaatggggcctgctgaagttatacaggaatgtaaggtagtatggtgagaattctggaatgttggtttctttaaaaaatacaaatattataagaatatgttttcattttaatctcaggtgtggggatatgaggctactttgaagcagctgactatgatttgtctcgaactttatcagaggtgtagttttgccagctacagacatttcctctgattgtgtgatgtttggaattctgggagattttcccagggtctataaaggttagaaccctgatgggtgaagttgttggttgttcagggggttgttttctgtttgttagtaattgtgctcaaagaaaaaagaacaaggaacttagatgaaaaggtctttcttttttttctctctgttctctccttctttctctcccatctagtgttagggggtgaaacagggtggtggggataaagggtgggaaaaagatgaacccacaaagcagccaaggccagctacagtagggtcttggctaggacttgatggtgaggctgagttaatagcctggaactgaaagactcagcttgttaaagccagctcttgtatctattaatggggcaaaggaaatgacagaagtgatactgaaatgaatccaaaacattattttgaataatagtggattcgaataagccctatggcactaaatttatccacagaactttagtctgttaagttgaaataaacgctaagatcaatgaagcatcctgatcgctgttggtaccattttcctctgtgaagatacaatcctgggtctaggcagtcagtaacgaccttaaggatctgagttatatctcagtacccacagaaaaagagccaggtgcggtggtgtgtgcttgtaatttcagcacagggaggtagagacaggcagcctaatctacttggtaagttctagcccagtgagagaccttatctaaataaattaagtagatggtgcccgagagacattacctaaggatgctctctggcctttgcatgaatgtagcacatatgcaatacactttccacaatcctttgtaaaacatacatccaacttgaggaaattaagaaatagatgtgcttatggaatccagtgtctttgaaaattttatttctgaagtactgggattgtttacagccatccaagaatagtttactgatgcctgcagtaccagggatgctgatacgtggaagtgctgtgtctaagtattatcactgctttcatcttttgttttgttctaggttgttcatgatgctaatacactttatatttttgcacctagtccacaaagcagggaccgatgggtgaagaagttaaaagaaggtaaaaactggtgtattttttgtaattttaggacatcacacacacacacacacacacacacacacacacacacacacacacacacacaaaacaacccagaagcattgctaacatagctcttgcatttataataaattataatgagtatccctcaaaggacagtcactccttgtaagtgataacacattgaggacagcttccctttttaaaatcttatttcttactagttgaatgtttttcctaatagaagcacattctatttattgcacagcgtggttggaggtgataaaacataggcttttatggtagccggatttgtgtttcctaagaaattgcctgtgtgaaacacttggtgtggatggagtcacatattcctgatgaggtgcttaaatggacagtttgtctcgcacgatactccttacttgatggaatacaatggcagtgggcattaatcaaccatcgaatagcagtgattcacttctcttcacatgagtgtttcaaaaaaaaaagggagggaggaagaggggacagagagagaaccatctagctgctctgaatattgaatatgtgatatcacaatggcattctcataccaagcatgttggtcaaggaagaaatgatgatcggcagttacttaccaacagttttgtttgttttattccactaaccactcatgtgtctgtgcattgcagaaataaagaacaacaataatatcatgattaaataccatcctaaattctgggcagatgggagttaccagtgttgtagacaaacagaaaaactagcacccggatgtgagaagtacaatctttttgagagtagtaagtattcatctgactctttagctgtgatgtacgcagcatgagtgcgctgttggtgttgggagaagtgatgggattttgatgctgatggagtggaggacactacagggcagatacagcctctgagatcgatggtgtttatgtagcagtgggaccttgcagaggcgaggcctcttcggggagcttaattacagcagtgaggtctgttaaaatgaatctgttataagtgtggaccataggtggcagtgcatgcctgtaatcccaggctcagatgcacccaggacccctataaacccttaccgtgagagtcatgagtgaaaaccacagagaccaaaagctactagtaccaaggaggatgggatgtcctatggagtcaccctgcattgtggctgccatgtgtgttgcatcttttcttttttttaaaaagatttatttattatttattatatgtaactacactgtagctgtcttcagacactccagaagggggagtcatatctcattacggatggttgtgagccaccatgtgggtgctgggatttgaactccagaccttcggaagagcagtcgggtgctcttacctgctgagccatgtcaccagcccgtgttgcatcttttctatttttctttttctttctctctctctctctctttttcttccttccttccttccttccttccttccttccttccttctttccttccttccttcctttctttctttctttctttctttcttttttcttttctttcttttttttttattttggtttttttcgagatgtgtgttgcatcaatgcaacttctggggagggagatagtggccattcctcagggctgttgccttgggcaagaacaaccctgatcccgagttcctccactctgaatcttcctgggtagtcatgctggcattcacctagcacataaacaagagagatccaggcttccagactgttgttattacatacctaggtaaagtccagcctgacttgctgtagacatggctgagaagtcacagctagttaaagttacagaggcaagcagctggcccagatctggcaggcacgattctgctggtggctgtcgaggttgtttcaactctgccactctttctcctttggtcacagagtgatgagaggacccaggtgcccacaggtttttatggggacagggtctaaattggcccatccccttgattagaactttatctatgttcactatgtctttacagtggtatcaccttatcttcagagaatctgtccccagtgcatagaatgttacatatactctttctcgatacctatatacatacataccagctataaagtaatttatgatttggacccaataagaaattaactacgatacatgtcaataaaatacaactctaatctcatgccacaatcaaagttattaaacacactttcttattgtgttatcttagtaatagcagtgtttttttaatctccttattgagaccttttagcttttcagatcaagggtccatttttattttttggcttctctttggtgtatgtgagtgccagcattgctatgctttccttcggagtcatcagttaaaaatgattgatgtgccgtgatcccaccacatttgatatgggagccgagatggtaatgtaactaatggagcagagagtggatgcagtgtggacgtgctggaccaagggatgattcatggcctgggagggtgtgagcagacaagtagagattgttatcacatttctcaggagagtgcaaatgcaagctctcgagttgctccatttagtattttcataccatggctctcacgctggtacaactcaatctgtgggaggtgaagccacagataagggaacaccaccgtaaccagcatatgggtttattcatctgcttttccatgatgctaagcactgagccagggcctcatactgctaagcacccgctctgtcagaccccagctccagtttatcttttgcttcactttgagaattgagaagtaagaggccagatgatccagttgaggcaatcctgaggtcctgatgttagagtaggtggggagttgggcacagcggctccctgcggacagctcactctccgacactagtatcttctgtcagttcttgtggggcaccaccatgatctacagttattggcatttacaggtataagaaagaccctgcctcccgcgccagaaataaagaaggtgagtggtctctgccttcacatgtcacgtctttgttgcatgtagttttaaaaacatgctcccgctttagcctgggagctacaaccgagctaccagcccactcctggctccctctcatgctatcctgcttagctccggggtctgcttcggcatctgtgctgctggcactgacccggcttctctttccgaccggcctctgctcctggaggggtaacgttaccagcccactcctgagatcctagaatccacggatgaaggacagacagacaactttattactagttgctggctaggcacaattgctgggctcagctatctcctgcctcaaaggcatgcccttaccaattattatctccctttcttctcctgccctaaacttagtggcttgtatcagccatgccccgccaatctcctggccccgggcccatggtggagaccgaaggccctagctgcctggagaccttacatgactgctgcttatttctcattccaaagcatggcagaaaaagccttctctccttccctgtgtctccttttcctcttgggacctggaattcccacttgtaccttccgtccagcaattggctcccggccctctttattgacaagtcaaggaccaattggggaacaagaccgtagcaacaggacctcccctacctcgtctttaagttgtgtttggggtgggtctgtgctttattgactatgctatgttcagccatgctgtcctgctttcttccaggaccacctgagaagcaggtgtgctggagcccatttgaatagttcttaatatcagcactatcagcttagttctttagcttttgttgttggggtcagttttatcattgttacctgctggcatttggctgtagattggcctcagagtccatttgggaggtgtgatattttaaaggcacatgaactgtcgtaagaacacagcacaataaaggagtggctttagaaatgtaatgatatgcctgtggagtgggatatggtagagtaacatgtaatttggacccagtcaggaccttagccaataggaactgtgagtaactatgggtggcttgcttcagctgtaggcttatttcattgtagcatcacgaagaataaataaggaaacctgtaagatcctaagcatgtgctttacacaatgaagggacaagggcatgcacattgctcggagtgggagatctagcaatagagtccatgatgcatcagtctcccaccacgtctggtcctttagtctgcctagtacctacttgtaagttctcattgcctctctctctggaaaatgatccttgacctgaggccaaacaagcaattgtcaagcaaaacccttgtaaatacttaaaaaaaaagggcaggctttgctcctcccttgaatcttaactcttaagaattccaacagcaccagccttgtcgtggagggctagacctgaggcttccctctagggtgacttgtgacttctgtagtgctttacggctgtgcctcatgatcccttacaaatagaagctgaacttgacaatgtgactctctttgcatagagaaggcctcctccaccaattcccccagaggaagaaaatactgaagaaatcgttgtagcgatgtatgacttccaagcgacggaagcacatgacctcaggttagagagaggccaagagtatatcatcctggaaaagaatgacctccattggtggagagcgagagataagtatgggtaagtgcttcattggcgtgtgactctcagagggtgtgagtcacgtgccgagggaagtgtgaacactctaattgcttacaacagacttagtccagctggccacgagtgcaagcaaactgaatttgcagcatcgtgaggggcattttaaaatttacttaaaatttacgtttatttttgttattggtgtgtgtgtgtgtctgtgtgtgtgttgtgtgtctgtgtgcatgtgtctgtgtgtgtgtgtgtgtgttgtgtctgcctgcatgccagggtctactcaagggtagcttgtggagctggttctctgtcatccttgacttgggtttcagggattaaattcaggttgtttgatttgagtggctggtttctttacccactaaactatctcaccaactctgaagtatatgtatccttagtgatcactccataaatgcaaattaatcaattacctccttccaggtgtttgaatgcattatacttagttctcattcactaaaactgtcgtcttccctctctccctctccttcccttccctcctttctttctccttccctcccacttccctcccttctttcccttgtcttcctttcctctcttccctccctccctccctccctccctccctccctccctccctccctccctttcttctatccctttcttcctccttgcttcctcccctcccccttctctcctttctttctttgtatgtgcgtgctgggatcaaacttggatcatcacacacgctacacagcgctctacattttgctacatttttttttgtaagaagtaatttattgaaactttcttctaatttctctctctctgtatattcacagtataagggaacaacttattattcgagtttttcattatctctgtcagtgtgtatataggtataaatgtatataagatacacatatatgtatatatacagtaagcattacttgtacaggtaatttaagtcttaaaggaagagaccattggcatgtgcccccatacctgacttggatgtctcctgtgggctttttgtttgtttgtctgtctttttgttttattttacactttccatttttgatctgttgacgagatgagtttatttagcttatcaaatgaaccatcatcatctatcgcaagtggaccgtctgcttcttgggatgtttggcatacctctgtgtcatctcatttttggtaatctggtggttggagttagaagcttggtcaccttagagatgagctctagctgtgctgttgtcggtggtaccgagttcgtggttcaggaactggcctgacagacacactgtaaagttctcttactgtgttccctcttgatgctagagagccactctttgactaggcgttacaaaatgatgcctttcctaactctgccagcatacccagcatttcatcctccaagcacctgccttacagatgagtgcatcaggccctgtaggagaggcagataaagctgatcttgaactctcactgtttttcaggagttgatgactggatttcctctgatgattacagtggtacccagtagtttttcttaccatcgtggattcttttatgtaggttttgatccaaagtagccatcattctgttgcttagttcagtggtagctgctgtgatttttctttcctttctggctcagtaaaataactcaagttcaccttgtatttttcctcgccagacctgcagtttgatatttcaagggaattctgcctcttttagtcagaaacagtgttttataaataataggtggaattctgggattctatttgttagtatactgttatcgcttctaggcttctgtcggtgcagaaaaatgtgtgcacgtctgcatgtttatgataagcttttactaaaaggttcagtaccaaataaaacactataaagcatctacttttaaaaaattttatacatgagtttcataactcctactaaacagtacataggagtttctgggggtaaaatggaaggttcctttgtaccatacaggccttctcgattcctaacaataatttttcctttaaaaaaagttccttatgatactaattcagagggcacgtgctcccattggatgctgtcctgcagtacttgttgaggtattagagcagctggtgactccattcaatgcttacaccttgtgatgtagtagtttcattaagacattccaagaaatgatcatttcttcttcaccagcagcatggaatattggcaagtttaaaccctgctgctggctgactttgggggtgggcccaagagagcatcttagtctagtttttggttcttcatgagaaattgggtatcataatgtctgcatatccataatctctgtggggatcaaacatgggcacacattgtaaagtgtgagacaatacagatatattgaattattgggatgggtgcgttttcctataaactttaggtaatgggctttagaagaccagttgcctttcctgagacaaacagtaaagtcgtttctctttgtttgcttgtccacttctaggagtgaaggatatatcccaagtaattacgtcacagggaagaaatccaacaacttagatcaatatgagtaagtaggcttgtaagagtggggagccagaaactgtccttttcctagttgtgtaagacattttaaagatgaagggataacttccatgtctttagaaggtgctgacatatacttaatgctggtgcctgccctagtaaaaacgtgagacttatctctagaagacattttctttgaatatcttgtgtgggaataccattccttcagcaggcactgttgaactgggtttgaacaaacatagctcagctgagtttgaagtaaatatcattgttcattcattcaaggtaagggagcatttcctagaggaaatgtttcattggtttttgtttttgatttttgtttttttcaagtgaaaaataacactgtgtgattatagttttttcttttaaaactttgaaaacaggaaaaaacattactaaggaaatattttgaataagatttgacctttgtcattcatgatatttttctttttccaccgggtaatgagtgcgttttgagtttatttgtcttcctgccattaaatagtctttgaaaatattttcatagctgcattataactcattcagtcacaagtttataaaatgtttttttgagttcttggcattgatctactgttggatgagggccaatggctacaaccagtatatggacacataataatacaattgccttcttattagagaggtattggattatttcaggtggttttgctatagtaaaataattgggataacctcctctgctgccttaaaccatctctctgagatcctttgttgagactcctgatgcatactgcccaactttacagcaacattttactttctatgtccacaggcagtgcatagccaggttccagtgcacagcccatgggtatcactgcactgtggccctcctgaggcaggatgttaatatgacatttacttccttagagcaacaagtggttctctgctctctctccatgatgacatgggcatctcctaatctagaggaccaccagggtctgacaacccagcatcagtggcatggtcctttaatgtccatgcacacggtgtacaattatgtactatatagtgtgtttttatcaaatggactgtgtgcctgaccatctttccataggattgtgatggagctgaagaattcttattgcctaatatctttgtgttttctgtgtctgtagatatgcaaatgcttaccctatgctatagtggtctttactgtttgcgtagtggcattctgcataattctgtaacatagcacttgagagctgttgcctacttcatgtagtctggggtggggggttgtagtagattgtaggtaccatgggcatagtgggctatatgagctaggtcttttaaatgcactctatgagacttccttaatgacagttgccagactatgtatttctctgtagtttccttatcttaatagataattatgtaaactacagtggcttggctcttgcatatgtcttaggaaactataacaaaatccttagaaacacggaatatgcccaaaggctcaaacttcaactgatctgaaatgacaggaccaaagactattgataatatatttcatggaagccagacattcttggtgtaactataaatataccttatggctcacaggatgtcaagtaaggattgtattcctggagtttgtaacttggatatgagtatttgggttatagcgccacttggaaatgtaatctcattgaagaacttttctcctctagatgactccagtgtgagagtccctcagcatctgccagggatgggagtccatcttgtcattacgctgggcagcaaggctgaaggctgtcctcagagtccttgctttgtgcctccctatgcttggttctgttttgttggggtttgcccacattggttgggttagtaacacatcttccatgtcctcatggaggttgagacgaatgtgtttctgtttgtttgggtcaattaggaaccccagatctctgctgttcttgggtcagacccaggtctaccagggttttccgtaatgtagtttgacttgtacacctctcaacagtttggatactagaggttcaattctagaggttcagaaacaaacacacacacagacacacacacacagacacacacacacacagacacacacacacacacacacacacacacacacacagagagagagagagagagagagagagagagagagagagagagagagagagagagaagagctgctattaaatagctattaccagtctattacctcatctatttatttgttaataactcaatatatctaaagggtctgtacttgtgtattaatattattcagctgcacatcactgtaacaaatccctggttaaaaaaatgattttggcttgtagttttggagtttgggctccatgatatgtgatagtattggtttagcattgttgtgagaaaatgaccgtggtgggaacatgcactagaacaggcctgtttgatcataactggaaagctgggaggaaggggctgggccactctagactcctccagagatgtgcccctgtggcacaagaacttcctataaagatgtttcagtaagaggttgctgggccttccagtagtgccactctgggcaccaagctgccagcacgcaggcctttggcacacagagtgaaagggtattggcacaaggcaccccgagaccaagttctgagcacaaaggagatttatttgcctcagagggacagaggacagggagtaaggaacaaagacaggagagagatagaggaggagggaaaagaggaagggaacaagggagagggggagaggtgggaaggggtatttgttccatgggaagggagagagaggcacaaagactacctctggatagaagagagagacatgtgactcattggcaaatggcagtttttaaaggcaaatggagaaatcatgtttggatgaggagtttaatgttgattaggtgagccaaagggggcttttgattgctggacttcaatactttgatcacgggaccttggtggtcagcctcaggaggaggaagtggccaaataagggaacagaccttggtggctcgctttaggaatagtatctaatggtttttagcaaggcagaggggatagtgaaggggaaggcctgccagagccatgcttgctgtgctcatgctgactagaatgcctttggtgtgggtagaaaccacagtctgtcttaaggatgcaaagatctttttcaggagtctgtagatgcttcagaaataagtctctagaacaggtttctaagagcagcttcctgtgccagcatcctctctctctctcctgatgcctttatcctttcctgggatctggatttacagtgtgaggagaggactaccttgttttcctgggtatcttactattttcttaaagccatattgtagctctccaagtttcctgcacctgaaccaagtttccctcccttgctttcgccatggggatctaaaactggaccttctgtttgttgataaataagaattttctaatttacacattttgctagtttatagtgtctaactagctaacttttcttaaccatattgtgtgtgtgtgtgcgtgtgtgtgcatgtgtgtgtgtgagtgtgacagttctggacatctgacacatatttcttatatcatcagaaaagccttagagataaaatgaatcccttccaatttattaccacatttcaattgcattcataaatagcttgatcatatggtctgcactgaccatagtacagttctgttgaatttggcctcatttcataaagtgtgatgcacagtttgattcttcctaaccttggctcatcaccacaggctccaaagtcattacagggtattgcactttactaggcattcaggtgctctctaaaaacattcaggtggcagaattcagtcagctttcttatcttgcgttttgcttgttgtgattttacctttctcaaccaggggggagcctttgaattctcttgtctaaggtgtctgaggccaaaagccagaagcctgttgtgtgaattttgcgagaagaagcaacacacacacacacacacacacacacacacacacacacacacacacacccctactgaactcacaacagaccaaaatccaacttggcgaaccagtgagttttattggtatcacttatgggaatatgggtgaggggtcactcataggaacagatatgactccaagatagatacaccaccaaagcccacctcagcatgggagcctagaacacactgcacagcctgcaggcagctccacagactgaagagcgttcttcccaagtgactcctctgatccaaacctctttcagacagcttggtgagtttcagcttcttcttggtgacctgatagtctttcattcatcttgtcttgcctgtgagtgactctcagcaatcttttactgtttattcctagagagggagtagatcagcaaatctggtcagtttcagggacttcctggagcttttttttttttttttttacttctttaccttctgtgttatggagcttccttcaggatggaatgtttcaatcccagagaaagtgctacccaacaggatctttaatgactaggctgggacaatagtgggaaattcagatgaccaaagaggccccagtgactttaggacttttgaggtttttaggaatttgactgtgatggaggatttattgccaactcaaaacatctatcaaaacaaacttaaagttgaagtcctgagaaaatgatcttagtcatactctttggggtccatttgcttatagtcacacggaggcatgattctggggggagctgaagggtagactgtctctaggataaagaaggggattgcagtactcacagagtcttctcaaaggctcaggtgactcagggtatgggccaggtgggaaagagggcaggtactcaggacaaggcacagaattgatgtagaggctacggcaaccacagggtctaggggtgctggacatcagaaagtctggagtgcctggatggctgttcagggttgttccttctttcttgacccttgagctttacatgaaattcagtgaactggtaccacagtgacacgatgaccagccacactggtagatggggactggaataagatatagtttgaattcaagacagtaatgtaaagtgatattttctgtgtgggttagttattggagcaaaattcattcttgttatgaatgttgtcgtaaaacatgggaactgattcttttgttaaatggtaaggactgatgaaatatgtcacctccatgcctggaacttgtattgatttgcaaagctatcctgtgacaaattcaggttgtgacatacaaataacctttgatcccatctaacacatgagggcatgcataacatgtgggtaagaaacgccttgtggtatattcatgataatacgtcattgctattgagattgcgagtgttcttaccgtggctgtgtatcttattgatgtgtttgttattggtttccaatattagctttctagtcatactatgcatgaaaggtaattttcagaatctgacgagcatctctttctgatcaggtggtactgcagaaataccaacagaagcaaagcagaacagctcctcagaacggaagtaagtgtgcgcccttggtttgcaagtggcatttcagcccaggttaatttcaatgaatccttcatgtgttttccgtatacttatgcctaaggcctgaaagggctgtgatataaataagatacaagctgtatttttcacaaaacttaaaggagagtactgggttgttagtttactggaacaaagagccccaaagcgagtgaacctcaaacgtcagaacttcatcacttacagtccatccctgacaacgtggttgaagggactcaggctagcttgagcgtggtgggcatggctctagcaggtcttgtccttctctccttttccctctgcctggctaaaaactgttagatcatagtcctaaagccgccgaggtccatctctttatttggccacttcctcctcctgactatgaaggtccagctatcacagtattgaagtctggcaatcaaaagccaccttcggctcaccgaattaacatgaccaattaaaatataacactgaatcctagcccattctaagacagacctccccttttttctcattcgttgggtgtttttctccaggagtcagaagtcaaccactttaacttttctttcctgcttaataaatgatctctctgtgaaaacaggtgtttgggtgtaatttgtttctaatccagggtccaggagggaaccccaactgtgcagagagatctccttcaatggtcaataggattgattgcttctgggacctgtgatgaagggcctaagtccctctcctaggcttggagacagctgcccaccctcgccacttcatcactgtttttctccatgcacacatttctgtctctgtttacatcatctcatttagtaagggtaccagtcatactgaactagagcccccttgatgactatattttaatttaatgacctgtgtcaacccatcgtatgtccaagtacaggcacattctgaggcttaagactcagctctttggagtagagcagactgtggatgggccctcgggaatctgcgttgtgaggggccacccacccctgagcagcgtttacaaatccactgatggctcatttgctgctttgattttagcgtttcaatgtattttctttcttgcttggttttacttgttttaggatagtttaccttaatattatgtgatgtactttataagtgaaaacttaataacatgcagtcacctgttgtaataaacatgatgaatttctgaaaccttaaagtgaaattacagggaaagacagtatatgcaaaggggaaattgtgctgagctgaggggggcctgggtgctctagggtggctttgttcatgttccaggtctgtaaggtagggaagttggcccagaagccaaggtttcagcctccacattttactttctagttgttttacttagtgatattcaagatgttggctcttctgtgtgtgaccaaggcttcgctgagcactgagtgtaggttatactacaagacttggtcccaccctaggatccttgctggtttcccagagaccacacacccagagctgttggtgtctgctaccttgacagcttggccttcaaattctcttttgtctcattggctactgactagtcaggtgacccagggaaagttagctcatctttttgtgtcccctctccttacctgtgaaattagagaagaaaaacaagaaagtgtattactcaactggctgttaaatactcaaatgagcattaaattacgtatgaggctacatttaaaaagattaggttttcaaaaatggtagctattattattattattattattaaatccatgaattcatgatcataattattatctcaaattgttatcagatagacttggggggcttttaattccattgtctctcttataaataagaatagaagttatttttcaactctgaaacacattttttgtcttgaagtaatatgaaagctaaagaacagatatggatatggtaccattgacagagaagtgtctgagatatataacttccatttcctgcccttcaactggggtctggtgggaatgtaattactcagggttgtctgcatgttttaaattcctgttggagtcaccccctctctcctgtgttatgtatggcattggacgctgactgacagaggaaatcaagggtactgaaacacggtctcgtaaagagcactgagggttttttggggataaaggctgtgtgctaggaattgacactgcaagggattgaaagctcctaccaagcatgtggatggcatgatctagaaatcaatggttactttcacaagcctggggcttacagcaccgtgggacctacctggtagcactgcagaggccctgagacactagctgcgggcctcacttcagcatgggtgcaaggctgtagtcagggaatgtgagtgtgcctcctccagtcctttccagcccaggagttccgggcagaaagtcatgtgtgtggaagactcaaggggcactattcagttgctcttgttgacagcagagttttctacacaaagggtgatcgtaaaacaatgacagttcaactcttgaatctttgccagggcactagtaactggaatttaaaaaaggaatttcttcatttggtttttaggataaagaaggtggttttatggtgagagactccagtcaaccaggcttgtacactgtctccctttacacaaagtttggggggtaagtaagtccttatgctctggcgtttttagtggttgctgttgttatttgtttgtttgtttgtttgtttgtttttgttgttgttattttgtgggggtgcattggtatgcggtacatgcatgttgtgaatgtgtgtgaaggtgtgttcacctgtgcgtgtatgcaggtgggatgagagcttagcttccaaataccttcctcagtggtttctctattttgtttgtttgttataatttcccatccagggtttctcactgaacctggagctgacccactggctagcctcgccgaccagtgggctcttgggatcagagagcccactctctctgcctcttcccacccttcaaccctgcagagcacttaagttctagccacacgccggcacatctaagctttctaggagtgctgggaacctgacctcacgtccttacactttcatagcaggcattccatctgcttgagctatattttttttcttttaattcggtgtttttataggacctcctcccatgttgcttgtatgtgttcctaattttcaaataggaattttcagcattagaaaaaaaaatgtaatctttagttctaaagcctgaactattttatgtcctcttctttttctctccagagaatttccctatagtttttcatatatgtgtatgtgtgtgtctacatacatgtgtatatatgtatacccaaacaacatacacatacaacatgcatgttgagaatagctatggaagacttagtaatgttcattggataattattgtgccctgagctatgcacaaaggatgctgcattgagtagagtgggctttagtagcttaatgagggccacagacaggcctgtatgcagccatggtagtataaaagtgtgtaggggtgaggggctgttattaagacacatttcacttatttcttagtgacagctaagctgagactttatagcaagataggaaaaacctgagtgaagggagtcttgctgactcaacagtgagaggagatggtgagggcagagaagcacagggaaggtctgaggtgaatgtggaatgacagagatgacagggtaaagggaggaggggtgcctacgacaggctgacagatgtagaagctgacccaggtcgcctcggggccaaggaacccaagctccaccctaagggcgattacacatcatctcgaaagcatttgaaagcagagttcctagaaacctgtattctacagatatacctacaaggggtgctgtctctgcttaagtccagtccgttccctttgagaagggagacagttctaggcactgcaggtcttggtctctgcaggacagaaacgaacagcaaattaaaattctcctgctgctgacctgttggttcatggtctcatttccattcccatgcaagcagctgagttattattgtgaccactttcaagacttccacccgttgatgttagtcaaaaagcttagggcatagggaaagtaatatttgtgtcaggaatagaaaggagcccgtagaaagagattctacagagattgccctatagataacatctacacatgaaattctacctggatggttgaagttagctttctgctcccagaaataagactcagactcaaagtatatttacaaatgcctgggccatatagctaggctcttctctgactagaatcataatttaagataacccatttattctaacctacattctgccacatggctggttacctgtgctcatgtgccgtacatatgtttgtctcattacatctttcccaggccaatctcctgcctggctctcttccaacacagcatacctttggtccagcaatgttaaatcattgagagtagataggctggtccaatttagcagctccttttttacttgtgtcttctttattttggcctctctcatagatgatttgtaatgccatcacagccgtagaacttatatccacctttattttgataatttaaaacaagtaaaaacaacaaaaacaactattattattattattattattattattattaattgagacagagtggttagcttgggctgacttggatttgctctgtagataaggctggcctcaactcacaaggaacctatgtgtccttgcctttgcctcccaagtgtagatatcaaaggcctggattgattgattgattgattgattgattgatttattatctatgtacccttgaaaacatttatatcaattctcatttctttttcccttctttggagattaatacctatggataaatatacttatgctgggtgtaaaatcctgttttattttgtctttctaatagagaaggctcatcaggtttcaggcattatcacataaaggaaacagcaacatccccaaagaagtattacctggcagagaagcatgctttcgggtccattcctgagatcattgaatatcacaagcacaatgcggcaggtgagtgggctatgaagacccgttttgaatattagtgatcatatgctcagatattgtgatggattcttcaaaaggtagaatttttgtagttatctctaaagtgtgactgatgtaaaattattgcatattaagaacattctgtatccagagaaaaaccagaaagcataatagatttcacaggataccgtgttcccattacaggactttaatgtctgtggatattcccacctctgtggtttttagccttggcactaaactaaaattccaagatatgcctactttaagagcaacctaggtggctagtttggaggatcatgtgagtcagagagttcaacgctagtctgagcaacacaaggaagccccctcccccatatcatcaagtaaatgtgaaaaatgtgtgtggagaggacatagatgctttcagacgagccaggggttcagtcagtgctaaagctttccaagagacagagtgcatacactttgcaattcgtagtgaggttatgtccttataaaagcggtataaactaaagatgccttcagtaggaaatgtattcaatacagctatctactgagcaccctggctttgtcacatggtactctgtagagtaccgggggtgggtgtgtgtgtatgtgtgaccctcctggtcacatgactggctgggagtgatggctcattacatctggaaagtctcctgtcttacaacactggcccaggagaagaacacatttactctccccagcaaaggtctagtttaaaagagatgatttccatggtgtgcacattgctgtggtcccgtgctaaagctgacccaccgagacgtgaaccactgaaggctacagatgatcggacagcatgtcccgcaagcttttttaacagcctgaatctgtgttacatccaacaccaaacaaacagcaagaaataaggcttccacaagcaagtttccagccttttttttttaactttaacagtgcaaatggttaatgtgtccaacagctgggtgcttaatttcacttgtggaaaattggcttatgagtttttaatcaaaggccctctttacaatgtctgttgctgttctctgaggtcatttattattttacatatacagagcatagggagagttattaagatgtaatttacataccaaaaaattcatccatgtaaaacacagggttcaacacctcttagaatgtttacagtgtgccaacggtcacatcaccataatctaattttttgaacactgtcatcatccccacacaaataaatcttgtacccattagcagtcacccatgccctgtcttcaccagcctagcccccggcaaccactaacccactttccgtcttagtagatttgtctgttctgaacagttcatggaaataacaatttatactgtagctgggctgttctgttttgtttttttttgtttcgacacattgtaacatttttttacatttgtccgtgtactgtgcattccttgttgaaataatcagaaaagataaaaatgatcaaggcctgacctatgggaattatacataaattattatgcaaagccttgatatttgcctaagtgttaagtacccagtccaattagaaatccgtgtttagtttttaaattattgccagtgtcactgtaatggtgctaaaaggtgagatagacagctgaccctctagttggcagtcttggaagctgtcttaacgcaccgactttgacaaggtttctccttcatctgtggaaaccaggatgcagcctgggtctgcaccagctccagatgtggtgacaccagaggagaggctgctggggattctggaccgaggaaatccccagggttttgttgttgttttgctttttacaatggactcgctgagcatactcttagacattgccttgtgtgttctgctcaagcgtgccctgtccctggaaagaaatcccgaggaagtggaaagtttaaagctctggctttcagtcagagaaggtgtccactcctttttattgacagatgatagtcttatattcacatgttttcatggaaatagggtttcctttcatcagcatactcatctacaagtgggtttgctgggttttctgaaattctgtgctcaatacttgagcaattaagccaggcatggtggcacacacctttaatcccagtggttgggaggcagaggcagggcaatctctgagattgagacagctggtctatagattgagttcgggaacagccggggctacacaaaaccaaaaaataaaacaaacaggcaaaaaccaaaatcaaaacaaaacaaaacaaaaaaaccaaatcaaaccacaaccaaaaccaacttgagcaattaattcttaatggtttttcaaaaaagctgaaaagaatccagctctacaagacgaatggagacctgtagaattcaactctaaccctgttctgatgatagtctcttattcttactgtatttcttttcctatttttttttgtgttcttctgtgtttaaatttttaccactatcttaatttattcagctgacatgtatttagtgcctgctttatataagaaaccaagcctttgagggaagtatagtgaatattaaatggtgatccgtccagatgcccacacagttgtaaaatatgaaatgtgctgtatagaagaagtatagccctgtctgggtgctcctggaagaaggcccccatttcttctttgaggcttaaatgatttgacctgcctcactgatttccagtggctgataatccacacatttagtgctaatgtcaggaacactgagtcacatcaggtgaattgctttaatttttagccgactaataaaattctctttcatagttcagatctcatatttaaaaagagtataaactcactgatagtaagctctgagaatcttctaatatcctttacaatattagaggagagcggatgctagccttgtgccagataaacactgtattaagaaggaactgtacggagcggttgaaagccatgtgcagcgccatgtgtctatgaagaggaggcttcagtaataagcgaatggtgtttcttgggcttttcttgtttagcatttgacggagtagcgtgattaggataaaattcagctgcaaccatttctttcatttttagggcttgtcaccaggctgcggtacccggtcagtacaaaggggaagaacgctcccactactgccggcttcagctatggtaagactcacttggtagttgcattggccagttttcttggaaaagaatccagctctacaagacgaatggagacctgtagaattcaactctaaccagaattctagagtgcaagcctaggtccctgtagccctgacagcctcagcaattccacccgtctcacagtgccagcgaaggatgcagagtggcacggagcagagagaggaggcttagtcactgagccctaggaagagggactgaagaaaatgtctcctgagtatacccatcaaaggctgcaaccgagaaaggctcgggacagggcagacaggaggtgtggccaagtgtggcctggttgataattatctcagatgtagtcctgcaaggtggtctgaagaagtctttattgcctgaggggacaagctgggtctaaggagctgactgttcttgagcaaggatgcagcgttgctattgtgaatcattgcctgtacgtgtacctggtgggctgtccgcccttgggagatgtagttattcgtggaatccgaggtagacgtaggtttaggacagctcttggagacatttagtgtcttcagggtatccagaatagggcgttgtaaacctttaagatgtctcagttactcctacctctctgtgccttcatctgtggggggaggtgactggggggggtgggaggtaaactagctatcatcaggtctgacatagattttctttgggtgattaacattctgatatgtacaggtatgtgaccagaagtaaatgagacagatgcaggcagaggcagagatgccagcctttcatcctgctggggtcaccctgcaggccccagtgaggaggactcagtggttttagccaaagagttctctgcatgcaagttttacagctgtttttaatgcgttcatagaatgggtttttagatgattatactttatagtaactctagattttctgttctcatcattatttataaaaactttccataggtaaaaactaaatacatcgctgctaaaatagttgccattgtggtggttctcactggctatgccggctgggtgtctgggtgtctgggtatgtgggtgtctgggtgtctgggtacaggctgtaattctgttctgggtcttatagtaattattactgtgttattcagggctgtggggttggtctcttccccatggctttaggccgtttcctttgtaaaagtatcctttccctgtctgtcttacagataagtgggagattaacccatcagagctgacctttatgagagagttggggagcggactgtttggagtggtgaggcttggcaagtggcgggcccagtacaaagtggccatcaaagctatccgggaaggcgccatgtgtgaagaggatttcatagaggaagctaaagtcatgatgtaagtttctattcttcttcttctttgttttatgtgtatttggtattttgaatgcatgtatgtctgggcatcatgtgtatacattgcctgcagaggccaggagagggcatcagatcctcctgggactggaattataggtggctggaaaccatcctgtgggtgctagggattgaactcaggtcctctggaagagcaaccagtgttcttatccactgagtcatagctccagatcccatgatgtaaatttctagctcccctttttgaattaaaaattggccccgcccagcacacctgcctgctggtttgttttcctgtggtaactctgtgtgtctgttgccctcaggaagctgacacaccccaagctggtacagctctatggtgtatgcacccagcagaagcccatctacatcgttaccgagttcatggaacggggctgccttctgaatttcctccggcagagacaaggccatttcagcagagacatgctgctaagcatgtgtcaagatgtctgtgaagggatggagtacctggagagaaacagcttcatccacagagacctggtgagtaaccagagtcctcctggcctcccactgctgtgacttcctacaccctggctggattccattgtcccgttgggttacacagagaactttgttgtattagttgcctgtttttgtccttaacaagatttcgttattttcaaacttggtaaatttcaataatttacttgataatttctaaggaaaagacctttattaaatctaatagcgtacagacttattatccccaagcaagtttccgttgaattaattatttgagctctgggagattcccaggagatagctagtcggggcagatttatttgatgtcattgtgttatagataagagtgttagctttgggggaagtgaaagaggcttgcctattgtgagaaatggggaagttaggcttagccttgacctttaagaccaagtctccagctctttctactttaagtgctgaacagaaactaccagagaaatcctgagctcaactaagagggaattctgggagttttcattacttctgaaaataataggaagaaaaatagaaaacaacctaacccagttctaaagggctgtgatgggggggtttctcagttttcctcctcttccttctgattttctttccctccccagccattcttcacagttaacaccactgtaacaaataatactgtaaccatagcaagcaaaactgtgactgtaacaagtgacactgcaactgtaacaagcaacactgtgactgtaacaagcaacactgtaactgtaacaagcaacactgcggctgtaacaagcaacactgtgactgtaacaatccacactgcaactgtaacaagcaacactgtgactgtaacaagcaacactgtgactgtaacaagcaacactggctgcaacaagcaacactgtaactgtaacaagcaacactgtgactgtaacaagccacactgcaactgtaacaagcaacactgtgactgtaacaagcaacactgactgtaacaagcaacactgtgactgtagcaagcaacactgtgactgtaacaagtaaccatctaccttgattagtctaccaaaccaccaggattcgcattgtgtccaccctcctttagccttagctgccttgtgatagagcgtggatctgtttccttggagcaggagcagcagggtgctttgttttaacctcacctgacataggccttacttttgtactgtaagctcctttgataaggaagtggatattattcctatctgcaaaggaagtgagtagaactggataaaatatcatcaggtgctggggagatggaggagtttggacccagaacttacctttagagtcaggactgtaactccgatgtcatctttagatttaaagcatagtaacaaattgaggatttggcaaggttgacttgatctcctcggtgtgttgtggggctagtcctagtccattctgaaaattggatgtgcaatgtgcacttcattgtttggctcacatcttgttaaagttcataccatttaatagaggcaacgggctttgtaaactagatgtgacatataacattagctttgatgattgtgtgtcgctatgacaacagctaattgtcatgtagaaactcatgaattaagcatcgttctagttttgttcttggagaatggatgcagacggaatactttcatgacttgcacttgtctgtacagaatttattttcttgaaagtgagttttgaattttttttggccagtgatattgatataaatccctggaaggttttaacaccctttaaagtattaatcctgccaggcgagaataagattactaacacaacctttgagccaaatttgaagcaagctttattaaattctgaccaacatggtaaatactagccaagttcattcccgggattcccagagaatgcctgctaattacataagcccagtgcttattaaggcaaacctattaggctatagacttttgactttgtctgatcagggacaagcatatatcctagtgtacttcccagctacagttacacaccttctgcttacatgtgaccaagcacatcctgtgcacctggggtaaccacccttgtttacagaagtgagaacacatggcttgtggtcgtaggcgggccacagtcttcagcattccaggaagtttctgtcctggaaacaagtgaaacttacagattaaagaaaagtttattttacagatcttttaggcacagcagtttaagacgtaaaacgtaacttttgccctcacaaaaggaagtgtcgaatgtgcctttcccctgagtaaagtgtttcatgggcttgcaagtgacagtaccatggctgtcctcccgggaaggtgcagataattcaagaggtgggcattaactgtcacttgagagagactcttaaatgtgctcagaggaaaggagctctggggaattatcacacaggaaaaacaagcatccgacgagtgagggagaaaccttgccccatcagttgaggtgttaaaaacaccattattttgcttctgagaagccctctgtcattctaccaaattattatattggttcatgtaattcttgatggattcaagaatacaccaaaccccaaataacatatgtgtgtgttttaccagctgagtatattatgtcttaatatattagcaacctcatacacgataaagcaggtcctgtgtctatacttggccattcttctgtctgttgaggtgaccactctcaggttactggtcactgtgatgattgtgtgtttctactgttacctagagagaattcatctttaatctagattaaagacttaagagtgttatcaacatcagtaagaaaatcacatagtaatacaataggcctggaccaggaagaaggttggaatgtccgttgatcctcatgaagtgtgatgttggtaaagacagtgccataatgccttgtgacatttctaatctgtctttttttcaggttgcttcagatttttgttggaggtaccttcagtatggctgtaaacagtttatatgaacacatgtacagttctttctgatgtggactgtattatatttagtagaaagtgaacttctgttgttcctttttttgcaggaccttttaataaatgtaacgtcataatcttgttttccaggctgccagaaattgtctagtgaatgaagcaggagttgtcaaagtatctgattttggaatggccaggtatggctgagtactgtgtgcttttaagtggtcacattatatttgaataattaataagcatgggaaggccttgggaaatagctcagaggataaattgcttccctcccaagcctgagtttgaccagaatgcaggaaaaaatccaggagtggtggcttaggctttgtaaccccagaactggaaaggcagagactggtggatctctgaggctctctggctagaaaacccagattaattgatgaaccctaagccgttgaaaagagactaggcagacagcgttcctgcccatgcaatccaaggttgcctctgtcctctctatgcacgaactgcccacaagcaaaccctccccaaactgaaataaaaactcaggcctcgggccctggttgtagtgatgcttgttgtaatctagtacttagaggtggaggcgggagaatccggatttcaaagtcattcctggctatataccaagtttgaggccagcctgggctacatgagatcctgcctttaaaattttaatgtgggaatgatttgcaccaataaagcaataaggaaatctcttcaactgttgtaagggtaaatgaggctaattactattgtggcattggtaattctttccactagatggtagtagagcctatataatatctctctctcaatttgtttggtgattcagtgcttagtatatccttgttcgcaatgtttttaatctcttagtttttctacttttactagtgttagaatagacgtttaagaagcattttgtctgtcctcccctttccctctgtcccttgagtcatgcatatattaaaaatcaggtgtctactgggtgaggagcctaaccctgtgagccacatcggtgagtaaactgaaggctgagcccacatgtagtgcaaacgatggagaaaggagatacatagccctggggaaagtgactgtgacagagcagggtggggtcagcagacagtggctgtcagtccagtctgtgccttttgtgctccagatgtgtcggaaaggaactttttatttacaaacagttaaaaaagagactaaaagcatgtcaggacacctgagaattatctgaaacctaagtctctgtccattgaaaaaaccaaaaacatagtgttattgagactttcaacttgcagtcttgactaactgttgataccatctgtggtcactttcacactgcagatgaaaaaccttgagctgtcacacggacggtgtgccctgcagatactgaaatcctctgtattatctgtttcgtctttccctgaaatcttctactgttcggtgaaagagctaacttgggagtgggggaagggacggccgctggagatctggtgaccagaaaggcttttcttgcatgggaacattgagtgaacaacacaggagaaccatagtggtgccaccttaagtctgggactagtgtgacctgcccagggaatcagaagagggccaaggaagctggtccagaggcagagctaagagcagtcaagaaagtagagcaatgttgggtcttcgggccaacaccaacccccaagaagacgctggcctttggtggcctgaatgctatctttagtagtttctgattctcgaagctgattacccagtcctctctatgtgctctaggtaaagatagttagcacctgaaggggaaccctgcactgtctatcgccattcttcatatttggcttgcagaaagctggtacttttccaccagtccttttagaactactccttatgcactacattcagacgtctctgactgacaactatttgatccagcccaaggtggcattgtccaccagataccatttttgtccattcaaggggaagtcggtgtgctcatctgaatctttgctcctggcagctttagcattgacttcctataaatatgtaatgcattaacaatccctctgataaattcctgctgcacatacagcgaaggggctgaagtcctcacatctgtcactcatcaaagattcttcccacaagtggtcaatgctacagcttccatgtgtctttctggatggatctggaaatgttcagatagaaaaagaataaagcatggtttgagagtgtgtgtgtagggacagtgtgctggtatataaatatggtatattaccatcatcttaaacctccttttgcctctgatctttctaatgcagtgctctcattgcttacgtgtgctgtagctttaaattgagggactgtggggctcagagcacggacggctctagttacttgttaccccttcctgtaagcagctcttcttcagatattttgcatgcagggcctttggataaaattttgttcagagaacaaagacacgtaccctaccccataagtttgcaacagttgtatagtattctgcctctgttacctcataagagagaaagataaacagcagtacaataaaagtccacacactgggtcacctcttcagattcttaactcaagccgaggagctagacagacgtcattgggcaaggccatgagctgaacgtgtgtgttgcatgttagactgccgttactgtcttggtctgtctttgtaaggggaaaaacgaaagctcacgtctgacatgcaaaggtgtgacccatgcgtggtgtgtctcatcctaggtacgttctggatgatcagtacacaagttcttctggcgccaagttccctgtgaagtggtgtcccccagaagtgtttaattacagccgctttagcagcaagtcagacgtctggtcgtttggtaaggcccacgatgcacgtctcctcccctcccctccaaagaggaagcagactcatcattgagtaaccttatcgtttttgtaggtgtgctaatgtgggaaatattcacagaaggcaggatgccctttgagaagaacaccaattacgaagtggtaaccatggtgactcgtggccaccgcctccaccggccaaagctggcttccaaatatttgtatgaggtgatgctgagatgctggcaagaggtacggctgttcctttgtgttgttttctggtctatgaaacgatccatggttgggcccagtggatagggaaggtacagttcttgcagcccagtgacggtttggctcttgcacaggaatgtcaaactctagcaggaagctttgtctcggtgctgaatagtgagaagtctctgaagacacaaacaatgctaatggttagcttaatatactcaggctgacatttcactcccaagtgccccccccccccccccatagctggaccttggaaaaagcccagagaagttgcttctctccatccagtaactgtgaggtagaaagtttcactttctttaaacccattgtctctaggtatcttacttaatctctagaaacattgaaataccacctccgtagaagacattaaaccccagagagacccttgaaagactgcagttcacatatatttcatatccaaccctttagatttcattttcagagtaaccctttgaggcatagatgcttgtactgtgaccataaggctcacgagggtgatacttgcccggggccagttacctccagaacatcagaggcccatcctgcaccgaagccatcacttgctataatacctcccaccagcactgactggggtgcacagaggctaattgggtgggaagtggtagcagggagagcagtgtgagcaaagtggaggatttggttataaacatggtgtgtgtgccaggagagcttagtctgaattttgtgggaaatgaggttagctgatgaggagatggagtggggggtcacagagggccctcaaaatgagtaagacaagggctccaaaacgaacccagcagctttggggttggttagggcaaagagaaatcatcctgtgtttccccattccccaggagtcttgcctctgcagagtcgcgcaggatttgagcagtaagaattttctggggagccgcttctgaaactcatagcttctcttcgatttttaactgtagagaccagagggaaggccttcctttgaagacttgctgcgtacgatagatgaactagttgaatgtgaagaaacttttggaagatgaatggtggccccagtttccaaggcaagaggaagaaatggtgtgccatcggaacgcaattctcttggcacctgggagtatagactgctctgcttacaacacgggagccccagcgcatctgctgctgatccagcctgagctcagtggctgctttgccggctgcacagatggtctctcagagctggtgacttgaagcactcattttgctcatttcttcaagggtttgagtgccagccatgtataccaggctctgtgcccaggcctcaggagatgaacatgggactatgctagctgatgctagcagaaagccagggtggttgtgatggggacgagtcatgtcccagcgtctcttccatgccctttggcttttacataaacctgggcctggagtgttgtctaccactgagttctaggaaaagcaggaacccacctggatacgtagtaatcctctgttttggaaacatctctttccaaacttgttcttagtagtatgcttaaaaatttgtatattgtatatattgtaaatacatataatatataaagttatatatttataagtaacatacgtttatctctttagctgaaatttttgttgtttttgttttctgagacagggtctcactacgtagaccatcctatccccaaacttgcagagatctgcctttaatgggaagttttaggagtagagaatgtctagtcctaaatctgacagctgccaattctatctcacccagggatcaaatatggctttctgaagagaagactgcctggatcccttagttgttagatacttgattcacaagcagactcgtacaaatagcagtgcttgcccctctcgagccatggtctgtgatgaactatctgacctgagcattgtggtcagagctgattagaattaggtaggaattttcatgtcagaattaagtaattccaaagtcctaagaatgtttccaggacattgaagatgctcctgttgaagtgctaggctctggaccagaggtgttagaaccaagtggtatataatccaactaggtccccagaatggcttatctgtgggagtccaggatgctgccaaaggaactagggagaaagtgttccaagctgccatgtgtttttcaagaagcctggttggacttggatccctggattagtgaaagtctccatcccaaccctgcaccaggccctgatgtccagtttctctcagtgaatttcgcttgcagtttccttttcctcacgagcttcaggagaagaagctaacccagttcttgtgggtgccagaggttttccacagagatccctgtccaggcctggtacgagggttccagtgtagggaagtgagtgcaggcagggagacgaagtctctgctgtgccttccaggtcgctcagtaactccaagccaatctgaactgagtggagtggggctgagccaatgagaagccgactatccagtgaggagtggggcgggacctcaggtggctcttcgggagagaagatctcttcccaagtgttacatacagcttttggaacaaaagactcagaggaagaagtagttctcacgtacctttaattccctgaatggatttatatacagtactgggggtgattcagggttcgacagcgggtacctctcattggcttggactgagagtttgggggaaaccttatttgcatgtggaaaggcttggtgctgttcctacgagactgatagcatgtgcctctcctgtgggggctgtaactttgacaggagtcaggggtccaggagacatgatgaaacgtcttctgtcccatgtaggtggaaattaccaccctctgggtcccaccaaggttcaagacctaagctcgattggagaccaggctgtctctgcgtagcccgttgccccacatgttcccatcagtagaaaccatttcctatccaacacactgttcttggtatttgagagctcccccttcccatatcagtagcccctgtaatccctcccaccctggagcatgtggtgagcacacagactggagctggctgctgacttccctctgaccatggagaaccaccgatttggttaagagtctgtgccgccatattgaaggttgggccgaaggctaagctcattccttttataatggataaaaaaatgaaatattctcatcataatgtgccatattccttccaactccccacatcacaaaaccatacacactttttaatcaactccttcaagcagctggtgatatgcaggcatgccttactattattgctaagataggccccacctatcttctccttttatctggatgagctgtgaaaggaaccagggtgtgctcaggaaagttacaagaaggttgagttcctgtgtgaacaatttgaaatactctttcttatcacatgtaggtctcagggggcaggatacatgtgtgtatgtgtgcatatgtgcctgtgtgcatatgggggctagagttgatgctgtgtgttttcttcgattgctttccaccttgtgtagtgaggtagaatctctcattgaactcagagctggctgatttggctggtctagctagccagtttgccctcaggatctcttgtctccatctcccaagcacttggtttactggtgggagaccgtgctctcttgtcaattatgtaacttttctggctctgaacttgggtccttatacttcagtgtcaaacactttgctcactgagccatttccatagcccatacaaatgcttcctatgggaaaacagaacaaatgaaagggagcgctcacgctgtagacttgttcatccaaccgaggtgccaatgggaacctgtcaaagctgaggctaaatcttttcttttctctgtccctgtctttctgtctctctgtctctgtctgtctgtctgtctgtctctctgcctctcctgtctctgtctgtatctctgtctgtctctctgtctctgtctttctctctgtctgtcaaggtttctctatgtaaccctggctgtcctggaactctatgtagaccaggctggccttgaactcactcgcctctgcctcccagagtgctgggattaaagacttttgccaccacacctagcttcagccagtttttaaaacagatctttagattctcccctaatcccaaaccaagtctttagagtcagtcctaaatcagagggccaaacatcctagtttggatattcatgatcctagaagtcgattttccctgtaccactatgagccctccagtaagtaaaatttcttcttgtatggtcctttattccagtatcagcacagggaagacagtttaagttgactactatgaaggccccttttaccgaaattctgtgatttcttcaaagtgttttctagacacacccacagcgtaggtataaggaagtgctaacacttcagatctggatacagagctctgaagtttcttatgtaggccactgggttgtcattcacacactcttgaggttttcagaacaggaaattaggtggggtaaactttgcctgtgagaaacgtcacaggccaacaactatgctttcagttgaaagatgtgttaccgtgagtggaacagagctgaagaaccaaggcttctgtgtatggccagcaagcagggtcgccatgatcctgtcctcttgtgagtaagatgggctttaccatttaatgtcacagcgtgtttatgggtgtgttgcctactggtgacccctaggagtgggttttgctaaaacaaggaatttgtgaaatcctaaagatgatttcttcagatgtagtgacaggattttgtggcttagttaaatgtccactgcctcttgataaaattatatacttgagaattgagaatacagatgacaatagcaaaaaaaaaaaaagttgtgtacttagcatgtgtggaaattcggtcagtgtgatgggatatgtttgttttttgaatgataatgaactcagagttgagggtgaagagatcagacttttctggtttagcctcagctttgacaggttcccattggcacctcggttggatgaacaagtctacagtgtgagcgctccctttctgcctcctcctatagccgtcacaagtaaacagtgggcaaagctggcaagcacatcaactaatctgagagttgctttgaaagacttcaagacgatttttggaagcactccacagttaagactcaagagaggctaattatgtataggggtttaggaaaggaaaaaaaaaagacgatctctgattttaattctagatgccctgggaatcaaacatcagtagaacttagtcattctagattaggccagaattctgatttatttttagctggcagtaggaaaaaactgaccgaattttacatatctctttaagccacagcacgttattaggacctccagacattggtaggatttataaaaataatcaaatgctatttttgttgtgccttcctgaatatgatttacagtttgattcactaagaacaaaacaagacaataacaacaacaacagcaacagcaacaaaaaggtttcttgttatcagaaataggccaagcagctcaagacagaaaaagatacaaagaattgtcacgagtccccacctccccaagggcagaataatgttgagcagatgcagaatatggacttttaaaggctttgattgtttctcatgagatcagaaccaggggaaggaaggccatgtgttatgacaggaaaggctcagctacgtgtaaggcaagtagatgcagaggctgtctagggatgaagtgggagactacttatctatggggtcttagatttccccgtggcctggggggggaggaatggttttaatgcaatgtccctgtaccatccagtgtctgtctgtctgtctgtctgtctgtgtccttctgccatgagccatagctaaaccactccattttcttctgcgtgaaataatgagtattcgccattgacaaggcaccaccaagtgccctccagggtgttttaaacttaaggatgcttatttgtatgcgccaaacacattgactgttcaaggggctgccatggtgacctggagtcacaggctgctggaagggaagaggaggtagttgtatagagtggggttttgatcataaaggaatgatggtggcctctgaacagggtccaagacactcctccagtgaggttacatttgtgaagtgttggaattgccagtgtgtttggcagctaagttaccgtgagagcaaactcagacatttacttagatggcaagatcccagtacagcagctaaggattagaaatttctccctttcacctcttcttgaatgcttttaatctattgtttgtggaaagaaaaaccatataaaaatgtttcatatatatacatatatatacacatatgtatgtatatatatgtgtatatgtatatatatgtgtgtgtgtgtgtgtgtgtgtgtgtgtgtgtgtgtaatcttatggtccagtttgcctgatacatgcctgggggttctgcttaaatgcaggtttctaggttcattatcatcatttgatctgagggtacagtaagaaactttgattgcactgtatttccagggcctctccattcccagagtactctcataccagccctgcaaagctaatggaccattattactgtaattaatatgaggataagccgggtagctgggataggcatcctttaggctggcctctggtgctaactactttcaggtatgatcaacccctcatcctaggcattggactctttacctctctcagatagagtatgtaaaaacaatgggatgccacctctgagacttggtgcacaaaagacggagctcttgtctttgctgcgtctgtgaacatggaagtggttttctagctccaagccagcagggtttaactgcagcttcagtgagctctgctgagccgttagagaacttgaagggacgctggctagcccaagtatggcaaacacagctctggcaggccttgctcttcttctccattccctctgcctttctaaacagttagattacaccctaaataaacccctaaggtctattcgcctattttggccacttcctcctcctgaggctggccaccaaggtccagctatgaaagtattgaagtccagcaatcaaaagccccctttgactcacctaattaacatgcccaattaaaatcaaacacctcattctaacactgggattccccttttacatttataaatggccattttcctattggtcatgtctgtctcctctctatccagaggcagtcctttgtgacacccttctgggacaaatacctttcccctccctcgatcccttccccttctccctcatcctctgtctcctctttgtctcttatttgctgtcctttgaccttctaggcacatctcctttgtgctgagaacttgctcttagagtccctagcccatactggtccacagaaacaaagcaatcataataatgattgggtgcaggccgagtttgtgcctagaaatagaaaatgactgtagtggggttggcagagatggctcagtagttaagagcaccagctgttcttccaaaggaccctgggtcaattcacagcacccacatggcagttcacaactgtctgtaactccaattccagggaatatgacacctcacacagacatacatgcatgcaaaaggccaatgtacataaaataaaaattaaaaaaagaagaagaaaatgtttttagtggcaagggcagagagtgtcacagatccaaggcaaatgtttgctcccactactgttgcttctgctggaattaatgctctttctcacccacagactgttagaatgagcataaacacaacacaactgatttcttttgtcttggaataatgtcatgttttccctgtaactaacttgtttaaaaatggcagttgtggccagcttgtccccacctttgtgaggcttccgtgccttcttgtgtgctgatttgcagatccagtagctcctttgaggagcccccacccccatccccacccccacccccaagaccagtctcctccaccaccacccctgcccacccagaggcaggcagctcagcttgggctccagcgcccatatgctctgtggttcgttcaggcaattctttatttcacaagctggcttgaaacgagtgagatcagtgagcctgtgacctgtgagcccacagacaatacagttctaggaaacaggaccttgaggtgtggggcagagtagagattgtgagtgagatgactgcggagtccggttcacatggactcactacaggaaggagtcagaatttctgcaaacacagctgggcataccccggtgggggagaggcaagaagatcttatgttggaggtcagtctgaactatggggcaaattacaggccagcttggccttcaccaaactttgtctcaaaacaacaacccagggcaggggttggagttcagtgataagagagagcgcctggggcactcccttctaggaggttatttgaaggttagatcaggggacctgactacagctgggaggcacatgatggatactgtgtgggagacacacagcctctcctcaccttttgctccctggaatatctcccaatgttctatccagatccagactcccaggcttctagagtcttccctaaactcctttcccaacaacactggaccttggggacaagccaggccaagaaccattactatctacccaactgtatccactcccagacccacttcttttctcctattgtggacttccccaatgtaactattcaccaaaatttcacagtctaatatgaaacaaaagaaaacaaggtggattggggcctattacagagttattcccttcttggccaatatatctagaaaaaaaattatctcaggtgaccttcatttcttagaaaggtatcaagtatggtggcataaacttgctgcccagcatttgaagggtctacagttcaagactatcctgccctacttagggagactgactcaataaatgagtaatcaaacaaacaaacaagcagtatataggtgtacctacaagataattaacaccccacctgtataaagggcacaagcttagaataaagaatagctttttaagttggaccagtattcatgcgaaaaccacaacctatggcttttccttctctcgctaccgactttccacccatgtgtgctattgatttgatatcaggaaactagagaaaagctaccagcgttgagcctccccaaactacctgtcaactcatttaaaatattcctgtcccaaacggccataaagcttagatctagtggtgggcttttgtggcagagaaagaagtttgacttttctcctggtgacacgggggggggggggggggggatggaggggtggatggggagaggccatgactagtttagagtgaatttacaagtatccagtctgccatgccctgcactatggaggcaggagggtgacttcaaacgtaacctggtgagctctaggacagacagagctctataaaaaggcactgtctcagaaaagatcagtactgctcatctgggggtccaaatttgtgaggcttttttttttcctgcagccctctggagtagattcacctaaaattatccacaatttttagctcagggcagctcctgaaactgggtgatttttttaaagcttgtttttaagggaaaaaaaaatcaccagacacctgccagttactatgaagcccacattccgttggaatggctctcctctgaggcaccgatccagaagaaactcagcactgcctacgccagcagctaaattgagacattgctggtaaatctcagaaactgaagacacagtgattacttcccagcctgcttgagcaaaggcttttcatttctatggctttgcttgcccagaggtggatcgtacatactgctttgggaaatcatgctttcttccccaccttgccccccaccaacccatgctccttagtgaatgcttgttcacaatcaaatctctgttatggtcactatgagcctcctgggagaaaggaacccctcaaacacccatcccagattcaaggaggcgggatcacaggtaacaaatagttcaggtaccacctagctgggaagagatgtcccggtgtggaaagattacagagatcctatctggatgtgatgcccattttactaatggtgtatcattaaggatctttgctggggaacaagaagcagacggaaagaacaatgcagacataagcctgggagagaaagctgggttcctgcaaaaatcctcagttttgagtgtccttcccacgggaccttccatcaagcaaatggccattgctcactccttaagcatttggtgtcttttgacaaggccctcgttaatgtacatgggttcttggataaactggggattttctacacgggcaagaactttctctgtgcaggttcattgtcaaaggacaccggctgacttctgtcatcaagaatatctgtggaagggagcacaccaattcactcactctccccgaagacctaaataacctaagcaggaaatgcccttgaatctaacgatcactggtatctgcattggggtgaattttgatggagtatgttaacattgaataaatatgtttagcacttggggaactcatgctgagctagggcacacaaggtagcagctgtttgtgtgcattagtggtggtagaaggggacaggtctatgcataggcagaagtaagctgtttggcttgtgactgtgtttgatcttcggagcaatagatcagaatctttacgtaactgaagccactgcaaggcaggctgtactttcaaagaaaagggaattgcctttgctactgaatcaggaaagcataagtatttttgaaaagccttcctcccaaatttcaggctgcctaagtgaacaaaactaaggttgggagaacactgttgggttttcaggccacagtactgggggggtgggggggagatgaactggggctcagtgaactagggacagtcctctcctactttaagatagtcctgcctgaatggtgacaatgaggtttctctttcagagttgtatgttttaaaatgtatctgtctgtttacagtttttattgggtatatatgatgaatgtatgggcgcgtgcgtgcgtgcatgcgtgcgtgcatgtgtgcatgcgtgtgtgtgtgtgtgtgtgtgtgtgtgtgtgtgtgtgtgtgtgtgtgtggcaccttgtagcatcagttccaggaattgaactctggtatttagggttaaagagcatgcacctcactcactgagtgacacgccaggctctgtattcaaatctaaagtgctgtgatagctaatgccgtgagccaacatggctgggccatgtgtggtacctggatacaatttgttcaaatattctgaatgtttctgtgaaaatgtctttggggagattaatacttaaatggatggattttaagttagggaggtgtcttagttagggttttactgctgtgaacagacaccatgaccaaggcaagtcttacaaaggataacatttaattggggctggcttacaggttcagtcagaggttcagtccattatcatcaaggtgggagcacagca

SEQ ID NO: 779 - DNA, 2569 bp, Mus musculus
cgatgggtttggtcagcgcttgccgagctccgggctccgcagtttggacgtcgctctgtcttggcttgtctcggcacgcgctccgtcaaggtgtcggacgacactgaggacacagaggatgtccgaagaatgaaatgagcagatggaactttgaaggctgagtcaacgggcagagggaatccggagatcgtcaatggcaggagaaagagcaaccagaagaccgagatgaatttcaacactatcctagaagagattcttattaaaaggtcccagcagaaaaagaagacatcacccttaaactacaaagagagactttttgtacttacaaaatccgtgttgagctactatgagggtcgagcggagaagaaatacagaaagggcgtcattgatatttccaaaatcaagtgtgtggagatagtgaagaacgatgatggtgtcattccctgtcaaaataaatttccattccagtccacaaagcagggaccgatgggtgaagaagttaaaagaagaaataaagaacaacaataatatcatgattaaataccatcctaaattctgggcagatgggagttaccagtgttgtagacaaacagaaaaactagcacccggatgtgagaagtacaatctttttgagagtagtataagaaagaccctgcctcccgcgccagaaataaagaagagaaggcctcctccaccaattcccccagaggaagaaaatactgaagaaatcgttgtagcgatgtatgacttccaagcgacggaagcacatgacctcaggttagagagaggccaagagtatatcatcctggaaaagaatgacctccattggtggagagcgagagataagtatgggtggtactgcagaaataccaacagaagcaaagcagaacagctcctcagaacggaagataaagaaggtggttttatggtgagagactccagtcaaccaggcttgtacactgtctccctttacacaaagtttgggggagaaggctcatcaggtttcaggcattatcacataaaggaaacagcaacatccccaaagaagtattacctggcagagaagcatgctttcgggtccattcctgagatcattgaatatcacaagcacaatgcggcagggcttgtcaccaggctgcggtacccggtcagtacaaaggggaagaacgctcccactactgccggcttcagctatgataagtgggagattaacccatcagagctgacctttatgagagagttggggagcggactgtttggagtggtgaggcttggcaagtggcgggcccagtacaaagtggccatcaaagctatccgggaaggcgccatgtgtgaagaggatttcatagaggaagctaaagtcatgatgaagctgacacaccccaagctggtacagctctatggtgtatgcacccagcagaagcccatctacatcgttaccgagttcatggaacggggctgccttctgaatttcctccggcagagacaaggccatttcagcagagacatgctgctaagcatgtgtcaagatgtctgtgaagggatggagtacctggagagaaacagcttcatccacagagacctggctgccagaaattgtctagtgaatgaagcaggagttgtcaaagtatctgattttggaatggccaggtacgttctggatgatcagtacacaagttcttctggcgccaagttccctgtgaagtggtgtcccccagaagtgtttaattacagccgctttagcagcaagtcagacgtctggtcgtttggtgtgctaatgtgggaaatattcacagaaggcaggatgccctttgagaagaacaccaattacgaagtggtaaccatggtgactcgtggccaccgcctccaccggccaaagctggcttccaaatatttgtatgaggtgatgctgagatgctggcaagagagaccagagggaaggccttcctttgaagacttgctgcgtacgatagatgaactagttgaatgtgaagaaacttttggaagatgaatggtggccccagtttccaaggcaagaggaagaaatggtgtgccatcggaacgcaattctcttggcacctgggagtatagactgctctgcttacaacacgggagccccagcgcatctgctgctgatccagcctgagctcagtggctgctttgccggctgcacagatggtctctcagagctggtgacttgaagcactcattttgctcatttcttcaagggtttgagtgccagccatgtataccaggctctgtgcccaggcctcaggagatgaacatgggactatgctagctgatgctagcagaaagccagggtggttgtgatggggacgagtcatgtcccagcgtctcttccatgccctttggcttttacataaacctgggcctggagtgttgtctaccactgagttctaggaaaagcaggaacccacctggatacgtagtaatcctctgttttggaaacatctctttccaaacttgttcttagtagtatgcttaaaaatttgtatattgtatatattgtaaatacatataatatataaagttatatatttataagtaa

SEQ ID NO: 780 - protein, 523 aa, Mus musculus
MMVSFPVKINFHSSPQSRDRWVKKLKEEIKNNNNIMIKYHPKFWADGSYQCCRQTEKLAPGCEKYNLFESSIRKTLPPAPEIKKRRPPPPIPPEEENTEEIVVAMYDFQATEAHDLRLERGQEYIIKNDLHWWRARDKYGWYCRNTNRSKAEQLLRTEDKEGGFMVRDSSQPGTVSLYTKFGGEGSSGFRHYHIKETATSPKKYYLAEKHAFGSIPEIIEYHKHNAAGLVTRLRYPVSTKGKNAPTTAGFSYDKWEINPSELTFMRELGSGLFGVVRLGKWRAQYKVAIKAIREGAMCEEDFIEEAKVMMKLTHPKLVQLYGVCTQQKPIYIVTEFMERGCLLNFLRQRQGHFSRDMLLSMCQDVCEGMEYLERNSFIHRDLAARNCLVNEAGVVKVSDFGMARYVLDDQYTSSSGAKFPVKWCPPEVFNYSRFSSKSDVWSFGVLMWEIFTEGRMPFEKNTNYEVVTMVTRGHRLHRPKLASKYLYEVMLRCWQERPEGRPSFEDLLRTIDELVECEETFGR

SEQ ID NO: 781 - DNA, 986 bp, Mus musculus
aggtgtcggacgacactgaggacacagaggatgtccgaagaatgaaatgagcagatggaactttgaaggctgagtcaacgggcagaggggaatccggagatcgtcaatggcaggagaaagagcaaccagaagaccgagatgaatttcaacactatcctagaagagattcttattaaaaggtcccagcagaaaaagaagacatcacccttaaactacaaagagagactttttgtacttacaaaatccgtgttgagctactatgagggtcgagcggagagaagaaatacagaaagggcgtcattgatatttccaaaatcaagtgtgtggagatagtgaagaacgatgatggtgtcattccctgtcaaaataaatttccattccaggtgtccacaaagcagggaccgatgggtgaagaagttaaaagaagaaataaagaacaacaataatatcatgattaaataccatcctaaattctgggcagatgggagttaccagtgttgtagacaaacagaaaaactagcacccggatgtgagaagtacaatctttttgagagtaagaaggcctcctccaccaattcccccagaggaagaaaatactgaagaaatcgttgtagcgatgtatgacttccaagcgacggaagcacatgacctcaggttagagagaggccaagagtatatcatcctggaaaagaatgacctccattggtggagagcgagagataagtatgggtggtactgcagaaataccaacagaagcaaagcagaacagctcctcagaacggaagataaagaaggtggttttatggtgagagactccagtcaaccaggcttgtacactgtctccctttacacaaagtttgggggagaaggctcatcaggtttcaggcattatcacataaaggaaacagcaacatccccaaagaagtattacctggcagagaagcatgctttcgggtccattcctgagatcattgaatatcacaagc

SEQ ID NO: 782 - protein, 85 aa, Mus musculus
MMVSFPVKINFHSRCPQSRDRWVKKLKEEIKNNNNIMIKYHPKFWADGSYQCCRQTEKLAPGCEKYNLFESKKASSTNSPRGRKY

SEQ ID NO: 783 - DNA, 2611 bp, Mus musculus
gagctccgggctccgcagtttggacgtcgctctgtcttggcttgtctcggcacgcgctccgtcaagaggtgtcggacgacactgaggacacagaggatgtccgaagaatgaaatgagcagatggaactttgaaggctgagtcaacgggcagagggaatccggagatcgtcaatggcaggagaaagagcaaccagaagaccgagatgaatttcaacactatcctagaagagattcttattaaaaggtcccagcagaaaaagaagacatcacccttaaactacaaagagagactttttgtacttacaaaatccgtgttgagctactatgagggtcgagcggagaagaaatacagaaagggcgtcattgatatttccaaaatcaagtgtgtggagatagtgaagaacgatgatggtgtcattccctgtcaaaataaatttccattccagtccacaaagcagggaccgatgggtgaagaagttaaaagaagaaataaagaacaacaataatatcatgattaaataccatcctaaattctgggcagatgggagttaccagtgttgtagacaaacagaaaaactagcacccggatgtgagaagtacaatctttttgagagtagtataagaaagaccctgcctcccgcgccagaaataaagaagagaaggcctcctccaccaattcccccagaggaagaaaatactgaagaaatcgttgtagcgatgtatgacttccaagcgacggaagcacatgacctcaggttagagagaggccaagagtatatcatcctggaaaagaatgacctccattggtggagagcgagagataagtatgggagtgaaggatatatcccaagtaattacgtcacagggaagaaatccaacaacttagatcaatatgagtggtactgcagaaataccaacagaagcaaagcagaacagctcctcagaacggaagataaagaaggtggttttatggtgagagactccagtcaaccaggcttgtacactgtctccctttacacaaagtttgggggagaaggctcatcaggtttcaggcattatcacataaaggaaacagcaacatccccaaagaagtattacctggcagagaagcatgctttcgggtccattcctgagatcattgaatatcacaagcacaatgcggcagggcttgtcaccaggctgcggtacccggtcagtacaaaggggaagaacgctcccactactgccggcttcagctatgataagtgggagattaacccatcagagctgacctttatgagagagttggggagcggactgtttggagtggtgaggcttggcaagtggcgggcccagtacaaagtggccatcaaagctatccgggaaggcgccatgtgtgaagaggatttcatagaggaagctaaagtcatgatgaagctgacacaccccaagctggtacagctctatggtgtatgcacccagcagaagcccatctacatcgttaccgagttcatggaacggggctgccttctgaatttcctccggcagagacaaggccatttcagcagagacatgctgctaagcatgtgtcaagatgtctgtgaagggatggagtacctggagagaaacagcttcatccacagagacctggctgccagaaattgtctagtgaatgaagcaggagttgtcaaagtatctgattttggaatggccaggtacgttctggatgatcagtacacaagttcttctggcgccaagttccctgtgaagtggtgtcccccagaagtgtttaattacagccgctttagcagcaagtcagacgtctggtcgtttggtgtgctaatgtgggaaatattcacagaaggcaggatgccctttgagaagaacaccaattacgaagtggtaaccatggtgactcgtggccaccgcctccaccggccaaagctggcttccaaatatttgtatgaggtgatgctgagatgctggcaagagagaccagagggaaggccttcctttgaagacttgctgcgtacgatagatgaactagttgaatgtgaagaaacttttggaagatgaatggtggccccagtttccaaggcaagaggaagaaatggtgtgccatcggaacgcaattctcttggcacctgggagtatagactgctctgcttacaacacgggagccccagcgcatctgctgctgatccagcctgagctcagtggctgctttgccggctgcacagatggtctctcagagctggtgacttgaagcactcattttgctcatttcttcaagggtttgagtgccagccatgtataccaggctctgtgcccaggcctcaggagatgaacatgggactatgctagctgatgctagcagaaagccagggtggttgtgatggggacgagtcatgtcccagcgtctcttccatgccctttggcttttacataaacctgggcctggagtgttgtctaccactgagttctaggaaaagcaggaacccacctggatacgtagtaatcctctgttttggaaacatctctttccaaacttgttcttagtagtatgcttaaaaatttgtatattgtatatattgtaaatacatataatatataaagttatatatttataagt

SEQ ID NO: 784 - protein, 545 aa, Mus musculus
MMVSFPVKINFHSSPQSRDRWVKKLKEEIKNNNNIMIKYHPKFWADGSYQCCRQTEKLAPGCEKYNLFESSIRKTLPPAPEIKKRRPPPPIPPEEENTEEIVVAMYDFQATEAHDLRLERGQEYIIKNDLHWWRARDKYGSEGYIPSNYVTGKKSNNLDQYEWYCRNTNRSKAEQLLRTEDKEGGFMVRDSSQPGTVSLYTKFGGEGSSGFRHYHIKETATSPKKYYLAEKHAFGSIPEIIEYHKHNAAGLVTRLRYPVSTKGKNAPTTAGFSYDKWEINPSELTFMRELGSGLFGVVRLGKWRAQYKVAIKAIREGAMCEEDFIEEAKVMMKLTHPKLVQLYGVCTQQKPIYIVTEFMERGCLLNFLRQRQGHFSRDMLLSMCQDVCEGMEYLERNSFIHRDLAARNCLVNEAGVVKVSDFGMARYVLDDQYTSSSGAKFPVKWCPPEVFNYSRFSSKSDVWSFGVLMWEIFTEGRMPFEKNTNYEVVTMVTRGHRLHRPKLASKYLYEVMLRCWQERPEGRPSFEDLLRTIDELVECEETFGR

SEQ ID NO: 785 - DNA, 154091 bp, Homo sapiens
ccatggcacagtcccttacggcttcccttggctaggggagggagttccccaactccttgtgcttctagatgatgcaccattccaccttgcttcagctcaccctctgtgggctgcacacactgtctaaccagccccagtgagataagttgggtacctcagttggaaatgcagaaatcacccaccttctgtgttgatctcactgggaactgcagaccggagctgttcctattcaaccatcttgccagccacctatccttccatttttgatttctggtttgatttcactgtgatcagaggacacaatgtatatgatttcagtgattttaaatttgttgtggtttatgacctagtataggtctagcttggtatataatattctgtggatacttgaaaagaatgtgtatcctgctgttaggtggagtgttccgtaaatgtcagtcagatcctgttgattggtggtattgttgagtacccttgctagttttctgtttacttgttctatcagttgttgagatggggatgcttttcaaattccactttggtttatctatagtgcttctgagtatatctctttgtgtagctttttaaatgatttgttttacactattaaaactttctttttttttttttttgagatggagtctcactctgtctccaaggctagagtgcagtggcatgatcttggctcattgcaacctctgtctcccaggttcaagtgatttttctgcctcagcctcctgagtagctgggattacaggcgtgtgccactacacctggctatttttttgtatttttgtagagacagagctttgccatgttggccaggctggtctcaaactcctgacctcaggtgatccacccacctcggcctcccaaaatgctgggattacaggcatgatccactgtgcccggccacactattaaaacttctactggtgttatcatttttccatctgagggaaatatggaaattttagctccctataaaagagctaaggccgggcgcggtggctcacgcctgtaatcccagcactttgggaggccgaggcgggcggatcacgaggtcaggagatcgagaccatcccggctaaaacggtgaaaccccgtctctactaaaaatacaaaaaattagccgggcgtagtggcgggcgcctgtattcccagctacttgggaggctgaggcaggagaatggtgtgaacccgggaggcggagcttgcagtgagccgagatcccgccaccgcactccagcctctgggcgacagagcgagactccgtctcaaaaaaaaaaaaaaaaaaaaaaaaaaagagctaaaatttaccctcctccatttataaatatcctaaatattttctttgcatacttttagaacctctcagtgttaaaatttatttttttaaattattattattattattattttgtagaaatggggtctcactatgttctccaggctggtcttgaactgctgggctcaagtgatcttcccaccttggcctcccaaaattctgggattacaggtgtgagccattgtgcctggccttggtgttaaatttttgcttcaattatccattataatttacaaaaggcagaggaaaatgaatatttactctatttatctgtattattgtttactgtgtttttccttctttcctttcaagattccatcttttattgatttcttcctgtttagagaacctcctttcaccattctttttgggtagatcagctaatgataagttgtcttcattttcttttatctgagaaagtctcgagtttctctttatttatttagagacagaatttttgcttttgttgcccaggctggattgtaatggtgtgatctcagctcactgcaacctccacctcctgggttgaagaaattctcctgcctcagcctcccgattagcttggattacaggtgcccatcaccacgcccggctaatttttgtatattttactagagatggggtttcaccttgttggtcaggctggtctcaaactcccgacctcaagtgatccacccaacttggcctcccaaggtgctgggattacaggcatgagccactgtgcccagctgaatttcccttaattgttgagggatattttcactagatataggattctaggctggctgacagttattttatttcagcattcaaaaaattccctgccacttccttcttgtatttcctgatgagaaatatgctgtcgttcaaattgtttttttccctattggtaaggtgttatgtctctcttgctgctttcaagattttttctttatctttagtgttaagaagtttgactatgatgtgtctcagtgtggatttctttgtgtttatccggtgtgagggtaactcaacttcctagtgtataggtttatgtcttttgccaaatatgaagagttttcagccattatttctttgagtactttttccagccctgtcctcttcctctgagactctgaagacacaaatggtagatctgttgttatagtcccataggactatttttttttaaatcgctgttgttcagattaggtagctgctattgctcaattttccagttcactgattctttcctctgtaccatctattctgctgaacagaggtttttttgttttgttttgttttgttttgttttgagatggagtctcgctctgtcacccaggctggagtgcagtgttgcgatctcagctcactgcagcctccacctcccgggttcaagcgattctcctgcctcagcctcctgaatagctgggactacaggcacgagccaccacacctggctaatttttgtgtttttagtagagatggggtttcaccatgttggtcaggatggtctcgatctcctgacctcgtgatccatccatcgcagcctcccaaagtgctgggattataggcatgagccaccgtgcccggcctgaacagagtttttaattgtagttattgtactttcacttacaaaatttccatttggtctttttttactttctatttcttcactcaaactttcaatttctttgcagagactatttacttcatttgtttcaagcatgtttctaattgttcattgaagcagttttatgatgatgatttaaaatctttgccagataattctaatatccctgtcatcttggtgttggcatctactgattatctttttcattcagtttgagatctccctgtttcttggtatagtgagttattttcaattaaaaccagaaaatttggcgtattctgtttttagattctggattttatttacgctttttgttttagctggcttcttctgacactgtcttggcaggggaaggagggcatgcaggtcatctcctctatctacagccaggtaggggtaaaaatccaggtttcccactattcttccattgacacttgggggtggggtgctcttgattactgctggatgcggttgggagttccatcccaatgaatggatacaagaagttaggcctccactggtacctccctgactgggaggaataggaatgtcttgttactattctctgtgtggcctttggtgaaaacatggggtaggggtgtgtgtggtctcaataactggtttcgtaatcttgcttgaatttattttgaaaacttattttggctttaagtatgtataaaatgctagacacataaagaataaataagtagctttatatttatatatttaagtgaattaaaatgaaaatgtttgtttaaaagggcttcctacttgattcaggtttgagaaatacccacatgagtgaatgcatggctgcacactcacatcatgagtccctggaattgttcgtacttccctccaggttcttccacctacacaaaaagacagaaggagctgggcccctgacactatggaacatcatgccagcctgaccctgatgctctctattgaaggctcttgttagtttcctattgctgctgtaatacattgccacaaatttattgccttacaacaatacaaatgtattctcttactgttctgggggtcagagtccaaaatcagtttcactggggtgaaatctaggtgtctggtttcttttggaggctctaggagagaatctgttttcttgccttcaccagcttttagaagctttctgctttctttggctcgtggtctcttccttcatcttcaaagccagcagtgtagcatcttctaatctctctcttactctgacctctacttatctcattataccctgccttctccctcatataaggacccttgtaactacattgggctcacctagatagtgcagaataatctcatttcaagatccttcacttcatcccatctacaaagaccgttttgcagcataagttatactcacaggttctagggaattaagacatggacatcactgggagggccttattcagcctaccataagggggtgctgttacttgcagctaaatcaaattctgaatgattgaccttccaccagaatgtaagctcccctacaacagggagttttgtctggtttgttcaccaatgttttctcagtctcctatcgtagtgatgggtgcattttcatggctgccaccctcgcaaaggaggtaacttcaaaaagatctggagatagagcactccaggcagaggaaacagcctgttcaagccctcaggccagagaactctttttatttataggaataatactcaatatatcattttattgtgacagaacaactcagcttttataaactatcaaactgttgagataatggacccctttgaaactctctgtctcttttgctaagcacaatctggttttacttctacatcttcttttctggctctaacatcgaaaaaattttcaattactatcaaaccaacataaaaacattatacaagaaatatatgtataaacatcattcatgattcaaagatcattccctttggcagctttgaaaggttaaaaatgtaaaccctggagttatactgttttatgttcacatctgggctttgccactcaataactatgattttgggctattacttagaccttctctgcctttgtttcttcatctgtaaaatgaagataacaatagtccacctcacacagctgtgagaattaaatgaattaatctaatatgcttagaaaggatgctggcacatcccctcaataactgttaatcataattcttacttttcagttttcctccacataatttgtatttagttgcaattacaggtactcaaagcattgtgttctacttttaaaaatataatcttgttcataagttttatttcctatctctttttcattaacataggtaatcttattttattatttaattaattaattaacttatttagagacaggttcttgctctgttgcccaggttggagtgcagtggcatgatctcagctcactgcaaccctgccctcctgggctcaagcaatcctcctacctcagcctcccgaatagctgggactgccggtgagcaccaccaagcctggctaatatttgtatttttagtagagatggagtttcgccatgttgtccaggctggtcttgaactccagagctcaaaagatccacccgcctcagcctcccaaagtgctgggattataggtgtgagccaccatgcctgaccaacataggtaattttaaatgacagcttgacattccatactgttaatatattttacttaaacatttccttattattggacatttattttattattataatgatgatcttataaatatactttgcatatgatgctttttatttcttttgaattatttatttagcatctcttcccagaaatatgattattgattctgtgtccaatatttgaaactccttccttctatgcaatagttctaaagaagcaactactttcagcacatgatggaaggagaagcagacatatcataggatcacaatgaagtcatcttcatgtaggaacagactctccatggaagactgataaggtctgcattatcgtcattgtcatcatcatttattcatcaacaaatgtattaattatctatgatgggccagtttccttttcagtaggaagatggttacaaaataaaaccagtgacttgcacaaaagaatgcaagaagctggccgggcatgctggctcatgcctgtaatctcagcactttgggaggctgaggcgggcggatcacaaggtcaggagttcaagaccagcctggtcaacatggtaaaaccccatctctactaaaaatacaaaaattagccaggcgtggtggcaggcacctgtaatcccagctactcaggaggctgaggcaggagaattgcttgaacccaggaggcagaggtttcagttagccgagattgtgccactgcactccagcctgggcaacagaacaagactctgtctcagaaaaaaaaaaaaaaggcaagaagctataaatacaaatatatacacacatatatttttgcaaaccttccaggttgattctgcatgtcttcttctgtaccatgtggaatctacatgtaagttaaaaagaggcattttcgtctctcaaggaactgaaattatgtcaacctgatactgatcatctaaacaaataaactttatggaagccatagcgatatcttgtaagaagggagagtcttgtctcccaagaagtttatattaatacctttttctctgtatcttgattttcttaaaataaagatggttttactaatattgtttgagtcttctttttggaggcagggggagaaatctttttaagtcaactactagattccttcttttgactagggacgaatgtaaaagtttgaattatacaggcccaaatgtagtattctgttttcacctaaaaaataaaaattaaagaaagactaaatcttttttattaatcccaccacattctgagttcagtttttacaccttttccttaatgtagttgaagttccctaatggcctcttttttttgtctgtctctctgtctctttctcaacaccttgctgaaaaaaattgccattgttctctattatgtgatctatggatggtatacctgtggcaattgcctacttaaactgtatgattgatagtgtaacaaatgtcttatttagaaaactataactttatgaaaattaccccaactattaagaattatgttggatctaggtgttttatttacagatctgttctctttggcttttctgagagttagtagggacaatacagacacttttctctcttttaatttaaactttatgaagaaattatgtaagggtctgggttttctgccttttcaaacttcataaacattgagatcctcattaccattgtcaagaatatgagctaccatcacctaccaagaacaggcaaggcgaattggaaactggttcttctaaccatcataatatcagttaattccttaaggcagtagctcttacctttttgggatcagtcaatatgataaaagttctaagtcctctcacttaaaaatatacgtacataagcatttttcttgggagaaaattaactgtattactataattatatatctataactctctttcctgccccccaacacagtttttttgcatagagtttcagatggtttatggtcctgtcccctcaaagtacatctgtgctaggggaaattacgttaactagccaaaacaagtacctgaatgggacaagaggcaggagagactcgggtagggaggagagagtagatcataaaaaagaaattttactagattcattcaaagtactagtcattatactcaaagtcctcactggagagaggatttgtaatcagaaggccttggtccaaatctgtgccctcttcccatctccccttttcctagatagttgtctgacttttggaaagtcattgaaacctctctgaccctcagttgttgttgctgttattgttttccctgttaaatcagggttccccaacccgcaggctgtggaccagtaccggtctgaggtctgttaggaacctggccgcatagcaggaggtaagcggttgagcggtgggcaagggagcaaagcttcatctgtatttacagccactccccattgcctgcattacggctgagctccgcctcctgtcagatcagccttggccttagattctctcaggagtgcaaaccctagtgtgaactgtgcatgcgagggatctaggtggtgtacgcgttacgagaatctaatgcctgatgatctgaggtggaacagtttcatcctcaaaccatctcttcctgacacctgtccatggaaaaattatcttccataaaaccagtccctggtgccaaaaaggttggggaccactgtattaaatggaatcttgttagacttctcagggttattacagtgatcaaaggagaaatgatataggaaggcactacttttaagtcccaagcaagcatgaggtgtgataagtatcaaagcacttgccattcccttagcttcagccttgggttggccgtctgtcctatcattcaggtctcagctccactgttaccccagagaagcctccagtaacatcatatctaaagtagcctccctctccctttcactctcaattccatcaccctgctttattttagtcaagacacctcacttacgaagtggtttaattttttgcttgcctgttgatcatgtgagacaagtaacaaacgttaagaagccatgcttgctcatttctgcttgtcagcataatttcacacagcccctgactctgtgaccacctgcagctggcggaaagatgctttgaagacaaaacgagatagaacacaggatcccccacgtctcttgcctgagcccttgccttttactgcacctaagataaagtctgatgaggttagtgattatgcttctgtaatctataaacagatgtactcttaagcccaaactgtgatgtgcttttacacatactgaatcttcaccaactgtttctaaattgagaagggaagttctgtgttggagggatctgcttgaatctctctaaaagactcctccagggctgtaggcctccatctctagtcctcagtaagacttctgaataaaactaactttcattctttaacagcttgatttttaaattttagtcgacaatcacttattgtctttctcctacagtagaataaaagtttcctaatggcagagcccttgcctcatcttccccaggcatgggaacagttcctggtataggatgcacacagattttgctgattcaggatagccgtgaataacagtggagactccagaggaggaagacctggatttgaagcccagcttctcaacccagcttctcaatttactagttgggtgacattaggcaagttatttagcttctctctgcctcacttgcaccgtatgtgaaaagggggattctgataatatacgcttcagagaacttttagtacatgtgaagtacctagaacagtgcctggcacacagttaagtcttacatgtgttttctactcttcagtgagtttaatgttaacacattaatagtgcacgtgaccctctaagtgtatcagatatgcactgccccctcgggtttcacaggaaaaccacttactcttttggtaaaacaggctgcatggctccactgccccgcgtcacccgcctggcctcccaccgcttagcggaaggggaggtgcggttcctaattccgacaggcacgtagtcttccacaagtggcactactcggggctctcctggctaggggcgttcgagccactaggggcgggtctcctgggatgggaagactggggctagggaggttcaacgccgcccccggaaacctaagggacgctccctgaaactcaccgggacgcgcttccgacccattccggtcacttgccttgaaatcgccgcagggctgcgcaaacctgccacccagggcccaagcgaccggggcggggcgatcgaggactgggcgggcctgcaggatcagaggcggggtagggcgtccacggggccagcaatcggggcggggcggggtgattgggggcgggacggggagatcagagggcggggcggggcgctttgctctggactctggggcgctaggctccggactccgcggcgcagactgcacctcgcagtctccccaggtccgcccagcagccgcgcttcagccaggtaagggcgccgcgggcgggctggggcggccccgggagtgcgatactccgggcgaggacgggtggggacggggatgagcgcggcaagaggcggcttccacacgcccctcgaggaacggggaaggattttctcccctccgtgccgcagtgagcgcgggtgcgccgtctctgggtcccctcttcggtccgggaaggagggacaggtgcgcgcagtggcgcagcctcgccttcctgccggcagtagattctccacttctccaactcccgcactgacctctcctaaggaacacccgcccctttttcttgaagttccaggcctgaggccgccctgcggcaagttcagcgttggggtcacgtcccagcggcgagcagggctgatgcctcctttcgggttgggcggcggcgcgatcttgattgaaatttggcagtgtcgagatagatatacctaatgtaaatgacaagttaatgggtgcagcacaccaacatggcacatgtatacatatgtaacaaacctgcacgttgtgcacatgtatcctagaacttaaagtattaaaaaaaaaatttggcagtatcggccaagatgttccgcagttgcacgtgactcacccagtgaagttcacgttctcttccccacccccccaataccccgcccacctcgccccgggaagttgtgtttgaatattgaaaacaggtgcccggccaatgtatgtacttcttggaaaaactagggccttgacctgggagtgtacactttcctaattttctttaatcctaaatttcttgtggattttattttattttatttttcccgtggacgtgtaacatggtggtgtgtaccaggtttggaaacaatctcatccattgctattctttggaaactggaatatttgattcgaaagattgatcttaatgttaacttggaacaacaggatggctggtggctaagtgggtttgaagattatccaaaatagttataagttttgcgcgtattccttgtatttttccagtgaatgctcattttcctcttgggaaattctgagaatttactcacttctagattattctctgctaaagagctgggaagaaacaaaccagcggatctcccaaataaagtttgggatttaacagtttaggtcgtgacactggtagctgcttactctgcaataatcacctggagtaagggatattaagatttatttctaaggggaaaatagaagtatgggtaactttcacattatgtatttgaaagtattttttagtttagttacattttcaatgtttacggaagacttacactttccccatactccagttaatctgatccatatattacactcttgccaacgcagatgcttactgtggtgtgtttatgttaatgatcttgactcttctcacaagggtgtgtacattctggtctgtggaactgtataggccaagtgtaaactcatgcagtcagtgctttactctagttggcaatacctttgccccacataggtccaactagaattttcacatcttcccaactaggaaaggatatagaatattaatgtatgctctagcattttcaacctactttattctttatcaagataatcatgttttctcagcagctagttactcaagggcagcagctatgttttaccaaaccgtggaaaataaagctgagataatggtaacctttgcttccttaagttgacccttgatagggaggttggaagggttgtgagcagtgtctggcctacttttacgcttggggaagaattactggcctctctgcctttctccgggtatccagagtgctgggagacagggccttgggcctccagccacacctctgcctacaggttcctccaggttgaccaggttggtgcctctcctccctgccccagctgttccagctccttagcttccaccccacccctcccagattcttacccctagacaaatcaccatgttgttcagggcaggggtacttggtctgcagagtcagcatgagtgttgatcttcagcatggtgctggttccccgtggatgctccttggatgtctgctgcttcagagcctttattatgctcccttcttgtccagtctacagcaggcaaagtggagttactgaagtcaaacccagatcaacagttttgggggccagctgccttggttggactaattacgatcataaattgggcattcaagtctgttggaaaaaagtgaaattggctcatggtcactggcaattgtaaaattatcctgtacgatgtggttatgctattataaaaggtttgtggaaaaataagaaacaacccagaaggaaggggcctagtagttgcctccacctccaaacacgcctgtgcttgggcttgccttattgtcactaccccagctcaaccaattcttctgggattggattgtaacaattaatttccccaccatgtttgactgctcagagctcagatgaccgcagctactgtagtatagatgtagagaattacatactcttttgtttagagaaacaaggatgggctttttcaaaacagattgttattagggaaacaaagaaaaagcaaacaaatgtaaaaatgtgtgggcacagaagccaaagtttgttttgttatggtttatagttttaaacttttatccaagttacatttctccctttccagaaacaaccacttgtaattctttgccatttgtggcttatagttgatacttcttgatttttcaattttaagcattatctgttgacttcccactgtggaagatgatgagttggctctctttttccctccaacccccaacgcaagtacagcttccctattttcccattcttgcagtcgttaaaacagaatattgaataatggttagatcaaaattcacagctaagccaagcataacttttttttcgttttttttttttttgagacagagttttgctcttgttgcccaggctggaatgcaatggcacgatcttggctcaccacaacctctgcctcccgggttcaagcgattctcctgcctcggcttcctgagtagttgggattacaggcatgtgccaccacgcctagctaatttttgtatttctagtagagatggggtttctccatgttaatcaggctggtctcaaactcgtgacctcaggtgatctacttgccttgggctcccaaagtgctgggattacaggcgtgaccaaacataactttttattttccttggagttaataatggatttgtttgttcattttatttattttgtgctcttcattgattaaacccacagctcttggccagttttccaaattctccctcaattgaccaggtattttgtcaatttcgttttcctcaagaagctgttcctgagcctactggcttgctataatccagactgggtgcctttggtacattggcacacttgtcaccccaagggttccctttgtcatcattctggagattctcatcatttgtctcttgtgttggatctcctggtacttgtagcacatgtcttcctcagtcttggttgactcccttcttttggtagagcccatcctaaaggagcttcctggaataggatgcctagaggtctacttttctgagactgtagatgcctgaaaatatgttttcaactgacaattgatagtttgactgagtgtagatttctaagatggcaattttgaaggcattgttctattgacttccacattgtggtattgctgttgagaaatttagaactctactgattcctcagctttttcttgtaatctgtgtagaggttacaatttgctgggtcctccctgaagtttatagaattttctcttggcctccacagtcctaaaatttcacgacactgtgcctaggtttgggtctgttttcatgcattgtgttgggctctttgaatctggaaactttcattcttcagtttgggaaattttcttaaattatgtcattggtggccgggcgcagtggctcatgcctataatcccagcactttgggaggccaaggcaggcagatcacctgaggtcaggagttcgagaccagtctggacaacatggtgaaaccccatctctgctaaaaatacaaaaattagctgggcgtggtggctcacccctgtaatcccagctagtcaggaggctgaggcaggagaattgcttgaacccaggaagcggaggttgcagtgtgctgagattgagtcactgtactccaacctgggaaacagattgagactttgtctcaaaaaaaaaaaaaaatatatatatatatatatacacacatatatacacacacgtatatatgtgtgtgtatatatgtatatatatacgtatatatgtgtgtgtgtatatatatgtgtgtgtatatatatacatatacacacacatatatatatatatctatctcattggtaatttttccccctctattttctgtgtctgtgagaagctcatattgttcagatattggctatttttgactgggccaaaaataagtttttcatgactgtaatcatgaatatttaaaatcaaaatctctatttttttggttgcctgaatatatacatatatatttgtatgtgtgtggtttgtgtgtctatttctttctggtttttgttttatagtgtcagtgtcttttcctttctccctaagaagcttaatgattttttggagcaactttttttccttcctgcacagattgaatttcccaagcggcttttgtcttttcatttgtttaggtttcttctctttcatgttagaagttttccttgtgtaactaatgcccttggttatctactcacacttcagagggggattaaaaagcagaaggtctggggttcaggcagggtggctcacgcctgtaatcctagcactttgggaggccaaagtgggcggaacacttgaggtcaggagttcaagaccagcctggccaacatggtgaaaccctcgtctctactaaaaataaaaaaaattagccaggcgtggtggcatgtgcctgtaatcccagctactcagcaggctgaggcaggagaattgcttgaacctgagaggctgaggttgtagtgagccgatatgatgccactgcactccagcctggcaacacagggagactctgtctcaaaaaaaaaaaaaaatgctgaagatgtggatgagcttgtcgactggggaattcatggtagggggaatctggctgggctttttatttggggaacctctgtggtcgttacctcttgggctggtgagagtcctcagagaagccttttccattcttttccccagagattgacagagagcctggttgtcagtaagtggaaaagaagactggaagtctcagcatccagtatgtagatgtgcatataacccctccatgctgtttgtgtacagaccccctgaagggtgaaggagtagggaggaaactccaggttttttgctggggtagagaaggggcagtcacctaactggttggagtggccagagggatctgtgggatccagctttttaaaaagactttaaaaagtcactaattttttagcccacccctctttttatagagggttcaattgcctttaattatttaaccttttggagattccatggtgtaaatcagattatttcttggcttctgcttattccaccaaaatgtttttgctattgtctcttcactcattctctccatccttgctgatttatacatgaaataaaaaaatttctttattgtcattgtcttaggctttcagaagggagagaaagtagaggtttttgtccagtctgctaatagtggctagagtataatttctttaccaatctctatccagagactggcaccattcagtcatagcagtgtgttgctgttttccccttcctctacccacaggaaacattttcggatcaggctgggccgctgagccgagtttggacctcagatgccttcatatacaactctaagtgtacactaccaattgatcatagttgtcatagggggcaaaacctatatcttaggttgggtggtacgtagattactggcatagagcccttgttcctgtttctttctttctttcttttcttttttttggcgggggtggagacagtctcgctctgtcacccagactggagtgcagtggcatgatctcagctcctgggttcaagtgattctcctgcgtcagcctcccgagtagctgggattacaggtgcacgccaccacacccagctaatttttgtatttttagtagagacagggtttcaccatgttggccaggctggcctcgaactcctggcctcaggtgatctgcctgccttggcctcccaaagtgctgagattacaggtgtgagccaccgcctggcctattgttcctgtttcttgaattcactttgtgtaggatgactctttctgccatcttgacctctgaatgttttacctttcagtgaagtgcagcttctattaagtccaatattattttaatctgaaagatgggattggtgtcattgatggccatgtggcctcaatggaagttatcattatttccttctggaggccagtttatcacacaactgccttaccagcagcagcacccttacttccctttccacttgtgccctccttggaatgtgcaccaagttcctgtttctggctgggctgatgtaccctgccgtttgtggatgatcacgacttttccaacgtcatttcatcagttgagtcattcctcaggctcccttaatgggctgtgaacttccagcatgctctcccagttgctttgtaacatcaacattctttatggttacacacatgatgacaagagtcagtttccacaaaagtaggaggataattgttcctaagccatcttatctgtgcagaaaaagcaaagctcgatcttcccatgatggcagctatgcattggcaatacagaaaacaggagtgctggcgattgtgacaatggagtgggtgcaacaattactttatctttggaggatgacagatggttaaaaaggctttttcagcaggtaccactaggcaccattgtgaacaaaagcttggctagtagggatactgcagagctcattcctcccactgtgcttccacaagcatccttcccttttctaaacgaagtctttgaagtcattggaacctcccttttccaggcagtatagtttttctgtaatgtactgggtcttcacagaagttctttcctagggaaagcatagtaccaagcaagtacttaatatactgaatgaattttccagacaattttggacactttatagttaagaaaaaatgatatttgggccaagagtggtggctcatggctgtaatcctagcactttggaaggctgaggcaggtggatcacttgaagtcaggagttcaagaccagcctggccaatatggtgaaaccccatctttactaaaaatacaaaaattaggtgggcctggtggcacgtgcctgtaattccagctactcgggaggctgaggcaggagaatctcttgaactcaggtagcagaggttgcagttagctgagatcgcaccactgcactccagcctgggcaacagagcaagactccgtctcaaaaaaaaaaaaaaaaaaaaaaaaaagagacatttggtcacaattacccaagttgtactcaacaatctaaattctctaaattcttgattagactttcacatcacttgtctatatatggattgaaatatagagcattcaatttaagttttctcaagtgtattgtttcttgtattatttagaaatattcttcactgaaaacattcttgaaaggacaacatacattattatcattattttccatctgtatattttttcttagcatagtgttatgattatcttagtttttatggctacaaagaatggattttggaggagggagggaagtaagtattcattatgttatctcatcagttttatgtttctaaaggaggaacacttttgtttggatttctacaatatatacttttgccttttgtaactatatgtcatttgtttttcaaggttaaagcttttaaccttgaaatgcttacaatagagtatcaaagcgacagactttaacttgtcatgtactatatgagatacttacaaggtgaaactccctgtcaagtatcctactccttttatttttaattttggtgacattataatgtgatttagtaggaaaaacctttgatttttcttctcttatccttcatggaattccaatgatatcttttgttactatttccttagaaactcttaatgtcctcacatactcctcaatattatgtttcaaccacgacttgtgggatttccacatgactgccccaaaaatgaaactggctttttttcttacaagagtgatttaaagtttcatttttctgccaatatgatttaagcatgcaacaaagttagtttttactattagggttatttttgatttgtagaaggcagttgatttcttcattttcctgcttgggtgataaaaatgcttgatccttcaaccatgcagggaaacagaaatacaatttaactgggtttgaatgctgtcagacatgtaaatttaggtatacatgcttttgaatttttttaaggattgtcagtgtctttgtcacatacttaaaccagttatagaagcattgcatgaaataattcttgttcataagttctggagtcctagccagaagacattttttaggctcagagctgttgacacaccatcttgcttcccccaggcaaaagtttgatctttgggtgccaccgaggttctcagacacctggtgtgctccttggactctccttgccatcagtaaaaaaaaattgtcattttgtagagttttatatattccttgttagaagatgtaaacaatactgaagcttacaaagaagaaattaaaaataaccctaaaaccattccagagagaatctttgtgaatccccttccagtcatctctattaccagctgacttttaataaatctttagcaatgttctagaaaataattaaggagcattatgttacaactgtttatgtaactccaaattctacaatctttatttatacacaggtagttactttatgacgttgtaattagtccatgcataattttctttgggtaattctgtcatgttagcatacggtggtattttgagccactccccagttgttggacacttagatttttttttttctttttttttgttttagagacagagtcttgctctgttgcttaggctggagcacagtggtgccatcaccatagcttactgcagccttgaactcctgggcttaaatagaaggtttgagcttcagcctctggcttcagcctcctgagtagctaggattgcagatgcatacgactgcatccagctcattgaaacgaaaattaagcagcgatgaggccttgctatgttggccaggttggtcttgaactcctggcctcaagtgattctcccacctcggcctcccaaagttctaggattacaggtgtgagccaccacacctgactgatttctagcttttattcatcagttttagaaggtcataaaataactcactagcaatgtgaagtttccattttttctcttttttgaccttttagaattacagtgtctctgttatgtgaggacaagaagagccagaatgcttgaggccatgttatgtacccagttataggtcagataaaactagaagaacctgacaggtcatttgcagagactgtgttcttgttggtaatgtgtagagcctcatttcatcttattggatgtctataggaaaactttccaaggatcagtaacaaaacatggaagagttgttatgtaactgtgcaatgacatttgacctcagtacctggtctagagtttatgaaactttgtgtgacccgggaaggcatcttatgtcctcaggaaactccagccttcctatccattgtgccatttctctactgcttgagtaatcatggcccagtaaggtgtgcaaggcaaccagcaatgttagagaattttgcattaatgtagtttcttgataaagaactacagcagagtgagctcctgttcagatttttcttttgacatctttctttttttttttttttgagacaaagtctcactttgtcaccctggctggagtacagtggcatgatctcgactcactgcaatcttcacctcctgggtttaggagattctcatgcctcagcctcctgaataactgggactataggcatgtgccaccacgcccggctattttttgtatttttagtagaggtgagcttttgccacgttggccaggctggtctcgaactcctgacctcaagtgatctgccagcttcagcctcccaaagtgctgggattacaggcatgagccactgcgcccagcccctttgtcatctttctagatatcatggtctaatgtttaaagccttgggtggatttcttttttcttttattttaggtttgggggtacatgtgaaggtttgttacgtaggcaaacatgagtcacaggggtttttatacatattgtttcattaccttgcatggatttctaagttaactattaactggaattattttcctgtgcttcaggttttgcatctattcaacaaactataatgacacataattaacagttcacttgagaaagattcatggcctaatacttgtaaaggactttgagcttctctgagagtgttttatacacagtcatgaacaaggagatggcttgttctatttggcaaagggcaagtatattatgcccattttatagatgagaaaagagagcctcatagaagataatggcttgcttagactcacggtaaatttaatgtagtgtctgtggaattttccttggactttgtggaatgaatgaaatctaaaataaattctacatgagtgtatgtgtagggaagtagggaaagtggatttatactgttttaagcaaatataacatttcggaggagagtctttccctttgaaagagggtaaccatgtcagacaaattcgctagagttcttaaagagaattaaataaataatcagggaagacagggataaacagattttccaagtgattttgaaaagacgccacacaaagtctggtaagtaaattcagtcagcaataagttgggaaaaatatttttgaaaatcaggactcaggagagggctacacgatgaacaaaggttaggcatagctggacatttctcagaatgtgtatcagaatacagatatggttgaactactctagttattatttttaaaataaattacatacaagagggagtatacagtctacatgaaccctttgggacatgaaaaagctaaacagttgatctcaagtctatgcaaaatggcagagaaataaagaatgcatttagggctgggcttagtggctctcttgttatcccagcactttgagaggccaaggtgggcggatcacttgaggttgaggagtttgagaccagcctggccaacatggtgaaaccttgtctctactaaaaatacaaaaattagccaggtgtggtggcgcatgcctgtaatgccagctactcgggaggctgaggcaggagaattgcttgaacctgggaggcagaggttgcagtgagccgagattgtgccactgcactccagcttgggtgacagagtgagattccttctcaaaaaaaaaaaaaaccaaaaaaacaatgcattcagataaaatgaatcgatctgtacatgtagatgtacattccaatgcttgtttcaagaaagagattcagatattataaagtcttaactgaaaacattcactatatgacttggaacaaaaatttctagtgttagctgttggcacaaataattcattaaatgccagttttacccattttcatgttgcttcagcatctaagataattttttcactgctcattaatgtgtcttaaagacctaatggatttaaagaaagcaaatatatttatcaatggtatagaagattgaggaaaatacttccatccaaattttcagtctagaaaggtaaatgaggaggcatgtggacagggtgcaccctcttgtactgtggcaaactgacctaaataacacaaaggaaatcattcatttgtaccttctttattcccaagtaataaacatcccaaatatctattgggcatatatgatgtgccaggctccatgctaagctctttacctagagtatcaggtttaatcctccaggcagccctttgaggtgggtaagattactttcagcgttttacagatgaagagattgaagttcagggaggttctgtaacacttggtaagtggtaagtggtggagctggagtccagaagtctgctgagctctactcactgaggtatgctcctctcctctctttgtcatattttccctccttgtaaacagagctggacaacctagaaagaaatgtgaaggtctacttcaaacaaaaccaagcagttagtttctctggatatcaccccaagccccttaactatatagaccttaagatgtcttcaaagcagcactgttgaacagaaatattctgtaagccacatatgtaatttaaaattttctagtagtcaccttaaaaaaggaaagtgcaacaggtgaaattaattttaataatatatttcatgtaagccatatataaaaatattataatttcatgtaatcatataaaattattgagatactagaaataactcaggagaaatacagtacaggacatcttttgtaatgcagcagatagagtgaaatgtagttctaccaaacaacaaagttgtgattaatggaaaaaaaattatttactgcttaagttttacattttaaattcatatttattaaaataaaaaatgtggttcgccattcgcactggcttcatttcaagtgctcattagctattggtggcaagtggctgtcatattgaacagcgcagctctatagcaaaaggtattctttgtctcctaaggaccggggactcctagacactctatccccatccctgactcctgactcctctcagcatccatcttattttccctgcctatgcccagaactgctatatataatgtgcaggttatacactacaaaattctgagatgtcatttatattgtagacccagtggatttgcttatttactgcaacaggttttaggaagatagaagtaaagtttttaaaagaagagacactttttcctaatttatgcaaaaagacttttttttttttttttttttttttgagacaaggtctcactctgttgcccaggctggagtgcagtggcacaatatcagctcactgcagcctctcgaccttccagggtcaagcgatcctccctcctcagcctctctagtggctgggactacaggcaggcaccatcactcctggctaattttttttttttttaaattttttgtagagacagggttttgtcatgttgcccaaactggtctcgaactcctaggctcaagcgatccaactgcctcagcctcccaaagtgctgggataacagatgtgagccaccgtgcccggccacagaggcattatttttagcagggtgggcggtggattgtagcccttctgtctcttcctcgcattctggtagttggtcccatggcattgttctgttgtatgctcagcactactccagtgccctgcctgtggctgaaagtgtagaagcagcctcagtcaacctctcctcccccagaaatactgtcacagagccatagtcattcttcatggtagtttaccttggagtcatatgtgtgttattcataattgtatttccagtgcttagtgcacaataggtgctcagcatgtttattgatttgaattgttatcttagctttgactctgtatttgggcctctgcattgtgtcctcagttgtccttaatgatacatgacccagggctgatttatccaaatgctgaccttgccctctctttcatggagtcacagatcacccttcatatggtacctttgttctgataatactaattgtcattattgttattttgataataatagctgccattgattgatcacttactttgtgtcaagcattgtgcttagcaatttatgtaaattatttcatttaatcctcccacaatatctataggaggtaggtactattttacaatgaggaacctgagttactgagaagttacattacttacctgaggtcatacagctagtaaatgtcaaagctgacctttaaaaccagttctgtctgacttcaaagctctctcaagtgcccttttggttatctggggccttcctgacaagtgactgtgctgtagtggactgattatttgtctgcccagactttcttcctttgggcagctactctgtccaattcatgtggtttgggtggagttgacactacccagggatgatcatgtgattcagccttggccaatccgagcagtccctccacttgaccaagggattggctcaggggttagcatgtgatccagtctggctcaatgggactcttctgctggcatttaggaaagggggagctcttcctctgggatttaacctggagcgatgtaacctggagctactggtggtcatttttccctgctccatggaggaagccgcaatacaagagaatgggaccgtgcagtgagaagcagcactgcacggtggtgagagcacactcagcattgtttgaagtgcaggagtcagctgtgccaggacttctcgattatgtgagccaatgtgttccttttgttgttgtttgcttaaatctaattatgtgcatttgaaagaaccctgcttataccgggttttcagaagatgagtatttttgtcttggattccctatgctattgtctgtctgcccttggtcatccactacttttttggccttcgtgcctacttggtgccttgcaggcctctcatccctgtagactctgcaccatgttcagcttgctgtgtcccttttaggtcagtaagccctgccctagtgaaaggaggtgccacacccaacacctcctcaccaacagcccccgcccctccatcctgccctatggcatagcccacaaatggatctgggtgggaaaaggattttgccatgagtggaacattagagaaatctgttcttcatagacatcggaaaaattactcgtcaacctactctttggatgctgatcaaagactattgaatgctaacctcatttggtctctgacaccatctgggatctcagccagtgtaggcggaggccttgcctcttatccccagtttttttggccaccagcctttctaatcaactgtctttctatgtactctcaagcctcctatgattttgaacttccattcttctgctggctgccttcccaaatctttccagtggccctttgagagcattgttccactgtgaatcaactctcccacaccacagcctcctcacagagtaacagcattgccttccctgtagctctctctgctgtagcctactcctagcttccctttgccacttctagggcatcacttttctgccttcctgcaaaacccctttgtcctttagggttcaagccattcatgcaggtaccctcctggtctctccttttgccaccaacctctttgtcattctccctgattgactcacctggttcatggtcatctctcccagctctgctatctctgcattcatagatacaaccaactttttatgtttgcgttagttgtgcagttgtcttggggttaatgggagtcgttaattatggcaggagtggaaaataagggagacttcataaaagagattacgtatgatcaggaccttgaaaaatgaataggatttcaataggtggataaagagggaggagccttccagagagaacaactcgagcagatacatggggatatgaaaagacctggtacatttgcttgcttgagtcctggaaaacaagtggtaggaaaggaaaagggaactcagattaaattggacatgattaggccaggctcggtggctcacgcctataataccagcgctttgggggggcctaggcaggtggatcacctgaggtcaggagttcaagatcagcctggtcaacatggtgaaatcctgtctctactaaaactacaaaagttagctgggcatggtggtgcatgcctgtggtcccagctactcgggatgctggggcaggagaattgtttgaacctgggaggtggaggaggttgcagtaagctgagattgtgtcactgcactccagcctgggcaacagagcgagactctgtctcaaaaaaaaaaaaaaaaaagaattggacatgattacatttatttaggattgaggaatgaccctaaggagtatgcaggtggaagaatgcaagagaaagaacaaaaagaagaggggcaggatgatcttgtaaatgacaggatgaaaactttattggagtgattgtaaaaggtgagaaggagtaattaaaacagttaaagaaagctcataataagactacgggctttagagagaagagataatagaagaagaggtggaaggattttcaggacagagtagttatgtggaagcagggagaagggcagaggaatgagacaggacagctgctgctaggatgccaggagacgacagctacatactaggtatgaatcaagttacttagccgttttactgccttatgaataaaaagtaagataacttacgtatttcatgatagtaaaaatgacttacattatgtaagcctcagatgtttcccaatctgtgttttatagactacaactctgggagatgttaacgaggttcaggggaaatagagtaagttctatgatcaaatgaggttgggaagcgctgcattctatatgattcacctattaaagcccctgagaaatgcatacaaggaaccaatttgatgttgtttaacccagcttttcccaaatatacttgtccattcattcatttgttcattcattcaacaagcatgcagtaaatgtgtgctatggtagtatgttttgagtactctgctggccactggtcctagagtagaataaagtcacccagtgttcctacatttatgagattatggtctaatataagcacatgttatcatcccacagctcctagtgttctgaggaacatgatttgggaagccttcagttaaggtatttaatattgctttttgtgctctggaatggaatgacatggagtgattgtctgcctatatctctgcctttatgtctctatcttacatcagtacctctgcctcttcacagaatgtttcttagacctgctgccttgggcagggatagagctgatgacaaggaaactttcaggtctgggaagttggtgactcacccaagatcacccagctagttagttgcagaaccagggacagaacccagctcttctggctctaggttctggttctgtgctcatttctttcttggtaagaagggacaacttgaaatgcttgaaaattaaaaaaaaaattaagcagactcaacagactcagtgagatactatggcctttgccaatttaatcaacaatagcaggattgacttaaggatcagcagcaccaccaccactaccactatcatcatcatcactaatgctgagtaattactataatccatgtgccatactaagcactttatgtatatttgcttatttaattcttacaactctgtgaagtcataattattaccctattttataaatcaggaagcaagctcagagaggtaattgtcggtgtttatacaactaataaggagcagagcaaagcttccattttaggctgttttcagagtccaggctgtgaactgcgttctgttatctagtgaaatgttttttctgctttagtattttcctctcagaatcagttggtcttttctctcttccattttagcttgccttgcttcttcgtctttgtaaaaaccagatcttaggatctgatttgtttattctatgtcaggtagcattcatccaatatttgcttctactatttcttctctgtaaaacccatagtcttattatgagctttctgaaaccattttaattactcctcctccccttttgcagtcaccccaataaagttttgatcttgtcatttacaatatcatcccacccctcttctttttataataaaggctgttatttctcttacattcttccacttgcatactccttagagtcctccctcaatcctaagtaaatacaatcatgtccaattcaatctgagtatttaatgaataatatgtgaaggaactgctttaggagctgaggacccagtggtgaatgcacagaacaggttcctttcctgtgaaacttacaaccagtggggagagtgcacaagaaaaacaacacataatcaagaaaagtgtcacacagagataagtaccatggaaagaattaaaacaggataacatagtgagaataactggctgtctactttagactgggtagtcaaaggaaggtctttttttgtggaagtgaatttaaactaaaatttgagttataagaagaaaactgcaagagagaaatgggtggggaggagggagaaagaaaatggagcactcttccaggtagagagaacattatgtgccaagaccccagccatgagtttgcagtgtttgaagaataggaagaaggctggtgtggttgaatcatagtgggccattggggagtggtactagatgcggttagagaagtaggtcatatactaggttaaggagtatgggttttagtttaagtgcattgggtaggcgttggaggattttagcagggctgatgacatagactgatttatgttttttaatgaatgtatttactgatgcatggaaaaatgattataaggagataagaaggaagtactgagacccattaggaggatattccagtagtcctgatgcgggataatgatggctctattagttattgccacagtaatcctgtgtaacaaacagtcccataaattcagcagcatacaacaattaggatttatttttgctcatgagtataggatgtctgggtaattctgctgatcttggctgggcttggttgatcttaactgggcttgcccatgtgtctgtggtccactgtgggttaggtaggcagctctgcaatattgcctgggttctctgatatgtttgaggggccagctggctgtcaactagtatagggatggtctcagctgagatgtctggatcaactctgctctcctccatatgtacattacatccctctagtaggctagtttgggcttaccctcaggctggacagttggattctcacggtgatcgcaaagaagcaagagaggaagtagaaacaaacgcacacgttttaaggactcagcttgtgtcaagtttgctactgtcccattggtcaaagtaagttacataggtatatccatagtcagtgtgggagggcattgccaaagaacaggaattcagacaggtgtgaaaagatacaaggagatatgaaaaattggggccattattccaatcaatctattgcactcatgggagagtagtgaagaatgagaatcttgaataggttcaggaaatatttaggggtacagtccaaagaacatgctgatgaattagatttgagtatgagagaaaagaatgaatcagagctaatgcctagatacttggctgagcagctggggagatgatgaggccatttacttggatactggatgaagagcaaaatttaggggactatctagagctctgtgttaagtggtgttgtgtttgagatacctgctagatatttaaataaagatgttagggttgcagttggatacagcaatctgaggttctggagaatgtcaaagctaaagatgtagattttggagttatcagcctatagatggctcagctggaattccaggatgcatgccttggctgggatctactgaaatccatcagccagtcaccctgaagtcttctagtctatgcgtaactgataagactcacatcgtgctttgaatgtgcttttctatttcactagtttaaaatattagtgtctacttgtataatttgtgctgtgaactgaaaactacagttttcccactctgccatgtacagccttctgatttggcagaaataatactgaaaggacacctgccagggtcttagtaattcttagttatagtaatctgagacatttcagctcagggttagcagaaagatcatgaagtcaagaagcagggcttaaatcagatgaagttggaatctccaaaggtaattacttcctttgtgaagccataggtctttgggactgtttcctgttaccttgggccattcagccaagtacaccataaaatacttggcctatcaggaaggcacatactagcatttaaaaaattttacaaacgtgctgtttaaattatattacacaatattaccatgaacataagatttacatttctgtcacatactggagagtgtatcttaaactgaatttcactcaagttttgccaaaagtggtcttgagataatatttaacagatacagaccaaggatcatattcctgatttacctatttctgtactttattcctatttcttgaattaaccagatagcaacctatttagctcagcccaggtaggaatgcctttactaaggctttatttactaagccattatgaaatgttaatataagaagtagcctgttgaggagcacttttgtgatttctgcccaaactgctgttgaagacattttgtaatatctttcattatcttttatgatcccataaactggtttctctttggagtttagtgacagggaaaatttttcttttgataagctggtgtgtaatttatcataaacattattattctatgaagcattcaaaaaattctttaatctctgatattttgagaagctccaaacttgacacacgattacacaaaatgtttcagatttctggttttcagtgtgtagtagaattgaagcatatatgaattaggggaattcaactctgtgggccagccaaaaaaaaaaaaaaagaaagaggagacaaagagagagaaacaacaatgtaaagagtgcagatgaacctattcatctttccacctgatgagtatacaccccagaaggggtgtgtactggaggcgtgtgaacctagtgctctctttgtctgcctgagtctgcagaggatatccatgagcatctcacagtgctcaatgtgatttgtggttaaagatacataccttgttatacaaactgacccctaggcccatgccagatactttaggcccaaaccagaaaacctaaaattgattattctgtgggctggattgtttgcaaaaaggcctgcatcattcccctcccagtgtctgctcaccttgagtagtcacctcccgtactgacgctgggcttgtgacttgcttttgccagtgaaacaagagcaaataaatgtaaagcattcagagacatgcaatgtgctgtgtactgggtgcgtgctctctcttactgcacttaggaccctgaggactgtaggagcaagcccaagttgtcctgttcaagaagccacgtgtgccctggctgatagcttataattgccagaagcgtgaatgaggccaccctagatatccaggccaggaaagcccaactgacctgcagaatcatgagaaacaatatgtttttattatttgtacaccactaattatggagtgggttttgtttttgttctaatcaaaagctaactgatagaacttccagtgcttctggacatttctgctgatactgtgttggacatatccagagagagtgtatcagtctgcagtgtgacctgtgtctcctgtggaagactcaaggctaattgactgtgttcagtttttaccctatgtgctgactgagaaccaacccctgcataagtctgagttccactctgttttccactttctgccttttggtttctgactcctccttttagttttaattcttgtctgtatatttacatgttgtacatgtattgtttcttaaattacttttattgagaataaattcaattaacataaaatttgccatttaaatcgttttacagagtagtctagtgatttttactatatttatgatgctatgcgtcatcgccactatctaattccagaagattaccattatctcagaaagaaaccccacacctccatatcagtaacccactttcagcctgtgtggatttacctactctagacatttaatgtaaaagtaatcagtacaacttgttgccgtttctatctggcttcttttatccaacataatgttttcaaggttcattcaagttgtaccatgtatcagtatttcattcctttttagggtagaataatatcatatttcattgtatgaatatataaattttgtttattcattcatcagttggcagacattgggttgttttcactttttggctgttgtgagtagtactgccatgagcattcacatacaagtttttgtgtgaatgtgtttttaattctgttgggtatatacctaggagtggaaatgctgagtcatacgaaaattctatgtttaacttttgaggaactgccaaactatttttcacagtgcctgtaccattttacatttccagcagcaatgtgtgagggttctgatttctccacattcttgctaatacttgttcagtttctattttttggattatattcctcctagtgtgtatgaagtggtatctcgtcgtttcaatttgcatttccatagtgactaatggtgttgaaatttttttatatgtttgctgaccattcatatatgtttttggagaaatgtctattcaaatccttcacccattttaacactgggttgtctttttcttgtttaacggtaagtgttctttatatattctggatactagaccattatcagatatatcatttgcaaatatgtttttcattctgtgggaacttcttgtaaccttcttcaataatgtcacgcaaaaatttttaagttgatgaagtcctacttacctatttttcttttcttgcttatgcttttgatgtcatatttaagaaaccattgcttaatctaaggtcatgaaaatttgtacctatgttttcttctaagagttctacaattttagttctttaattaaatctttgatccattttgagttaatttttgtatatggtgtgaggtagaggtccaaatttatttgtatccagttatccctataccattgttgaaaatatttttctttccgcattggatggtcttgacatcttggtcaaaaataattgaccacagttgtgtgattttatttctggacccttaattctgtattgttgatctatatatctatccttatggagtactacacagttttgattgctatgccattagagtaaattttaaaattgggagtgtgagtcctccaattttgttcttttttttttttcaagatagttttgtctattaattttactatatgggttttagaatcaccttgtccagttctgcagaaaaggttgttgggattttaatagagaattcattgaatctgtagatccatttgggaagcattgccattttaacaatatcatgtctttcatccacgaatgtgggatgtctttccatttatttaggtctttttaaatttatttctacaatgttttgtagtttgccgtgcaaaaatctcattcttccttggttaaattttgttcctgcatttttttttattgaaacatgtctcaatttctctctgtaggtagacaagataaaaatgataaatccgtaaaaataatttttcttgttttgagatggagtatcactcttgttacgcaggctggagtgcagtggcgtgatctcggctcactgcactctctacctcccgtgttcaagtgattcttgtgccacagcctcccgagtagctgggattacaggtgtgtgccaccatgccgggataattttgtatttttaatagagatgggtttcaccatgctggtcaggccggtctcaaactcctgacctcaagtgatctaccctcctctgcctcccaaagtgctgggattacaggcatgagccacggtgcttggcccaaagtaaatgtttttaatgtagctcttcagctattttaatgtagccagacttttttcctagaagtcggggaatgaggatactagatttctagtctcaaaggtgttattattatgtttataattttggctatatcatcttagcttttatttattcatttataaaattgtacctgtcaaagtgccatctactctgtccattttaatgttttagcgattaatagtaatagtaatgctatgaagattaagttaaaacagtaatactgatagcaagcacttaaatggcatctatgtgccaggtaactattctaagtgttttctgtgtataaacttacttaatgaaattaaatactgggtggggtgaagctttaaaggactgtgtgatttttttgtgtatgtgtgtttgtgtgtgtatgtgtatgtgtgtatacacgtgtacgtgaagtctttttggatgacatttggaaaactcataattttaatctagagttctcaaacaatagttatagtcaatgtttaattttttttttttttttcctggagaaggactctcgttgtgttgccaggctgcagtgccgtggcgcgatctcggctcactgcaacctccgactccctggttaaagcgattctcctgcctcagcctcctgagtagctgggattacagacacgcaccaccacacccagcaaatttttgtatttttagtagagatggggtttcaccatgttggccaggatggtctgaacatcctcacctcgtgatactcccgcctcggcctccggaagtgctggggttacaggcgtgagccactgtgctcggcctaatttttaaagattaagatattaataactgtattaatgaacaaagggagggaggtgatatctctcaactctgcctgtttgggctttaattatttcacctctcaattgagaagtttgaatccaatgatctctaatcttagagtgcctagctctcatagtcagctgtctaatggcttagatatgatatctctctgtcctgtgtgtggtatttgagaagaaggatgttgcaggggaaggctctttgaggaattagatcaaaactccacagaagtgtgagcttggggaaggcagagcttgtgttttccatgtggaatgttatatccctgtcacagtacctgatatacagtagagtttaaataaaatgttttgttgaaaaatgagtgaagaaataaacataagactggaaagaagtcattttgggtttgatatgatttggctgtgttgccacccaaatttcatcttgaattcccacgtgttgtgggagggacccagtgggaagtaattgaatcatggggcaggtctttccgatgctgttcttgtgatagtgaataagtctacaagatctgatgattataaaaggggagtttccctgcacaagtgctcctctctttgcctgccgccatccacgttaagatgtgacttgctcctccttgccttccaccatgattgtgaggcttccccagccacgtggaactgtaagtccaattaaacctctttcctttgtaaattgcccagtctcgagtatgtctttatcagcagtgtgaaaatggagtaatacagggttttagtttcttttaaatagtagaaacgtgtatatgtggattgagtgtggggagaggaaggagtattaaaatggatatatttaaattaatataagctgtttcttactttttgtatttcttcatactcatcttgtatttcacaacactgagcccttggcctgggatgtgcctttgccttgccatctaccaacttactcagctttttagcccagcccaggcatcacctttgctggttatctctctacctctttttttttttttttaattatactttaagttctagggtacatgtgcacaacatgcaggtttgttacataggtatacatgtgtcatgttggtttgctgcacccatcaacttgtcatttacattaggtgtttctcctaattctattcccccaccagatccccaacccccaacaggccccagtgtgcgttgttccccgccctgtgtccaactgttctcattgttcaattcccacctaagagtgatctctccacctcttatctccaggcagagttgaagcttgtaaccatctgtggtctagcactgatcacatggtaatgaaattgttagcttctgttgtgtctgtcccttttactagggtatgagtatcttaatggccatgttttatgttttattttgataacatatctggcatttagcaggtgttcagttagcagttgttgagtgtgtaaatgtgaaccaatacagaataaagatgaggcaatgaccaactgaccaattgctttcctgagtgtttgctgcgtgtaaggaattttatgtgcatttctcttacttctcatgacaatcctttagagttggtatcatcatcatcctcattttacagataagaaagcagtctctaaggaattaagtaacttgtgtaaagttatgcagcaaataaatggcaaagctaagatttacagccaggttaagcagacttacctgtttaagttccttccactaaaatcagggtttttggccagaatttccagtaaaaataatgagtgaaataagatactggacatcaggtgacatcaggaaaaaaaagatcttcgggatgatgtttaaagaaccattgcttatgtcttctccagcagtctcaggaaatagattaaaaattgggtcttttaatatatcaaaaggtacaggcctgccctctcagtggttgaattttctgtttaacacagtagtaaaatgaggaacaagtgggtttctagatcaagctacgtagaataattacatttgggggctaaagacaacattagagctcatcagcctcagccccattaatcttacagatatcacaagacccacagagtttgtaagtttggtcctcagttgctttgtcagttaagggcagagagtgttcctttacatcatgaggctcactttatatattaatagaaaatttagaataatggtagataaaaacttgtcatattaaagagacaagagcatgagagcttggttgaaataccatcacttcacacattggagatagtatctctgagcttctggtccccctcagaaaaaaagaacttcctgcataggacagaattcatcatcaggggcatctctgagaaaaaaggatcctgtaagttgtttgttaacttatgattccaagactttgctaatttaagatgcaaatgaatatacaatggtccctccttatctgtgtggcttttgaaataagagttttctttcagatttgcccactgatagtaggaggaactacacatggtgaaagatctgaagtagacgcttctgttacctttgagatttggcttctgaagtaaataccagcaagctagataaagtgaaatcattgtcatccgataaatacttaccgaatacccaatatatttcaggcagtgttctgggtgctagatcaggccaaatattatattttattttgtgtggcttgtgtaagacagaatactcagagggaaaagaagacttggaaatatgcttttgagaaattgatatgtaatggaattgagatttatgtatacgtgtaacatgtacacaaacattaatttattttgttgtgggtccatattgcttatataagtaaatttgattttcagaatttcacacagcactggaagaaattggacattgacttattttaccaatgtagcaagacactgcacattaccacttttaaagtccttaatagattgtaatgtcatgcgttgtttttaaggtactcttttcccattcttctctagaacaaagatcatttcttgttcatctttgttaaccaccttagtgcctcatgcatggttcctaatacatcatgactgtgcaataaatgtcagaataaataatcatgaatgtctcaaattatttctgtggacaaattagctcatgaactgaaaatggtaaaaagatggttgagtgaagaagaggaaacatttgagggaaggaagaaaattgacgaggataagagatgaatgaaacaagaatgaggtggtcaagaatgctatcatatattatatgtcctggtaaacttctgctgtgttagaaaccatccaagacttaaagggatacaaccattttatcaccctcatgaattctggaggttaagaattagtgcacagtggggatgtcaaggctcttatcttggaaaactttaatggctgggggtgacttgaaccacaaagggctggaatcatttgaaggtctctcactcatgtgtctggcttctaggctgagatgatttgaaggctgggctcagcagtaattctgcaatagaactgtatgtgatttctctccttgcagtgagcttttctcagtatggtagctgggttccaagagggagaatattcaaagagctagacgtccaaaaaaatcaagcagggctacttgggcttttatgtcctagtctcaagacatttctactatactgtattagtcaaaggagtcataagcctactccaattcaaggggaggtgacatagacccatgagaagagtgtcagtgaatttacaggtatttaaaaaaaaaaacagaaacagcagcactacatattataagtggaccagataatgacaatgatgaatagagcaaagaacaggaaagttcattatcaatttacttcctcagagatgggacatatgacaatgtcattagacactttccaaacagtagttagattatgacatacatccatgatactttttgagtatagttgataatttttatttgttacaaatcatctatgagaatgttttctatcaaattagtgtttttaacagttttttttttcctgttagggatcaggtatgtaatggctggcatttcagtttttgaaattcttcattaactgagctccataagctttagaaataagggcagatacttgtctggtcaaatgtgcctttatgatctagtgtgttctgcagttccagttatgatgccgacctttggtaatctttctaatgattcttttataaaaagtctgccatttgaatatactcactttgcctgactgcccactgtgctttgggactttgttggtctgtagagaatctttttatcatgatgtagacttgaaaaagaacttcagctttcatgaacttgaacagggaaatggaaaggacatagagggaagagaggagttataatgagttcaactgttgcattagactgtggttttatttttgggagctagaaatcacatattcctttatgtctgagaagaggtagcgcagattacattagcacaaggctctgctggctcacaggaatcaccgggaccattggaaggtatttgtgatgaggtaggtagggcagtaataatggtccttggggaaggtgagcccatccacctttttcttgtgttgtttgtctgttttggtgcttttttccccctccctcctttctcttcctgcttttacccttttctcttttttcttatcaactctgaagtgtttgatgactgggacatggaaaactatgttattcctgtaaatatgttttaaacactttttattgtggaaaatttcaaacataagtaaaaataggatgatataaggaacccctagtatttatcactaaacttcaatagttatcaactcatgaacaattttattttgtctatactcttccatacccttcagattaggaagcaaatcacagacattattttatctgtgaatttttcagtatatatctttaaaagataagaactctgaaaaatataatcaccataccatcacacacacacacacacacacacactcacagagcaaatcataaacaactgaacactatcttaatatcatcaaatcctcatatcatcaaacaaatattaccgatgaaccttaatatcaacaatattgagttagtattcaagttgccataattgtctcatacatttcagttgagaggtctcttaagactaaatatatgtcagaccctcctgaatctctctcttttatttttgttcttaaatttttttttgttaaggaaagtttctcatttgtaaaaaaaaattgaatgtactaatgacttggactcttcattcctattttaaaaacattgagaaaagaatatatagacacggatgaatgtttcatattaaaaataacagaatactgtggccaaggaacaaacattggcatttgattatcttatatataatttccaaacattctttactctgatgctttctcctagtaaaaggccctgaaaatcactgtacccactgagaaatttgttttatcttattttcacttgtattgtttccctctgcagtagcaagaaatagacaaatattcgttttatacaagaaattcccttatcagaggagaattggtgtcagaatttgccacttaaagtgaatccagttacatttcacagtaaacagtaaaagagaaaaaacctggaatgattcagactttatcctgaaaactaaagtgaaaatatgtttacctcatatttagaaccatttagattataactaattcataggaaaaagagtgaatctagtattttcttgatatcattttctgacaaaattttaatcaaaattttgacttcttttacgtgtgagtttgtcagcacaatttgaaagagagctttttttttcaaaagcattagaaagttttaccagtttttgcaagggttttcctgttccatagaataaatgttaaccgactataacaaagataccatgatatataatttctaaaataagatagaaatatacttgtctctcacaaagtaagtgaactagtctagcctctgctccattaagtcattccaggatcaggctccatcttgtttcttccccaccttcagagtaatgctgggatgcataagggaagttgagtctgccagtcggaggctggaaaatgccctaaatccagggaagtagcttgtctttaagttgaaaatggcctggaaggagtacatataacttctaccacacatctttttggtcttaacttagtcagatggccacactttactgcaaagaaggctgggaaatataaatatataaatacatataaatatataaatttatatacatatatataaatttacataaatttatatatgtaatgcatatatctgcatatggacaataagaaacaactattcctagggcagcactctcagtctgtttctaggttcacatgtcccctaatccagtgctataatcacctaccctatggtagtggactggggtaggggatatagtatcaggagagatgagaaatcagccggcctttcaacttttgccttttgtcctaagaggacttctcttatcctctctttagatgctattgatagtgaaagataagggttttatgcagatctcttggtgctgttcaaggtgtctaccttcaacaggttagcagatgaatactcaaaacgttatagcctgctgcatatcaactggctgaaaggagaaatatataagactttaagaaaatacaggttatcacatggtgcttttgtttaatagctcaggaagacagaggtgtacagtgttacttccttctgagcacgaaaacattgcctaatcctggaatagctccaattcatgacgttaaatggggagcctagaatgtactctattttgattgaactcatcctagtatttttttcctttgttgtatttctgctatttaatccccttttacaaaagaaatttggggctttaagctgagagtatatattgcagaagaatatgtggtaagatttattcttatataatagctacgcattttggtacttttgaattgaaatataacctgatactgttgacaggcaccacagcatttgatttctcagattaaggtcggtttgatgtttatttgcacaaatttcctaaaattgcaaacaaatagtaactttgtcacaaacttgtgatgagattgcaaatggtaactttgtcataaacctgtgatgagatgtgaaataaggtcacctgttctgatgtagaagtttgtgaactgagggctttaactaagttttaataatatgaggacatcaccaagtattaaattgaattatataatattgctaattctgtaggtaaaatactgctggatattggcaaaatgtggcacatagtaaatgacttaacctaataagatgagaatttcaacaacctctaatcactctttgcttgctcttataaatagtccatcctttccccactctgttatcagggccctttttttcttatttactatagtccattccataatatcatttggtaactcacagtcacttttgttttcttttgtctctgattttctttcccatttagcacctctgttctcttgacttaaaatagtatgaaaagtcatattgactaggataggctgttctagtcaccagctatttttttaaaaattattattttctctctctctttttttttttttttgagacagagtcttactccaacacccaggctgaagtgcagtcgcacgatcttggctcactgcaacctctgcctcccgggttcaagctatttgcatgccttagcctcccaagtagctgggactataggtgcatgccaacacgactgtattttcagtagagatagggttttgccatgttggccaggctggtctcgaactcctggcctaaagtgatctgcccacctcagcctcccaagtggtgggattacaggcgtaagtcaccgcacctggcctattttcttattttaattttattttttaattgacaaataataattgtacatatttgtggggcatatagtgatgttttgatatgtacaatgcatagtgatcagatcagggccattggcatatccataaaaaattatttgtttttaggcagaatttttcatgatgaaaaaggttttaagaactgttggctaaaattgctggactgtgaaactgagtattagtcagatattcagatttgcaacgctggatagacagtataactttggtggtttgtgtttctcaccggtgatacagtgacagtttctgttgtctacctcagaatattagtgttcaaagacaatgtgttaaaatgttcagaattttagcagttagccgccaaggcaaagggaatagtactcttgtgttcaactccaatgagatagaaaaggggtttatgttgcagtcgagttttatttaaaaaagatgtttgtggcccggcgcggtggctcacgcctgtaatcccagcactttgggaggccgcgacgggtggatcacgaggtcaggagatcgagaccatcctggctaacacggtgaaaccctgtctctactaaaaatacaaaaaaattaaccgggcgtagtggcgggcgcctgtagtcccagctactcgggaggctgaggcaggagaatggcgtgaacccgggaggtggagcttgccatgagccgagattgcgccactgcactccagtctgggcgacagagcgagactccgtctcaaaaaaaaacaaaaaaaaaagctgtttgtaatccttagtaacggctaggagagaaagctggaatcctgaagttttgtttcatcttcattttaaaatttagaacatcaaacctattattttctttctcagaggggacatctcccttcaattttcgtattaagagtttgttgtggctcttaatgatgccctgaaagtcataggctatctctgttgaaatctggagattgaatccaattgcacttagcagtctcctaaactaggagactggaagtgacacctcattaaactttttccttccattccaccttcctttccactagagaagttgtatagtgtagtgaagagtgtaggccctgcaattgtattgcctaaattaaagcctggctcttattcttaccttgtgatgtgtaaagtgtagacagtactagtacatacttcagaaggttgttgagagaatgaagtgattcaatacattgaaagtgcttagtgattgggacagtgccaagtagtaaaagcttaataatgataatgataatgattttttattatttttctgtgtgaatagtaattccatagggatactcctggattcccctatggtctgcttattcctccggatttcactgatcttatcaaaaggttattagattgacctctcaggacaatgatgtttacttttaggaaaatctaccctcagcctcctcccccattttggtccagatttcacagcatttagcaggtatttcatagtttgtagtttgggattgaaggctgtctttttatttctttgaagatgggattctcttcctctggtttttatgttttattatttagggtagaagagtagaacatatacctttccactgctattctccaatgatattctgattttcagagggaatcattttcattttttcaaactttttcatctcattgtatcttattaaacaaaaattatgggaggccattgttttggactgagctcctgtactaggccccaacaaaccagaccaaacagaaatggagtcacccatgctaaatgctgcataatcaaactgaagctttaagggagcaggtagatccccaaatagaccattttcccccctgaaaacagaagattacagtctacgtgaatcagtttaataaggaagtcccctctgttttaatctttaccaaaaaaagtaacctgaagtaacttgatgttactaatcagctttttttttttcctattattctgtttccttgttcccaccttataaaatccatggttctgccctggcccagtgggagctctcattctattttacagagtagaggctaccctgactcatgaattgtgagtaaaagtcacttttactaaatttgttgtcattttgtctcttgacagtctctaaacatgctttacattgctacttcttgctttttcaattgtagatattatttattggtttcctcctccttctcctctgctaccttttcctccttctcctcctactaccatggaggaaatagctctctttcataaagtactcccccacccacacgggagcatacttcctgctctcacacccaatgtatttatattggtagtaagattatcactattgtttacctgattatgacggtgtagttgttatttgtagcagaactctgtagcatacctgtgattatttttccttttctaaacaattttttgttttcctttggaattattttgttttttaaaattggctaaattttactaacttattataaatcttctccccatacattcagttttgtctcctagaagaattctttggaagaacctccttacttgatccaatccggactggttgtactcttggccagctgctcagtgtcattcattttgggatttcccttcatcatctattgggggagggggtccctttacctctttcttatgttggaatgtttgtttcctaaattcttgtggtttttgcttttttggtttcctgctttgttttggtattttggctacatccccaagtagctttttgagaaaggtggataagagaaaattgttaaagccttgcgcatatttgaaaaacgtctttattctcctgtcacttcattggcactttggctgagtatagaatttttgattagaaatcactttctttctgagtttttcttcattgtcttctactctctggcattacccttgatgattaccattctgaattttgatgctttcaatgaaacttacatttaagcttgcttaatatttggcttatccccatagttgtgaaattttacaagagttgccttaatttggtagtatttcaatctgaaaataaccttcagtttgaagaaattttcctaaaaattttctttgattgttttctcattctgttttctttgctttctctttctggaacttctggtttttagatgctgaactttctgagtgagttctgtaattccattatgttttctgcgtcttaattttttttttttttgggagagtttctcaattttatgttctaacttttccattgagtttttaagttctgtcattttatttttgatttctagtagctcctgtttttttggctctatttcttattttggctgtgtcttgaccttgtttcatgcatgtatttcccttaattctttgattttgttgagtttttttttaacattttctttttttctgtacaacttttgtttcttccaacttgccctttttttgcatttgttctttgaccttagattcatattataatttttcctcaattgtctggggtgatccttggctttctctcatttatcagagtgggactttaaaaagtcagttgagctgggcgtggtcatgtgcacctgtagtttcagctacttggggaggctgaggcaggaagttcacttatgcccaggaatttgagtccggcctgggcaacatagccagaccttgtctttaaaaaaaaaaaaaaaaaaaagtgtcaattggaagcttcatgcatggtagtgggccttgctgactgtgggcttaactatagggtagtctggctgtgccatttttttggggacacttctatgtctgtgtcttcaagacttttcccttagtccagtcctgatgtcctggagccagatgggagaagagagctgactagcctcatcattgatatggacacttgtacagtttcacttaagctcctccttttcagtgtggtattcccagctgcagctgcacttagtctctcccaggatagagaccctgtgttttatagtcttccgaaataaacctctagttttcttccagggttgaggagggttagtcacctagatctatggcatggaagtggagaggatcggggactctctttattaaactgatttgccaacaattcttctgctttaattccttctccatcacaacttctagagataccatattcttctgattcttgagctatttggatgttttgcagaagaaattgggttgtttccagccttccccttggtgggacctggcacatatttatttgttttccagtttccaaaattctattgttgtttccttttttgttttctatttccttgagagtcagttccttaacaacaacaatgtaactgtttttaatggaatttcaggaaggagccaatgcgaagtgtgcattcaacactctatctttggctggaagtctacatgaggagacttttccttcatttgtatctctctgaactttagtagatttcttggccaggacttcccattggccaatgaattataacaacagtggtgaactttaattgtatgggatagaaggatagggaaagcccgtaagtaggaactaggagacttttttctagtcttggcttgtgtgaccttgagtaagccatttaactgttctgaacttcagtttcttgagggagatagatggtgactaagattcctttcaacttaaatggtgtgattctgtataagagtagtaatcacacatatgtcagataaggtgtttttttttgttttgttttttttgtttttttgagacagagtctcgccctgtcactcagactgtagcacaatggcgtgatctttgctcactgcagcttctgcctccccggttcaaacgattctcctgcctcagcctcccaagtagctgggactacaggcacccgccacctcacccagctagtttttgtatttttaatagagatggagtttcaccatttccaccaggctggtcttgaacccctgacctcaagtgatcctcctgccttggtctcccaaagtgctaggattacaggcatgagccaccgcacatggacagataaggtgattttttttccccaggacattcaacatgaatgttttttctgcccctgatgttgagaccttttgcttctagaactgcatataagtcctgccccatttatcctttgggccttccaaaagtctgccttccatttgtttacaatggtattgctcactgtgttgggaactacatgtctacacatggcccgtttatgagagcatcgcttgctcttccctggtatccattctttgttgtttttttttcagacggagtcttgctctgtcgcccaggctggagtgcagtggtgcgatcttggctcactgcaagctctgcctcctgggttcatgccattctcctgcctcagcttcccgagtagctgggactacaggcccccgccaccacgcctggctaattttttgtattttttagtagagacggggtttcaccgtgttagccaggacgatcttgatctcctgacctcgtgatccgcctgcgtcggcctcccaaagtgctgggattacaggcgtgagccaccgtgcccggcctctgttcttataagtagtcattttcacccttgaaaatgtgttgcacaaagatgaaaatataatttccagagaaatggtatttgcattctgacagtttcttaggaaagaaggatggagtgccaaaattttaatatggaataaggaagaccaacttagatgcaaaaagggcaagagctttcctgtgactccttagcttaagttggctgttgggttaattagttctgtggtttagctgctactgagaggctactgtagacactgggagtgggataaagaggtacaagagttcagtgtcttcctttaagatagtggctctcaattctatcagtacatgaaatcatgatgctcagggctcctccccagaccaactgaataaaaaaacctggaagtggagcctagacatctgtattaaaatgaaattccctagattctaatacacacttaaggttgagaaccattccttaacagctaagtgagaattaaaaatacgtacattaattgctgtagacatagcagaatatgattagctctatgatgagtgatagaaattatggcccaggagttggaaggcttttaattaataggagccattaggagagactacatcaaggaggggaattttgagctggtatatcttcacaggtggaaagcagagagtccactaggccagggaatgaatgctgtgaggggaatctccggagatttggaagactattttgattggagtgtggtggaagtaaagatggactggtaggctgcagccagaatgtggacagtctctcgtgtcagactaaggaattttagctttactctgcaggtcgtggggaggcattcaggatttctgatgagtgaaatggcaatgctgaatctttgaagattgatccaatgggagtgatggataggtagtttgaataaaagcaggcaagaacttgaggaaatgaagaccaattgggaagctactctcatggtccagatgtggggtcataatgttctgagcgaggcaaatagccgtggaattaaaaatgataaacatttgcgtagtattttcatagtcagttcttgcccatatctcatttaaacctcacactgaccttgtggtctttccttccatactttacaaatgaaggaactgatgttcagagagaagctgttgtaaaggaaccttatagaaaatggaggggcctgattggatgatgaccaatcagtaataggaaattaaagggtgcattggaggtgttggattgggtgtgaagatggtagaattcctcagtggctaaccatgtccagtcaccggccgtgctgtctgagagccacttcatgctgttcatgtgactcttcttgcctctgtcctttaatatgcagttatttatttattattattattattattattattgagacggagtttcgctctcgttgcccaggctggagtgcaatggtgcgatctcggctcactgaaacttccacctcccaggttcaagcgattctcctgcctcagcctcccgagtagctgggattacaggcacctgccaccatgtccagctaattttttgtatttttagtagagacggggtttcaccatgttggccaggctcgtctcaaactcgtgacctcaggtgatccacctgcctcggcctcccaaagtgctgggattacaggcgtgagccaccacgctcagcctatttattattatttttgagacgaagtcttgctctgtcacccaggctggagtgcagtggtgctgtctggctcactccacgctccacctcccaggttcaagtgattctcttgcctcagcctcctgagtagctgggattacaggcatgcgccaccatgcccagctaatttttgttattttagtaaagatgaggttttgctatgttggccaggctgctcttgaactcctcacctaaagtgatctgcccaaagtgctgggataacaggcgtgagccactgtgcccagccacagttacttctttaaaggcatagtggaggcaagagaaggagaggctgttgttaattcaacttgtctcaaatatgaatcttcaagccttttttgaatgtctttgggttttcagatagttaaattgtgttgaattttaaaaggctcagtctaggtatgaatagtctggagttaaagggctgagactttcttatccaggtggactctgccctgagcaggttaactatgactggtaggtttccatttctcttgtggtggagacaggagccatagggaagagaactctggagcatggtagtgtagacaccagagaacatccctgtggcactggtaactaggatgcttcattgagattacatccttatcagagctggagtatgaatcatatccaccaccatgctaattcattttgttcatgagttggctgtgtctgtaaggtcatctgttttgtgaaccaagatcctgaagcaattcaaatgccagtgtaaatcagccacacaggtgacgaaatgtgcttttccatatgagatacttgttccctgcaatcaaatagtaggagtgcaccagaaagctaagggtactaggaggtaaaaaggaatgaatcatcatcatgaagaaccttgattagatttttctcatgaaatgatgagatgtggaggagcaggatggaaactggaaaaggagaggagattgaatttttgtgccccaggcattctcagtttgggcacagagatcaatactcatctgctccagcaggggtgagggtgaagctgattttggtaattggaaatggcaacatccatagaaaattaaactgtcacattttaactgtttcttttttcactgtagaatactgggatcttcagtggcaggaggagtaatcagaagacggagatgaattttaacactattttggaggagattcttattaaaaggtcacagcagaaaaagaagacatcgcccttaaactacaaagagagactttttgtacttacaaagtccatgctaacctactatgagggtcgagcagaggtaagagacaatcacgatttacttttctgctttctatgtagataacgattttataatattgcctgcctctccaatcttattgaaaatgctttgggttaatgaagtaatgatttattatcatttggacttgaaagatgaatttcagagtatggatagaaattaacaaatctgttaattataggtttattataattaacctatgaattaatctattagattacattacttttagatcctcatggaatttgtaaggtgcattgtacatatggctctctcctgtaaaccgcctattatgtatcaaagtcttctttagcaaatataaattgtatccaagtccattactttatatgaatatttcttctttattaagtagaagttacttaaaactggttggtgatttggtggactcaacacgttatcgaagttgacctaaagcagagtttttaaacattcatttttttaatgataaacagctactacaaagtttcttcgatggcagcagggagaaagcagctcactaaaaaacctggccagtgagcacgtggcacagacaaatgtgtggttagcacactcctggcttgtgggtggctttagcttctccttccaccgctagatgaggccttgaatgtgcaatcacctctggttcttttgcttctgacatgttgggtgtggcatttgctagtactgccacatactgccttctctgctagaaatatccttggtttccaggaaatgaccaggggctgggttgcccatggctaaccatatgctgttatgcaattggtttcagtggactgttggtgatcctggtttagtttttttttttttttttttttgagacagtgtcttgctctgttgccaggctggagtgcagtgatgcgatctcggctcacagtaacctccatctcctggttcaagcaattcttctgccgcagcttcccgagtagctgggatttacaggtgcatgccaccgcactcggctaatttttggatttttagtagagatggggtttcaccatattggccaggctggtcttgaacccctgacctcaagtgatccacccacctgggcctcccaaactgctagaattacaggcatgagccactgcacccggccctggtttagttttcattctgttttttttctagagtatcttcctcagacgttgatttagttgtattttttttctcccactgatttctctgtgatttggtttcccccaatttagatagaatggcattgtgtttcatgatggtcctcaactcttaatttctgctgtggctcgtcattgtgacctgtggtattctgcaggttcatgtaatttaggagcatactcctttatccttaagtccccaaaatgctgaaaaccaaaacctcaaaactcttagttacaaaacctgtgtgtgtgtatgtgtgtgtatctgtacatgtctatgtgtgcagaaatattaatgtatttaattatgtggagctgccctagtccctgctgggactattatgtaacatatgatatatgtgctatatttgctttgttaaatctaaaaaatttaaaaatccagaagtgttttagacaagaactgttaccagaaatgtgaattattttgaaacctaaaacagattttaaaggaaacatttacacatttttgctgtatggtaataatttgttataatttgattttaatatatagttgactcttgtcaatgtagggttagggacaccaacccttgtgcagtcaaaaatctgcatatagcttttgactccccccgcaaacttaactactaatagcctactgttgactggaagtcttactgaggacatgaacagtaggttaccacatatttggtatgttatatatatataacatactgtattcttacaataaagtaagctagacaaaagaaaatattaagacaatcataaaaaagagaaaatagatttactatttattaacgggaagtggatcatcatacaggtcttcttccttgccatcttcacgttgagtaggctgaggaggaggaagaggaggggttggtcttgctgtctcaggggtgacagagggggaagatgtggaggaggttgaaggggaagcaggagagtgaggcacactcagtgtaacttttactgagagaaaaatccctctatcaatggacccatgcagttcaagcccatattgtttaagggtcaactgcagtaagtctaagaaaagaagtgaaagtggtaaaatgcaatttttttactaatgaaaaaagtctcagaaaccgacattgtttggttcgcagtatgggcagttactattgaaatatattgcaattgctaactcactttgaagaagataaacatattgagtttaaagtaccccttttggtttagcttaaggggaataaggacaacagtggcatccctcttccttcagaacctcgctcaccatcttgccttggagcagcctcagccaccctgagaaccagaaaggacagaatgaggaggtagtcacaacacagaaaaacccagcctctaacacttcctggcagaatccacctcctttctggctgctgctgcctgggctagagagcctagtcctgttacttaattcctgccttcacccccactcctctgatgagctgggcgttttgatcccttctggtttcttctctcatggaccaacattcactggcatacttgtgacctatgccttgaaatgtggtcacagattcgtttgcctctcatagtaaaataattgtcagtagtaaaaaaaaaagaaaaaaaaagaaaaaaaaagaaactttgtaagaatctggcttcttaaaataacaaaagttctgacagtgctgggctgaattccccaacagctctccctggcttctaggcatggccagcaacaccttgttgctatgtttcttccatgtttgtgctaatgtgctcagttcactgtttgccgtggatcaatcttctgatttccatctccctatccctggaagctgtgattcggaaaagaatgtgagggccggtcgtggtggctcatgcctgtaatcctagcactttcggaagctgaggtgggtggatcacttgaggtgaggagtttgagatcagcctggccaacatggtgaaaccccgtctctactaaacatacaaaaaaattagctgggtgtggtggcaggtgcctgtaatcccagctactcaggaggctgaggcaagagaattgcttggagccaggaggcagaggttgcagtgagctgaggttgtaccacgcactccagcctgggtaacagagcgagactccatctaaaaaaggaaaagaaaaaaagaaagagaaaaaaaggatgtgacatgagtaatctgtgcaaatcaacaggtttttaaaaataatattttgttaaaaaaatgtgactctagaagtaaattagaaccacaggggccattcagaaataaaatagccctagagatatttatttttattgttcatagttctcctgttttcaatagaaaaacaatgaggaggctgtcgattgatctaataactatgatttatggtttctttgtggctaccaagtgccactaatactcgttaaaactctcagttcataatgttagacagaagacgtccatcttctccttattctctggacagcttcttcaacatgatgacagcaagcttttcttgaaattcttcctattatgtaataaacctttctgtgcttgttgaaatatgctgaaaaatcctattctagataacgagaaattcactcaaaccatttcctcagtctaattttgcaaaacttgcatttcagtttccgctgtgggtccttctttagtttgtcctcctttctttatggtagttagttaattcatgtgtatttccacatattccaaatgaactgaaaaaagatcttcctggaagtttatattatttgatcctattcaggataacacagagcaaaggacactggaggtttcataagtgatgttgctttctagtcacggggctaaatgacacaggggacagaccacccaatgtttcagtggaggctccatgggataatgaggtgggaaccaaggaagagcagcactggagtttgatcaggaaaaagatctacaaataatagtgagagagaaaatgaggaattgatttctataggttgagatgttgaatttaaaaaattgaagtagtatgtaaatttgcaactatcattagctaagaaatcaggaatttttagaattggactttggatctcttaatttggttggctttttgtctgttgtactgccccagcatggaagctggcaaataacttacaaagttgaaggaatggggaaactcgttgtgccagggttcccaactccacctgtacattcagtgattcactatgacagctcacaggactcagcattgagtcatactcacaactagatttattacagcgaaacgatacaaaacaaaatcagtaaagggaaaagacacatggggccaggcataagcttccaagaatcttatcctagtagagtcccagaggatgtgcataattcctccagcatccaattgtgacaattgtgaaatgtgctattagagacttggtgcccaaggtttttgttggaggctgatcacacaggtgtcctatgcctagtgtaccaaggttccagactccagaaggaaagcaggtcttcagcatgaactgcattgtacagtttaggtacagtgagccacctcatcagtgttggtaatagtgggaccctcccaaagtccaagttcccagatgccaggcaaggatcagccttgtaaacaggcctttcttgggacagcagcctcaagcctgctgtgttaactcttttctgcacattagtagtaaaaatgatacaacctattgagcactaactacaaattaaccactgtgctaagtactttacatgcattatttctcttatttctcaaaacaattctgtattaagtcttgttagacttaatttcaaaatgcagaactaaggcttagaaaaattaaaaacctgcacaacatacagcttacaagagattgcgcacaccttccagaaattgcaggtatatttcttcaaagcctatctttgaaataatcttgatattccaatgaaaatttgaaaaaaaaatctaaacatcttaaagttagcaccccataatacagataacattttaaaagtttcatggatatttttgtttgttactttcagttataacttctttaaaaaaattttctttgtgatggaagagaattaacacttgagagggtttttgtcctggatctaccactctctcattggactttataaaataattttctccaatctatagtttaaacatttttttgtgtatatattgtctttatactttcttcaaattaatttttaaatttataattgacacataatatcttttcaaactgttagctcctccgtttcatcagcatttcaaccccaacacacatctgatctgttaccagttcctgttgtattggtcagggttcttcagagaaactgaaccaaaaggatatatatgggatatatacatatgatataatgtatgggtatgtatatatatgtgtatgtgtgtgtatgtatgtacataaaaggagatatattgtgaggaattggctcacacaactgtggaggccaagaggtttcacagtctgttctctgcaagctggagacccaggaaagctggtgatgtagttcagtctgagtctgaaggcctgcgaaccatgacagccagtgatgtgaatcccagtttgaggacaggagatgatgagatgggatgtttcagcccaagtagtgaggcaaggaaaaaggggtaaattcctctttccttaccttttgttctattcagggttggatgatgcctgctcacattggggaggtcagtttgcttcctgagtccacagattcaaatgctgatctcaccgagaaacactctcacagacacactcagaagcaatgtttaatctgggtaccccatggcccattcaagttgacacataaaattaagcatcatatcggtgaattttctctactgcaggcttattgcagctcccaaccccagttttaggtggattactgccctacttgattcaattcctggatcttcatctttcatctgcaaaatgcatagcttctctaggatcaagttaaaattccttagtttgggatacgaagtacttgatgcaattttttcttcttctcctcttcctcctcttctggctgtgtctcctacttacagttgccctttcacatcgtgcctttgctaatactcttcaatctatttggagtgacacactcctctgcctgcctgccaggatccatctatccagccaccatctattttatctttcaaaaatttgttgagtgcctggggaacacttactcatcttttctgacatagttcaatccccatcttctcagaagccttttctgtctccctcctggcaaaagtagaatggatcctcctcccctttgtgctctgtacacattattatggtatcttgactacctgactatttacatatctgtgttacctactggattttaagctcctgtgatagtgtagtataataagaaatatacattttggcaagcccctttcagccgtagctatgtttatgttaatgaggtgacttttggaaagtaataggttgactttaggatgggggatctggttgtcaggggagccaaccatgtgattagagggttggaactttcagccctaccctccaacctctagggagggcagaagcaccagaggttgagctaataatcatttatagccaaagatttaatctatcatgcctacgtagtgaagcctccatgaaaaccctaacagaaggggttcatagcgcttccagattagtgaacaagaatgtgtgcatgtgctagaggatggttggattagttggttctcacactgctaataaagacgtacccaagactgggtaatttacaaagaaaagaggtttaattgactcacagttcagcatagctggggaggcctcaggaaacttacaatcctggcggaaggggaagcaaacacatacctcttcgcatggtggcagcaaggagaagtgctgagcaaagcgggaaaagccccttataaaaccatcagatcttgtgagaactcacccactatcaggagaacagcagcatgggggtaaccgcccccaggattcaattatgtctcactgggtccctcccacaacacgttggggattatgggaactacaattcaagatgatatttgggtgcagacacagccaaaccatataaatggtataacccaaactccatggagacagaagcttctgtgcttgggacccttctggacctcaccctgtgtatctctttatcctgttgttcatttgtatcctttaaaatatccttgtaataagttgataatagtaagtacactttccctgggttctgtgagctgttccagcaaattcttgaacccaaggagggggttgtgggaacctccatatgtagccaagtcagacaggagttgtggtaacctggggatccactacttgtgattgacatctgaagcagagggcagtgttctgggagtgatcctttggtctgtggggtctgtcttaattctgagcagttagtgtcagaattgagttaaattgtaggacactcaattggtgtgtgccaagaattggagagttggctgttgtggaaaccccactccctgccacatatttggtgtcagaagtgctgagagagtataggagaggtatttttcttttcttttctttttagctgtgtattagtccattcgtattgctataaagaaatacttgaggctgggtaatttataaataaaagaggtttatttagctcactgttctgcagcctgtacaaatagcatggtgccagcatctgcttctgatggggccttaggaaacttacaatcatggtggaaggcaaaggggacctggtgtattccatgatgagagcaagcaagagagatgccatactcttttaaaacaaccagatctcacatgaactcagagtgagaactcattcattaccatctaggagggcaccaggccattcatgagggatctgccccccatgacccaaaccacctcccaccaggtccacttccaacagtggggattatatttcagcattagatttggaggggacaaatatccaaaccatatcaaactctttgagggcagggttcatatccatttttgtatttctgtgggcctagggcagagggagtactcagaacatgttgcatggctggatgcactggatatcctagagatgaggagatggggagaactcaatcctaaatgtatttaggaatttaagattgagttctccccatctccccatctctaggataaatttaggatttatgtatgttgtgaaccatgacataaatgtatgttgtgaaccaagacaatcagaaaggttgtcacactgctaataggtagaagaattagaattcgaaccttgatattgtgactcttaagttcagtgctcttcccaaaatgccacagatgccttgcagcgtccagccctatggggcttagcgagtgttctccccgtgtgtggagacaagagattgtaataaataaaggcacaagacaaagagataaagaaaaagcagctgggcctgggggaccactaccatcaagacacggagaccagtagtggccccgaatggctgggcttgctgatatttattgcatataagacaagggggcagggtaaggaaggtgaatcttctaagtgattgacaaggtgaagcaaatcacgtgattacagtatagggggcccttcccttttaggtagctgaagcagagagagagagagaaggcagcatacgtcagcgttttcttctctgcacacgtcagcattttcttctctgcacttataagaaagatcaaagactttaagactttcactatttcttctactgctatctactacgaacttcaaagaggaaccaggagtacaggaggagcatgaaagtggacaaggagcgtgaccattgaagcacagcaccacagggaggggtttaggcctccggatgactgcaggcaggcctggataatatccagcctcccacaagaagctggtggagcagaatgttccctgactcctccaaggaaaggagactcccttttgcagtctgctaagtaatgggtgccttcccagacactggcgttaccgcttgaccaaggagccctcaagcggtccttatgcgggcatgacagaaggttcacctcttgccttctaggtcacttctcacaatgtcccttcagcacctgaccctatacccgctggttattcctaggttatattagtaatgcaacaaagagtaatattaaaagctaatgattaataatgtttataataatgactgataattcttcatggtcctctctatatctaatttgtattatgactattcttattctaactactttctttattatactgaaatactttgtgccttcagtctcttgccttggcacctaggtaatcctccacccacagtgcctctcttatttaatctggttgtaccaaaattgagcattctcttgttacgagatgcttgaaactttaatattttacctaggttaacaaacatgatggtgggggcaggcaatcagttacaagtacgatgacatgagtctcaaacaccctgggaaatctctcatttgtataggctctcctgggtcatattggtttttttcttgaccaatcctgggaacctggagacttagtgatacagggataagagcctgttgaggttctgagatgatctgatgtttctcccttagttatattcgtatattaggtggttccccaagtggaaactgtaggtttattgggtccttctaatctttacctgaaggtttgtatctttcagcacttcctagggttctggggagttggtgtggaatgggaaaagaataatttcttgtactaccgggcaattggaagtatctgcatcaaatgttagagattaccaggcagtccaccagcttgtaaaaagtgctatgactctggcaggtgtggtggctcaggcctgtggtcctgacacataaggaggtagagagtttgagaccagcctgggcaacatagcaagccatcttctgtataacaacaacaacaacaaaagtgacatgactctaaatactccatgtaatcattagtgtgtgatgggattattctggctctggaaattctcaactatattatgccttgaaaactcatattcttagacaattgaatttctttgtttctgaaattaggtggtatcaactttcttctttgtgtctcaatttcctttcttgtatctcttctcccatttctgattcatatctgtgtttttattctactctcctagatctgacctttcttgtcattaatcacttcaagaggccatgatgccaggtccgaagtccaagggtcttacttactcctttaatttgccaaattgtttacctttctttaatgatattcactgtctttttttttttttctctaggaagctgaaatctatttaagacagaatagggggatactaacattccctccatccatacccctagacattcttttttataattacagtacagtgatcaaaattaagacatttaacattgatatactattattgaatctggagatccagagcacatttcatttattattccactgatgcctttatagctattcctcaccctccctgcccctccagccccaagtccaggatctaatccataatcacacattgcattcagttggtcaagacataaagttttaaaatatctatggtgagaggaagagataatacggaagaaatgctgtcctttgttacatactataaaatgccagctatctcatgactactcaatgatttcatgtaagagtccatacaatgacttcacgtaagagtccacaaacttaaaaatcagtgtagtctattctcctactttcattgtcatggttatcattaggagctgaaggtgtccctccccaccaaagaaattattgtagcatggttcactaggatgagtaaaaatcacttattactggctgggcgcggtatctcacgcctgtaatcccagcactttgggaggccgagttgggcggatcatgaggtcaggagttcgagaccagcctagccaacatggtgaaaccccgtctctactagaaatacaaaaattagctgggcatggtggcgggcacctgtaatcccaactactcgggaggctgagtcaagagaatcgtttgaacctgggaggcagaggtttcagagagctgagatcacgccattccgctcccacctgggtgacagggcaagactccatctcaagaaaaaaaaaaaatcacttgttactgtttaccatctctctcgtttcctccccttctagcttaattttttattattttgtattaaaacagttgtcaggcatgcagagctttttatggggtaattactactaaatgaagagaggagtttaatcaaaggtttggtcctcctgcaacttaagagtagaaacaatagacatattctagatcttgaaaaacactctttgatctggctgtgatagttgtgttttattcatttgattatttgtattatgatgagagaaaggctatatgaaaaatcagcattgttgttcagaaatggtattacttaatttaatttagtcataaaacttgtccgtcagcaatttttagtgatatcagaaagttgagttttaagcaaagttttatttagctatttttccactgaacatattcaagactgtgacataggaactgaaggcaattacaaaaagaatgattcctagaatatttggaaaatggcattgtagttgaaataaacatagtgtttctacccacccctcttctcctacctgtctaccttgaaaaaaaattgtcttaatttgaaatgtatgtaacttcttgcatttttttaaaaaagaactacatttgacatcacaatttgtgtaacttgagttgtatttctccttttatgctatgaactactgggctgaggaattcttagaaatctttgaaattacttccttgtaattaatagtttctagaaagtgtttattttgaagatagggatgatagcatttacactggaagacagtttaaaaagagaccaaattatgagtggaggaatccttggtggcaagagtatagacctgtatacagttttttgttttttttttttcctggggcgtagagattggggaaggccacttggccaagggtgagaatgtgagcaatgatgggcagagagagtccattcaatgcagagggaacagcaggtgcaaaggccctggggtgaaaggggacttagtgtgtttgtggaactgttctgttctgaggcctataaagatttataaagcaaataattacaagaggataaatacaaggagatagttgatttgttagtaataaggaggaatcatgcaattttagagcttaaagagactttaaagaatcacctccagatttttcacttgtgaaaactgaagataaggagatggtttgctccaggtcacctagtgagctggttgttaagcctggacccaagctcatatcgaatatttctggatcatgctctctgactgcactgccttagttctggaaaggatgtgtctgggttgcccagtggataaggactctaattctatacagtgtcaataatatggttgttataatggataccatctagtgactattcagactcctttgcttgcaaataccgatgctctttgtcttacgacagggttacctcttgataaacccattgtaagctgaaaatgtatttgggacacctaacctactgaacattgtaggttagcctagcctaccttaaatgtgctcagaacacttacattagcctgcagttaggccaaatcatctagcacaagcctattttatttatttaattaattatttttttgagacagggtctcactctattgcccagactggagtacagtggcgcaatcccagctcactgcagtctccacctcccaggctcaagtgattttcctgcctcagcctcccaggtagctgggattatagatgcgtgccaccacgcctggctaatttttatatttttagtagagatggggtttcgccatgttggccaggctggtcttgaactcctgacatcaaatgatccacccacctcagcctcccaaagggctgagattacaggcgtgagccactgcgcccggcacaggcctttttataaaaaagtgttgagtatctcatgtaatttaaaaaattattttaattagttttattttttgagatggagtcttgcttcgtagcccaggctggagtgcaatggcatgatcttggcttactgcaacctccgcctcccgggttcaagcgattctcctgcctcagcctcccacgtagctgagattacaggtatgatccacctcgcctggctaatttttgtatttttagtagagacagggttttgccatgttagtcaggctggtcttgaattcctcacttcttgtcacctgcccacctcagactcccaaggtgctgggattacaggagtgagccactgtgcccggcctaattatttttatttttgagacagggtcttgctctgtcatccgggttggagtgcagtggtgtgatctcagctcactgcaacctccacctcctgggctcaagcaatcctcccatgtcagctttcctagaagctgagaccacaggcacataccaccacgcctggctattttttttgtatttttagtagagatggggttttgccatgttgcctaggctggtctcaaaatcctgagctcaagtgatccacccgccttggcctcccaaagtgctgggattacaggtgtcagccaccacacccagtcctcatgtaatttattaaatactgtactaaaagtgaaaaacagaatggtagtatgggtacatgaagtatggtttctactgaatatgtattgcttttgcatcatcataaatttgaaaaatcgttaggtcaaaccataacttgggactgtctgtgcttgtcactttcctacctttgaagctttggtcctgctgtgcctagcagttctccttctcctgtctatttactcaagtctcatcccaaatccttttaagtgggaggctttgtacacccctctggttatacatgccttgccctttctgaattcctgtttaaatgtaatttcctgttaaatgtatatgtgttatgattattgcctttttttctcaccggctacataataatttccttgagggaagaagttgttttgtaatttaaacatatcacacacaatacctcgcacccattagccttttaaaaaagtttttgttggtagtaattacaatggtgatgatcagtaaatatttaaagtaagcaaaaagatctttaatataaagatctcacattgtgagagttactccccacataattttgttccattttattttttgaagtggtgcattatttaaatttagaaacagctgggcatagtggctagcacttataatcccagttactcaggaggctgaggtcagaggatcacacccagaaattttttttcagggacagagtcttgctatgttgtccaagagtttacgtctagcctgggcaacatagcaagactatctcttaaaaaaaatctaaaacaagggtatgttttaattcagtatttattagtattaatctctcccccaaactagatgtggacattattataaacaaagttatcaactgtcaaaagaaatcacatgacaatttaagaaagtgatactacattttgagttgtttctaaaactatttcagacacaccaactgttagccataggttgatgctggtcaggtacgtgtagaaaattatatgcagaaaggagcttagaaacacttgtgttactcagcaattaattctattattacttttttaggaggacttctgatgttattaccttttagttttgtgaatatactgtacttctgagataaataaatattaatgttcactgattactacttcagataaaaataccattttggtcttcttaccaaagctcttcatttaccttttttacttttcatattagaaaactttctcaaagtttcgcatgattctacattggtaagcccctgaaaagaaaatactacaaaatatgtgcaatattgtttgttaaataaaattaaacgagtaagcaagagactgaggtgaaattgcaaaatgatttttaatagattattggaaaggaatttttccccattacctagttagatgacatgtttcttattctatctttattccaagcaatcacataggcattgctgttaattttatttgcgactacgaaagtcacatggataggtgtaattccttactcataagattgtaaaatataaattttgtgcctttgagaggaatatgtttataatttcctggtagaagtatcttttatttgtaatatgggactcagctcatttgttttactttcttcatcacttgtacaacaaagatttagtgagtgtgtacccagtgctagggatggagtaattaaaagatgaatggttctggcctcattaagcttacaatctgattaagctatagttctacctctgtgggttcataatgacatactttgttatgctacctctgctgtgctatgaagggggtctcttgagacctggcgttcttaccttgtgtgccaccgttgtttgcacttgcccacgggactctcaacttcactggacattgggtttccaagtgtaatatggggcagttgtgcctagaggatttcaaggtttcctcctgttcttacattttacatagcacagatcccacagaaatatcagtgttttgtatacatacttgcattgttctgttgtcttcagtgccccataaagtataactgtaaacaacccacagatttgcccacggactattttacaagtgaagaaactaggggacagtgttctctgaagtgacatcccatctgaggaggcgaaccaagatgtcttatctttcgggcgagtgtactgttaaaccacactgttctacttcccacaaagggggacttccttaaacagtaacttcactgaccacctctattcatatgtttccttcctccttcccttctttggctgtatagataacaaaccttgcaacgggtgttcttttaccagtggttcatttatgtttgtttttttccgcactgtacccctgtgaggtgttaggaaccctgtgcatttaagtaaattagaattgtgcagaaaagagagaccagcagaaaaaaaatatttctgtgaatgcttttatatacatatatatatatatatatatatttttttttttttgagacagagtctcactctgtcacccaagctagagtgcagtggcatgatctctgcttgctgtagcctccgcctccggggttcaagtgattctcatgactcaacctcctgagtagatgggactacaggtgcgtgccaccacgcctggctaagtttttgtatttttagtagagatggggttttaccgtgttgcccaggctggtctcaaactcctgagctcagacaatccacctacctcggcctcccaaagtgctgggattacaggcatgagccactgtgcccagcctgtgaatgcttatattaaagaagctgaaaagggttatgcttaggtggtaaggctcaagaactttaaagtgagttttgttaaatggtacatttcatatatactttaagtgattcttcttaaagaaaactcacaagtgactcaaagatgaatttattcacgttcattgtctatctcaacagcagagaaactgtcacagttgaagactcctggacatttactgcaatatatttgtaatttagtttaacactttagaaaatagtaaagtaagctcatttttgggttaacttatcctgactaggactgattgtagtacaatataaggataaatagtaaaactttgaattttcttggaaaatgatgagcagcttgatgctaatgatcagatataattaaaaaaattttttttgaacctcagagtgatttttttattttcagacttcacaatcactttctaatgataggtgttctgatgaaaatatctgcaggaaacaagaccaaaattcactggatgagataatatatttcttgaagttctagaatcagcttatcagctgtattctgttccttcttagttgtaggaaactttagctgtggtctaggtccatctctgagtttacagaatttctgtgaagttagggagtgagagactaagaggatggactcttgtgccagattatctgggttcaaattctaaatctgttacttattaattgcatgacctaggacaaattacttaatctctctgtgtctcacctttaaactggggagaataataatacttccctcataggtgtttttgaggggtaaatggatcagtatagataaagtggctaggataggtcctggtaggtaagtgcatgtaagcagctgttattattatatacataaggtaggttgcattgttgcccattgtgtctttacatgtttcagtctttgctcttgcctctgttttttcccagatatcaatgcatttgcaatgagtgtaattgtgtcattgtgttattaggtcactaatcacaggtgattcactctttaaattgatctgtggtgctggtagtctggttatgttttggagttctggtaactggtggaaatgcatacctcgggtaggttcatgtgtttgacatctctgaaccatgttcatggaactctgttgggggtcgtctgctgtggatgtttttctctggatgtttgccagtggtacacatatcgatagggtgccagttgtggtaactgtggtgttgctttctcagttttagtttttctttcctccctcttcctcctcctcctcctcatcatcctcctcctcctcctcctccattttttttataaagaggcagtctcattctgtcactcagactggagtgcagtggtgtggtcatagctcactgcagcctcaaactcctgggctcaagggatcctcccaccttggcctcctaaggaccaggatgacaggcacgtgccactattcctgctaattttttgtttttagttttgtagagatggagtcttgctatgttgcctaggctggtcttaaacttctggcctcaagggatcctcctgcctcagcctcccaaagtgccaagattacaggcataagctaccgagtctgaccaactttacatttttatgacaacagaggtgggtctgctatggagttaaagaaaagtaagctttaggctctttcaattccatagcccttcctaaggcctctggaagggccccagagcttttgcatttatgattttgcattttagttttatttttaatttttaattgacaaagatttctcctccaaagtgtttaagcttcagatccctcaaaatctggatctgcctctgtagagcacataacatttcatttgttctaatatctgacaatttctgcaaactctgacagtgaaatactctcaaacatttccactgtaaaacagctaataaacaagcatgtttacaattggtttatgttctctaagttcttcctttgaaaaacaaagtggtgtgtctctactttaatctgttaattttatttccctgaatagagttaaacagttgttgtttttgaagtcctatacttttcttgttaaatgtattcctattttatagttttagctactcttgtgaataggtttttttccccatgatatgttgtaattattgttaatatatcatcaagcttgattttttataaatctattttttttgagacaaagtctcactctgttacccaggctggagtgtattggtgtgttcacaactcactgcagcctcaaaatcctgggctcaggccatcctcccacctcagcctcccgaatagctgggatacaggcgtttgctaccatgcccaactaattatttgttatttttaatttttttttgtagagatgagctctctctatgttgccaggctggtctcaaactcctgggctcaagtagtcctcccacctcagcctcccaaagtgaggtactgtgcctgcctacaaatttattttgtaaccaaccattatactctgctacgtctgactgttacatagagacatagttttctatcatcaacttcattatggaagggttattttctactgaatttaatccaaattacgagaagaaaaaaattaaaaaaaattaaaaggtattttaagtgctaaacaagaacattcaaaagcatgggattaaaactttctgtgctgagaaagttataagctgtgtgttctggagggaggcattgatggggagtggtggaggaatatatctacccagtaaccttaaattttctgaattgaccgaaatacaaatttagaaatagagaaatctagatttataattcatagtgactaccacggtgggataattgaattcaaacccagcctatctaacttggaaggcacccacagacatctctacttgaatttcttagccaccacccccaattcttttttacttgaatctgttcatttgacaaaaatattttaagcacctactttgtgccaagtactgttgtaggctctgtggacacaatagtatagaaggtaaatgccctgctctcctggaatttaccttctaaaggggagatgcagacaacgtacagataccagtaaatatccccctgccatgagaaaagtaaagccgcatgagagagatggggccttgcctgctgtttctgtaggtagggaatagagaacttaggaagagcagggcaggccacggagaagccaagagtacaaaggaccccagggaggtgggaaatgctttattgctcaaagaacagcagagagggaaaggaactgaggtggaatggggtgggcatgggaggggaggaggccagagagctgggcaaattcatttttttgtttgttttgtttttgttttttaagtaacaggcagattttggagggttttgagatgggagagacaagatgttgctaattcatgtatgttgccacgccagggcacagtgaaacatgaactggcagttagaagcttggagttagttctggctctgctagccagtgtgatcttggagaggtcagtccctcagtttccaccctaaattgaggaaattagactgtgatcaccagaatccctttcatggccaaatattatgattctcagatggagaaattgttattaagcattcatatgtgctggccacagttgttggctaagtgggatagaggagacctgccactcccaccctctgctcagactttggctctttgcctcacccctgcctctgggaagccaagttctgagcctgcctggaccacagatgggtgtatcactctgttctcactggggtcctcatcggtaggtgtgggcatgttgacttactctgtttgccttggtcttctttcttccaaatggtgttgttctctttcattcaatttcctcttcttttcttctattaggatttatacattttaaaaaatccttttcctatcattttagtggagtgcaataagggaaaggagttaagagcttgtgatcaatccattatgcttaaattctggatttttgtttttttattttgagacgaggtctcactctgtcgcccaggctggagtgcagtggtacaatcatggcttactgtagcctcaacctttcgggctcaggtgatcctcccacctcagcctcctaagtagctaggactacaggcatgtgccaccacgcacggctaattttttttttttttttttttgtagagacatggtcttgctttgttggccaggctggtctcgaactcctggactcaagtgactctcctgcctcagcttcccaaagtgctggaattacaggcatgagccaccatgcctggcctggaaattctttaacatgtttattttataatgttgaaaacatattttccttgaggacgtcttgaagaatgcctttcctcagaggaatacaaggagcctaaaaggacatttgggaatgagacacacagggtttgtagttacaagcagtatcccagcaactcaagacctgaagggttaaagcacctgatgcctgccagataaattccagaatcactagtctgtcaggctgtcttctggggcctcagtctaccttttcagcttcattccatattttttcctcatggttctctgctgctgcaatcaaactgtctgattcctgttgaactctattttcatgttcctaccacctggtccattcttctgacctggaatgcccatccttttttgcctacctaaaccctacacattctttaaggcatagttcaaattctacctttcttggattcctgtcaacggtgcagaagatctctgtctccttcctttgaacccttgcccctcgttctttatttgtggggtttttttgtttgtttgtttttgtttttgagacttagttccactctgttacccaggttggagagcagtggtgtgattatggctcatttcagccttgacctcccgggttcaaccaatccttctgcctcaccctctctggtagctaggactacaggtgcatatcaccgtgcccaactaattgttttcatttttttttttttttttttttttgtagcaacgaggtctccttatattgcccaggctggtcttgaactactgggctcaagcaatctacctgttaagccttccaaagtgctgagattacaagtgtgagccatcacgcctggccaacttttcatattttacacttttaaatattgctttctctggtgtgtgtgtagtggtatttcactatatttttaacttgcatttctcttatcacgaatgaaaatgagcaagtctacatgtgttcactgtccattgacatttagtctctatcgaaatacctatttctacattttgtttcttaggttttctgttcttttcttatttgtttttaaaaggtataaaaaatatatatattctgaatgaagctcatctgtgtgtgctttgtactttgtggcttgtctaactctcttaatatctcttttttcttattgtggaaaaatacacataacataaaatttactcttgtaaccattttagagtgtacaattcagtaacattaagtacatttataatgtcgtttaaaaatcaccactatctagttccataactttttcatcaacccaaacagaaactgtcccccttaagaagtcagtccccatttccttttcctcccagcccctggcaaccctaatctacttcttgtctatatggatttgactattctggatactttgtataagtagaatcatacaatatgttacttttgtgtctggttttttccactaagcataacgttttcaaggttcattcaagttgtagcatatattagtactttgttccttttcatggctccattgcatgggtagaccacattttgtttattcattcatctgttggtggatatttgggttgtttccaccttttggctactggaaatagaaccgatatgaatattcatgtacaagtttttgtgtagacatatgttttcatttctctgggatataggagctgaattgctttggctttgagtatgtttaaccttttgaggaactgttagactgtttcccaaagcagctgtgacttcttacattcccattagcagtgtgcaagcgttccaatttctccaaatccttctttacacttgttattttctcttttgttgattgtagctgtcctagtgagtgtgaagtggtatctcattgtggttttgcctttccctatggctaataccattgagcaactttatatgtagcttattttaaaaaatgcatataggctggaaaacctcctgtctggtgggaacctcctctttatttgatttttaaaatgcaggggacagtgatgtgctaataatagtatatatttagcaactgggagtagaggaagaagccctgattttcagcatttgccaattttcatggtgttaagtactcccactatggcagatctccggcccctgcatgatgtcatggagcacagagctgggaacggcatgcacagtgggctctcatgagctgtcatgagctgactccagcacaccagtgagtggaagggagaatcaggtgaagtgagcctcactgaggctgcctgctattatgcaggccaggcactgcataaccctagagggtgccattcacatgttagtctaaagagaaagggatataacatttattgagtgtctacaacttatttaatcttgaccacagtcttctgaggcaagttgtattatcttagttttcagagaaatccaagggttagggagcttaattaactaagtcaatgatttgcaactaataagtgtcaaagttggcatttaaaccaggtctttcttacagtgaagctcattctagttcaccaactgtgtcaggggtggggatctccaagaccaccgccaggtttgatgatttgctagcaggacttacagcaggggtccccagcccctgcaccacggactggtaccggtttcggtgcgtggcctgttaggaactgggctgcacaggagaaggtgagcagccagtgagcaagcaagcattacccactgagctctgcctcctttcagatcagtgttggcattagatcctgataggagcacgaaccctcttgtgaactgcacatgtgagggatctgggttttgtgctccttatgaaaacctaatgcttgatgatgtgaagtggaatagtttcatcctgaaatgatcccgctcaccccaggtccatggaaaaattgtcttccacaaaaccattccctggtgccaaaaagcgttgcagattgctgacttatgggacttagataatagctgtactcatgactgtcatttattacagtgaagagatagatgcaaagcaaaatcagcgaaaggaaaaggcacgtgaagtctggaggaaaccaggtgcaagcttccagagcttacaggagtcctctcccagtggagtcacatagggtgggcttaaaacctccatcagtgagctgtgacaacaggtgggatgttgcctaccagaaaactcatcactcagtgtccacggtttttaactgggagctggtcacttaggcccctctgcctagcatgtgcccaaattccagactcccagaaggcaagcaggtgttcagcatgaaccattttgtttgtataaaccgttaagaccccttgtggcactcatcactgctagaaatcatgggaccctccccagattcaagtttccagatgccagtcaagggccaatctagaaaggcaagtaagcctggctaagaatagcagtgtcaggcctgctatgttaactgttttctgcacattgaccaaatgcaaatataggaaagcaaattgagaaggagatcctgtctgcttatcattgtatcctccttcccccagtgcctgcacaggacttgatatgtggtggtttctaataatggctccttgcgttgtacagattcccatggatactcagctcctccctgtgtctgtgctgcctgtaaagcgagtgcctctgtgcttgcaagtttctctgagttagcccaaagtggctgttctttcaaattctgatgaattatgactgcttattttagacatctcagtgtagcttcatgaacccctactatgaattctcagtaacttttctctgctaaaaagccttcatttgaaatgctgaggcctgctctttgtgtctccggtggaaatattggttctttatttccagagccccagacaccctgtctcagactcacttatacatcagtgagctttgactaaaagtggaacagtttcctgcacctgaccccagtgtctgggtcacatggggaccatcatgttggggttacaccttcctttgctctcatgggcagggctgactgaatggtctgcgcagtatgcatttgtgagaagcacattgcagggggctctgtgtagaggaacagttctgagaatgagcaaactggtgctaccatgagctgtctaaaccccaagtttttgtttttgtttttttgagacagagtcttgctctgtcacccaggctggagtgcagtggtgcaatctcggctcactgcaacctccacctcccaggctaaagcgattctcatgcctcagcctccccagtagctgggattacaggtgcacaccactgtacccagctaattttttctatttttagtaaagacagggtttcactgtgttggccaggctggtctcaaactcctggcctcaagtgatccccctgcctcagcctcccaaagtgttgagattacaggtgtgagccactgtgcctggccataaaatccaagttctttttattcttagttactgtgacagaccgagttaaagaaaacaaaaggaactcacctcgcctttgtctggctggttccctcagttctcaagtgaagtgaaaattattttcctgcctgcagctttgcatagttattttcccattgcttactttaatgtaatggccagcaatgttcttttctatagttaggaaaagcagattttctgaaaccagaagcactagttctgatgtcagacagtcagtgttcaaatcctgggttctgtcactccctagcttatatgatgctgggcaagtgagcatagccactttcttcctcagtttcctcatctgtaaaacagagacaataaatagttactacctcaaagggttgttatggggatcaattgaaatgatacaactacaacatgcactaaataaatttaaagcaaaactggcatatggtaagccttgaagaaaagttagtaatattgccattgttgttaagtttcaggatataaaaatccattttttttttccttctgccacccaggctggagtgcagtggggcgattttggctcactacaacctctgcctcctggattcaagcaattctcctgcctcagactcccaagtagctaggattacaggcatgcatcaccacgcccagctaatttttgtatttttagtagagacagggttttggcttgttggctaggctggtctcaaactcctgacctcaagtgatctgctcacctcagcctcccaaagtgctgggattacaggcatgggccactgcactgggcctaaaaatctattctttttggtggttcacactgatttgagtaaataaaatttcttactctctaccccatatgcctttacacgtttatttatttaaaaatgaaaaactgaagataattgtttgaaagaagttccagtgtggtaggtggaaacctgtccaccttaaaataagccacagtacgggcgcctgtagtcccagctactcgggaggctgaggcaggagaatggcgtgaacccgggaggcagagcttgcagtgagccgagatcccgccactgcactccagcctgggcgacagagcgagactctgtctcaaaaaaaaaaaaaaaaaaaaaataagccacagtactttggaatctggcagcctggggcttcccctgtgactctccctgcctttgtgagctgaggaaccactgactgggctgttggttctctggggagaaagggaatgatttctcctcccctcctctggcatggagatccctccacagtctttccccagcttgtctctccaggtggaggctggaacatgcctcctacctcaccagactcataacattctgcttcccgtccccttccttagcctccttctggctgtctgtcatgctcctctgagagcccgtgtccttgctcttagaactccagtgagcagctctctctccctactgcttcggtagcccacggcccttcttgcttgtgcaataaataattagtgtgtatctcttcttgtgaaatccatggttttcctgtatcctttctggccactgcttgtctccttccagggctgccctttctctgcccgcctctcacatgtgcgtgttcctcagggttctttcgtggggtctcttttctcactctgtgcttgccttagaagacatcatccgttccagtggcttcagttaacttctgtgtgcagatgactttcccagtctttgtttcccagcctgatatctattctgaggtctgagttctcacaggtatctcaaattcaaatgtctgaaaagaatctcaagatgtcccccacccctgtaatctctagttcagtaattggtaccatggtctacccagttgcttgtgccaggaacctgagagtctgtctcaacttatccctctcttcaccctctcttgtctggactctcaacaggttctattggttccaccttctaaatatatctcagtcctgctctttctcctcccatctgtgccaccaccatgatccaaaccaccattacctcttcttgggtgaatacagcagcctctgtatcagttaggattgggttatgctatgtaccacacacaatccctaagtaatagtttaaacaagataaagtttcttctttttctcagtgtggaaaaaccaaaccaaaaactggaagtgggctgtctagaactgctatggtggatacaatccagggatcctggatcctgtctttcctctccatagtcctagcttatcttttgtttttgccaaagatggctccagccatcttgtctgaattgcaagctggaggaaggaagaaagacagaaaagcaagaagggacatctcccaccagagtcagatccctttagcagctttgccttatgttccatacaagacttctgccaatatctcattgaccagaacttagccacatggctatacctagtagcaaagggaggctgagaagtgcagtcttttattctgagtaccaaggtaccacctaaaaatcagggttccattattagtgggaaatggatgtcataagcagacagctagcaatttctgccgcatcctaatgggctcctctttccactcttgctcctctccagtctgttgtacccaatggctgagtgatcttttaaaaacacaaatacgatcatgtatctctcctgcctaaaaccctacaagaaattattatcccaattttaatctcaaaagtcctcaacatggcctatgggacactgtgtggtccagcagcctgccagcctgtccacattgatctgcaattctttctcctcactccccaccccccagcccacctgtttttcagttcctcgaaggtaccacctccttcccatgttgaagcatgtacattacctatgtcctttctctagaacccgtgtatcccctcccttgaatggctaacttctccccctctttcaggtttcagcttaactattacttccttggtatatttgctgtgatcttccagattagattagatttccctgtataatgtcattctgcacttttactttgtaccacctatctctattttattttaatacattattaatacaattagtttttcagtctctttctctcattctcatttataagcttcacaaagcaggtgaaggcatcacttaacccagtactcatcctccttcagagggttgttatggggatcagttgaaatgatacatctacaacatgcactaaataaatttaaagcaaaactggcatatggtaaaccttgaagaaaagttagtaatattgccattgttgttaagtttcaaaatataaaaatccattctttttggccaggcatggtggctcatgcctgtaatcccagcactttgggaggccgaggcgggtggatcacgaggtcaggagttcgagaccaccctggccagtgtggtgaaacctcatttctactaataaaatacaaaaattagacaggtgtggtggtgcgtgcctgtagtcccagctactcgggacgctgaggcaggagaattgcttgaatctgggaggcggaggttgtagtgagctgagatcgtgcctctgcactccagcctgggtaacagagtgagactttgtctcaaaaaaaaaaaaaaaaaaaaaaaaaaagaaagaaaatcctttctgtagcccagactggagtgcagtggttgttgagtgattgaatggaatccaggttcaaggaaaatatgatagatttgttttgtgtcatgtgaaagagatgtaaatgaaagagataaggagagatgtttgcctgggtagtttagagatacagatttaagacgcaagtgagaagttggggttagagaagtaaatttggaatcattggatctggttcatttaatgctgtttatcctaaaaggaggtggcttcctgagaggacatgctgtgggctttgaagccaggcagatctgctctgaatctggatctgtcattaccagctatgaaattgggcagttgatgaaactttctaagtctcagtttcttcacctgtaaaaggagaaaatacctgccctgccaggccatttgtatttaagcctctggccgatagaatattagaaacctttctgtccattggcttcaaagatgctttaagaatgaaaacatttctaccttaaaaacagagacaatggaaaacattactttctttatcatctccttggtacctttgaatatacattttgcacagtgaaaatcaagactggcttctgggattagaaacagaagggctctgtggccttttttagtttagttttttcttttttcttaaatttaaatatacttctattgtgtgaaggagagaaaaaaatatattttttccccttgcctatcttagtttttccagctggggccttttaaattagaccaccaaaagagagattaacaggagaaaagcatagaatttttatttagtaatttttacatgtacgtgggagccttcaccaggaaaataaagacccagggaagttgtaagggttgaaagcttatatattatgttggacaaagagtagtaaattggtaaattgtaaagatatgacagggaaaaggagttggggctattttgagagcttctagctaatgggattccagtaccaggttggctagcaaccctgtcctgatgggaaatgcagggtagctggacatgaatgtctacagtgtccctttcctggggtacttctttagcctggaggatggttttatgcctagttagcccacctggaacctggggactccctcacatggggaacttgtttatcttatttatctggcagccactgttgtggctcttgtctgacccatgtccagcttacacctgcctgaccatcgccctggcgccgggagcctgacttgatattccccccaggatccctgggaaagcatggcctgaggcagctgcagccactggttcttcagatgaaaagtggaaactcaatacatcaccaggtaggaaatgagttcagagatttttacttacagatcttggacaggaagggcggaatgggctgggagggcagtcctccatctccgggttgcatgaggcaggaatggagtcaggcagagagagaaaatgcatgtgggaattggcagtatatataaggggtagggtgtggggtcactttgagttcctgggcaaaggcctaaatggtgcttttaagggaagcttcgataaagtggggaaccctgtctgctagataggagagatgcctttaaattcttatctctggctgctggcctgagccatttgggtgtggtgtggaactagaactatcaagggtgactgagccctgctttgggtatgaaaaagttgaatctattcaaaatggatgctgaggcaacatgaaagtataagaattcacttcaggactaggacagttaattgtggaaaagtagcaagataaggactagtataacaaggtttgtacagctttccctcagcctcagctccccatctctggtgataagaatgaatgtctttcgtcctcctggtataaggagggcacctttttcatgggagttaatctcatgctttcaagaagaacaaggaaggtcacagtgcccttcttgcatgtgctgttttttttaagtgcctttaactcaatccatatgccgaagtagcatatttttgggtgcttaccatgtgccaaacatggtcttatatgctttttaagtattaactttaatcctgtgaactgtttgaggcagatacagttactattcccattttacagatgatgaaactaaagaacagagaggttgagtactttgcccaaggttgcagagtgagcatgtggcagagctgggaccccagcccatgcagcctgattcccagagctctgaaccattgtactgcactgcctctggatagctttgtgatattttttgggctaccaaattgtgtgtttatagaaggatcaaacatatattaatctttatattcaccggaatatgacttagccgtcaagacagcctgacaaaccggcaaaatatgtctttgtaacattactcttgtgctttgaagaggaatttttgaccaaagatgctccctgctatcgtgtgttaaatgctgtgagttaccagagatcaattgttcctaacgtaaaaaggaagtgctaatctagtcactggctggctcagtattggtttcatactgtaagatagaactaaaataacagcctcgaagggtaaaaatagtggagtcacatgaagcatcaaccgtcattttaaaaacagaattgtaagacccatgaggaaaggttaatttctttttctgtttgaaaagagtggatgttggtagacactggtcgtttctattacggcctcctgtaattttagaaaaccgatatttgtcatgacctgaggaaacatctcattcatggcttttataagacatagtcaaattcagcatcaactctcagaagatctttcttggagtctagaaggtaggtgtgaggatcgtttcttaatcaaaactagtggctctcgcttttaggtttcctaagggctagtatgcttttcaaaaataatattagtagctaaattgatcaagcacttaaactgtttgtcagcgttcttccaaaagctttacatgaattgactcttcgaattcttactgcaatcatatgaagttctggtgctattattcatcccatttaatagctaatgaagtgtaggcacagagaggttaagtaacttgttcaaggagatacagtgagtaagtagcagagctgagattcaaactcagacagttgggcttcagactttttgcttttaagcagtaagctctattatagaggcctgctggttcttagcccagggagatctaagacgtgtaaaccagaatgcctgcccacactgagtagggatcttccccactcagtctactaacttgcatgccagtctcctctggaaacaccatcacagacacaatcagaaggaaagctttaccagctctctaggcagtccttcttccagtcaagttgatacctaaagttaaccatcacaccttccaagactggttgctgcataggtgctataatgtggtatctctgtaccaccagaagggaggtgaggcgggggtaaggaagagaaaagcagacagataaagcttctgttgcaggtgctggtgggcactcagtgagtggcgtggctattggacagtggggattctgtattttgcactgtgggggcatctctcagaatggccagatattctgcaacagggatgaatgagagttagtttcactagagcaattgagagttagttgcattagcaagagcaaactaagagggaacaaatagtttaattatggctcctagctgtgatagccagcaaagagtacaacattgcagcctagatttctgtatcttactcatttgcccttgatcaatttgtttaactcagtgccccatttacccaacagtaaattgcagatgctaaatgactcattactttggcagagtcactggttctgtaattaattatggagcactttaagattgatgaatgcaaggagctgtgcacacacgacctgtacgagcagttgtataaacatcgggattgttgttgtttctaaggcttgcttcctgttctgagcccagtgtgcactttaccacaaaggacagcaaaagctttattagtagcaattaagaaatgtgccatctctgcttttactggtttatgatgggctctttttctattctcaaaaaaaaagtttgtaagtagattcagttacaactttgatcaggctttaaaaaatatttgagaagtgttttttaaccttttatcatagaatatttacaacttactgaacagtagacagaatagtacagtgaaccccgtgtacccattacccaaccaagtaaccctagtcacacttcctcccacctcattatctataacaaatcccttctactcccattgtcttgcagaaaccacatcatttcttctacagatggttcagtattcatctgcagaagtcagggagcccccagcttaagcagaatcttagtgccatcaccacactcttaaatatcaacagaacttccttaatatcatcaagcactcagtcagtggaagaaattgttttaaaaataattttatctacagaatgttcacagttgatgggttgtattacaaaagtttgctgtaagttggttatttgcaacaccagttgaatgaatattcctgtagaaactgtagtaaaagcagtgattggcccgcattaaacccacaaaaacccatggaatacataatgaagcaattctgtgtatttctctttgagtattttactgaggggagagttgatgggcaattcaccgtctgctactagagacctggctccaaaatacattttctctttcttgtgggtgttattatggtgattccttctccctgtgcccacttcctcactccccccaactctcatcatctactcatcaaacttcccattagagaagcgagaggaagaaactttacctggtatggctgactgtattcattgaaaacaaggagggaatgtttctcttttagggggtagcaaagggtataggaaagctgccattatatgcagtttagtattttaaagacgtctagaaaacaaactgcaatgtgatctctttaacattgaagagaactagagagatatatagggctaagtagcagctgatttaaagaccaggttaatgttctgctttcgcagttccctagcaaagctcagttcagttttaagtaatttatatttccagtccataattgtgtgcatgcctctgtgccctccactaacatcagataagcagggagtggggctcttctttgtagaagaactggctagatataggcagggtagaggcaaagtttccaagaggctgtgagcctttcgatgcacctttccagaaatccagctccaggggaaggctttaggagaattgccacagggtttcccaccctcagggctgtcattgctctgggttatcacttcatcaatccattggtcatggttgggataccaggaggtggggtgggaatggtgttcccccttgggctgcagtggtaggttttgttccacagatttggccattgcgtatttggattacttgctgcccctgccacccaccatctatcccagaaattgcattttctgtcttgccctatttgccatctgtaactctcacccaccagaaacttacaaagcttatctctcccaagttcctcttgataagaaatcatgtttatgtgattctagttatttccactttcataaagatataaagtatcattaaaaaaaaaaccctaacacatgaagtgcttactggacagcctcagaacacacacgcagtcctactagagaaacaaagtgctactagtcagtattaaccatagaaacctaagaactgaaacctaggctaaagggccttccttcttttttgttgctaagaaaaataaaacaaaacaaaaacaaacaaaaaaacaggccaaaagatgctcactaacatatccaatgataaccatctctcccttgacagtagttacgtttatctctgaagattgtaatgggacagttactctgtcacttgggtattactatgtgcagcagtacactttgatggaatagagaggagaggaagcagagtctgggattatttccaggaagcaggtcctggagattcctggcttgcctgtgcccacctggtgtggtataggtctgagagaactgcagcagaagaaagaaaaaagatagaagataaaaaatatgagcaaaaactcttctcgaaaacggcgtagttaagaaaaagtggtggtgctggttatgctcttcaggaggctgaggtgggaggatcgcttgatcccaggagttcagtctgggcaatgtagcaagaaccctatctcttaaaaaaaaaaaaaatcagaaaaaaaggaaaagaaaaagtggtggctacaactggatattgtgaaattagacctgagaaaagtctaactgctcagcaattccacttagttgagtcctctcctatttatttattcattcattcattgacttattcaacaaagttattgggcacctgctaggtgccaggttgccaggtgccaggctctgctgcaggtgctggagagggagtagctgtgcctttgctgagcttccagttggtgacctttattagacctgccttgaagaaggggtgataaagagaaggctaggaccaagcagcagccttggtaggaggtgttgaatttattttatttattactcattttcatttaagactgagtgaatcaaatggatgggtgagttctttctaagttggaataaatactagggcagagccttcatttaaatgagagctgatcaattacctacttctggcccattataaaccagagttattttgcttaatctttctactcatttttttttcttttaccattgttgttattgcagttttaagcttatgatttagaacattaaattattaccaaagaattttatagtttccaagtatccccagacttcagggtttccgagagcaggggccatatttttttcagcattatacaggtatgctccaatgactgcacgtatttaaattgcattatttgatgagttttcacattaggtatacatccatgaaaccgtcactacaacaactgaaacactgagtatgcccataacccctaaaagttttctcatgccactttatcttcatacctccctcttcatgcccaccatccctaggtaatcgctgatctaatttttgacatgatagattagtttgcatgttctagaattctagaataaacaaacttatatagcaggtactcttttttagactagcttctatcacccagcatattattttgacatatattaatttggttataacaatattgcatttctattactgtgaagtactccattgtatggctataccacaatttgtttcccctgttgatggatgtttgggttgtttccagttttgggctattataaataaagccactatgaaagtttttgtgttagtctttgtgtggacatatgcttccatgccttttgtgcttagtgcattatctagcatgtagtatatactgagcaaatattgtcctgagtggttgttagacttcacctgcatatcttttatggtcttagtctgtcacccaggctggagtgcagtagtgccatcatagctcactgcagccttgaactgagttcaagcaatcctcctgcctcaacctcccgagtagctgggactgcaggtgcacaccaccacacctgggtaatttttaaattttttttgtagaaacagagtcttgctatgttgcccaaggtggtcaacatagcaagtgttatgttgctgggattacaggcatgagccactgtgccctgcattgcctacatttccatggtaattgataaataagaccaaattacttttaaaaatagttatttaaaatattattctgttttaagagaaagaatggttctgctattatcctatttccctagtttgttctgtgatattttatgcattatagtcaaacttaactgtctactcctatatttattgagttcctggaatatttactgaattcatccttaaggagaaagtgaaaaactattggtatgttacctaatgaaacaatgtaaatgccagtgaaatatttaaaagatctgtattaaatatttttttattgaactgtataagaaaattagagagtatataatattaaaagttaaggctgtttatatgggaaaaaagtttaaaggctgaaaaattgtataaatcttatatttaaaggcaaaaacaaaccaaataactgacagtaagtgattgtgagggtccagataaattatgctatgtgcctgtgagcatctcacaattaatcctgaaaataatctaggagataggttatgttaatctaataattttaagatccccatttacagataaggaaatagagactagaagaggttatttaatttgcatggggccacagagctggcatttaagcacagcttgctggtcactgaagcctgggtgctcaatcattatgtcatattgactctgctgtgttaaaacattgagacaatactgaaaatattgtggcatgttcaataaattttttaaaaagtcccctagcagcatagtcaattgctgtgtatattattcacatacatgtctctgaaagtcagtcaactttacaagttcttcatcagttttaaactttcctaataacttctgattttatatttagggtaacatttttgtagttttcccatcatttacatttgccagcctgtttctagtcacttcttattagtctcaggagacagcaatatccagtcttttttcctttaacaatcaaatcaccattgtctcttgcacttgaggctctttggcactctggatccagttgtgatccacagataatgctctatgattatctttctatttcttgcctcaaattttaaataactttgggaactttgattcgtcttgctagggcgtcaaaatgctgtccatgacttatttcctacctcgattataaatgctttgtaggtaggaaatctatcccatatttctttggttcttgctaaagaggtttctgacatcacattggtctgaaatcctggagtcagagaaatttgcctctcagtaaaattccaagtgaacctgggaagatcattttagcagacacatggagagtaagagggttttgctaatgtgtaatgataaattgaaatttgttgtagagagtgcctctgtgggcttctgtttctttagaaattggctccatgaaggcttaaactttaggtgtggcagttagtagagttaatttaggtttttaaatgggaaaattcatagttataatctgataaatactcacctggcatttcagacagtattgaacaagtctccagtcagcatacatactcactagaattgcaggaaaagtacttaagacaaatgaagtatttacatgttattgctttcaaatctaaatattaatgtttgtggtggtagttagcaccctacttcccatgatgcttagctccgagtgctaaacagatggtagatatttcatatactagatatggccagggactgttgtccctcacagatctgcaaagtgggagtcctttctgttgctgtcacctagtgtcagtttcccacaggtgtttttgctcttgctatttttggagaggtaacatggtatagtggtcattggaaggcttaaacaagttgatatgcgtaaaccataggacagcaccaggcacacagtgctattataaatcttacctattattctttattatttgaatatgggttaaatcagatactatgatttagtatatttccattcaccacatggaatctgatcattttgcatctttgctgccagattcagatcccaaatgccaacactgagtttcacgtaaattcttatttcctagtgagacatttccccatgcaccattctaggctgaaaatgtgtccaggtgggagatctatctccagaagccaaatgttgccataaaaatccattgtctatttctgcattttctgtatcttttcagtaaaatgtattgaaacctcgggggtgggaataagtaggcattttggatttgtctggaaatgcttacgtctcaggagaggtggctgagagttagtgtgtgtaacctttatggggttttacctgaacatatccctgtagattgaatcttgttatgtgtaagtcagtgttctcagggtgctcttcacacatgtgttgggagcgtgttaggcaggcctggtggtcaaggaatacaggtacaaaataacaaatgtcaaggaatgttagaattcaaaataaagagataatttcagccagtgttgcccaaacttcagccgttacatatactacttagatgaatttgccatatatgtgccatctgtaaagcactatttatctaatgttttcctttaaataatttaatgtttttttccttagacacaattatttgaaaaggaaactgtatcagtcagtaaatgaaaaaccatgaataaaaggtaatcataaaactatatacagtaattacaaatgtttatccaagttccacctaaaaccacctcagcttgagatatttaactgatctttttcctggcaattcatgcgtgtgtgcgcgcatatgcatgggcgcgcacacacacacacacatgcacacacacaccttgttatattgctgtgtactttccatcaagcatcatcataagaaaacattttctttaaagttttagtactattaaaaagaattccttttagtcctgcatgtattgacctgagatgtctatggtatataaaagtgaaaaaaatgcaacacactcccaaatataaatgaaagtacttgtataagtatgtgaatgcacacatacgcgtgcatgtttatgtctgtgtatatgtatgtatagcatacatacatacatatgcttgtatgagtattctaaatactcatacagtgtagagagaacacttgaattgttaaattacttttgagaggtattggaatgactgggaagaaggtttgcttcttcttgttggcagtgagcatggaaaaaattaaataatgaagattataaaggaaaaaaccctcagaaaccaccagagcactctttgggaaacactgatttagttcagcatgtctctttatcaataaaaaatctgaggcattgagtagctgaggtgtggagtactcttaatctagaatatattctttaagatagctaactgctatagcttacaataccctgaaactcctgccttaccacaatagaaagtttctttcttccttacattatatataactgccttctacatggtgtttcagggacccagacctcttccatttaatggcttcattgtttttcagtccccacaatctttcagtggatcttttgagtccagtagggcgacaaggaaggggatggaacaggaaggatagtgtgaaaggttttagaggatgggaagtaatgttatgtcacttctttccatgccccccttggctagaactcagtcttatggcctcacttaagtgcatggcagataaggaagtgcaatctagctgagccaactccccagaaaggggaggaaaaatgtggcaatcagagatcgctagcatagtccttgctccaagggaatttgtaatctttggattgaatttattaattttggcattccttgaattcagaagtctattacatgaaacttaggcagtaagagatctgtatacatttatttttacacaatgtattgtaattcctactaatgttaagaattaaaccatttaaatcacttttagacttaattcaaaacacataggttagtaagttttgctttcaaccgtaataaaacacatctggtgataggttttagctctggggccacaaaggagagttgtgaagagggttgccaggaggtatggaaaagtcttaagtggtcataagatcacttagggggagaaaacaacacttgaattttaaatacagtgaaaatatgtcttcagaaactataattgcctacatcaacacgatcttatatgaagattctgtgattttggaaatgaaatttttgccttcatatttctttttttttttttttttagtatttattgatcattcttgggtgtttctcagagagggggatttggcagggtaataggacaatagtggagggaaggtcagcagataaacatgtgaacaagggtctctggttttcctagacagaggaccctgcggccttccgcaatgtttgtgtccctgggtacttgagattagggagtggtgatgactcttaacgagcatgctgccttcaagcatctgtttaacaaagcacatcttgcaccgcccttaatccatttaaccctgagtggacacagcacatgtttcagagagcaccgggttgggggtaaggttatagattaacagcatcccaaggcagaagaatttttcttagtacagaacaaaatggagtctcccaggtctacttctttctacacagacacagtaacaatctgatctctctttcttttccccacatttcccccttttctattcgacaaaaacgccattgtcatcatggcccgttctcaatgagctgttgggtacacctcccagacggggtggcggccacgcagaggggctcctcacttcccagacggggcggccgggcagaggcgccccccacctcccagacggggcagtggctgggcggaggcgccccccaacctccctcccagatggggcggctggcagggcgggggctgaccccccacctccctcccggacggggcggctgaccgggcgggggctgccccccacctcctggacggggcggctgccgggcggaggggctcctcacttcgcagacggggaggctgccaggcgcaggggctcctcacttcccagacggggcggctgctgggcagaggggctcctcacttctcagacggggcggccgggcggagacgctcctcacctcccagacagggtggcggtccggcagagacactcctcagttcccagacggggtcggccaggcagaggcgctcctcacatcccagacggggcggcggggcagaggcgctccccacatctcagacgatgggcggccaggcagagacactcctcacttcctagacgggatggcggccgggaagaggcgctcctcacttcccagactgggcggctggtcagaggggctcctcacatcccagacgatgggtggccaggcagagacgctcctcacttcccagacggggtggcggccaggcagaggctgcaatctcggcactttgggaggccaaggcaggcggctgggaggtggaggttgtaacgagccgagatcacgccactgcactccagcctgggcaacgttgagcacctagtgagcgagactccgtctgcaatcccggcacctcgggaggccgaggcaggcagatcactcacggtcaggagctggagaccagcccggccaacatggcgaaaccctgtctccaccaaaaaatgcaaaaaccagtcaggtgtggcggcgcgcgcctgcaatcccaggcactccgcaggctgaggcaggagaatcaggcagggaggttgcagtgagccgagatggcggcagtacagtccagcctcggctttcacaactttggtggcatcagagggagaccggtgagagggagagggagacgggagagggagagggagagggagatgggagagggggagggggagggagatgggagagggggagggggagggagagggagagccttcatatttcttatagagattttcctcttcctgtttatattctggatattactttaaaaactataatctttaaaattatgccatgcttatgtatatattatgccatgcttatatatatattactggtttcttaatatgtttctttttctccttagtgtaaaaacactttataaaatataaatcacccatataagttactattataagctagtttaaagggaggaaaaaataatgagataccaagtaatggaatgccaagtttttgttagaattttgtccttggtaaagaggcagcagtttctcatagaatcatcaaattggaagtgcctctaaattctattcatttgacttctcttagaaagctctatgtaaaaaattattcccagtattcacaagaaaaatgtcaaatccatcctttttttcgtttctcttaattaatgtgttctgctgtacttaagacccattcttctaaatctgttctgagtggaaagggaaaagactacatgtatgaatagaataggccttttagggtcatttggtgtttttagtagaatatgtcattcattttcttttctgttaaacagttgactggaactctttagtctttcactattgactcacccgaactttcattgtaaatatgatcatttgtctctgtaaccctagaagatgttgggtttttgtacattccataagggcaacggattgtgtgtgtgtgtgttttcaagtctctattatggtactttgatatctgtgctttgcagatggtaaaaggacacagcagtcaatatttaatgaacatggctgaaggactaaaccaagttcacaaactaaatacaaattgtcgtgagggaatgcaatgaatgttagccacaggtttagtgctatgcatgtgttgaagaccgcaagttctaaattttgtcttcttaatttgatgaaatattttatccctcaataatatttaatgtgtgtgtgtgtgtgtgtgtgtgtgtgtgtgtgtgtattttttttgtctgcctggtcctttgttgctaaacatgccatttcagcagtctgctttgggtttgtgtttgagatctgttttaattgttgtggcctgttgagaaagaacacagacagactgaacacaaaacaattcagtggtgcaaaatgaggcctaatgataggatagcaatatatgtacaaacagaggttctttataattgaattgagaaaagaggtgggagagggtgtcatgtggcacacagtaatataagcatgtggatggcaagagaactacttacggagagattcaattccagccaacaccccatctgtcacatccaagtaatgttaatttcactttatttgctgtatagttttgtttgtatttaatttgtgaactttctttgattttatagttgtatacaagctataagtttaagaaatttctactgaatttatgtttgcacatagttaaatgataccaagttacttaggtataggtggcacttacaaattcaggattggaattaaagttcaaatcctggattattgtgtgactttgggcaagttaattatactctctatgtattgatttctccatctgcaaaatgggggtgacagtaattctcatgttataatgctgtgaggattcactgagattatccacattaagaggctaatgtattgctggtttatagtaagtgttctataattgttagctatggacatgataatattcttttttttaataataaaagtccataactattcaagctttacagacctggagtcaggtaaaagcattactgtttttgagggattttagttcaattctggctcagcctctacaatccttagccagtctcatagcctctcagtgctcagtttcctgcaacttcctagggttactgtgaaaactgacagtatatgctactatttggggagtgagtttgtattaatcagggttctctagagaaacagaaccaataggatacatatagatgtatatgaggagatttattatggaaatgggctcacgcaatagattatggaggctgagaagtcccacaatctgccatctgcaatgtggagacacagaaaagctaattgtgtaattcagaccaagtccaaaggcctgagaaccaggagtaggggaggaggctgctggtggaagccttggagtctggagagccaggagcaccaaagtctgagagcaggagaagatggacatcccagctttaagaaaagagttcgctttccctttgcctttgtttgttctatttgccccctcatcggattggatgatgcccatctgcgatggcagaggtggatcttctttactcactcagctgattgaaatgctaatctcttccaggaacaccttcacagacacctggaaataacgttttaccagccgtctgagtatcccttagcctactcaagttgacacatgaaattaaccatcacagagttccatgtgtcagacactgttaagcacctatgaacattatctttaatcctgctgatagcttggcaaagagagcagcattgtcctatttctacggagaaaggaactgaagcacagagagaaaactgggattgccctaggtcgtatggcttataagtggcaaagcagaggctagaagtcaggatctgcttgtctccaaagctcatgctccttctctgaggtcctcttgcaatgcagacatgattcacccaggagatttcctctgccacaagaccctgggaacagccacatcaggaataaaatttgtgatgtgggaaagggacgaatcatttggaatattggagggacaccctggcaagcctttccctgtgtgtggtggggactctggatgccttgggaaaaggacaagagggtgtcctgagataaatgacttctcagatcacctgagaccagcctggttatttgtatacatttttttctcacttaatttctttagattaggatggatatttgtattattaaaatacagagtattctggaaattaaaggaaaacagtgtaccttgtaagtcttgctgggggacagaatctcatccatctaactccgagttctgccattcagttgatgtgtagtttaaagcaagttatatttcatcttaatgcctcattttcccatatacgctggtttacaatatataaaatggtcattgcttacttccattttcaagctttgcaaagtgtgcaagagaggacacacacacacacacacacacacacacacagagtattgcccatggtcctttgcatactgggtcagcacactgttgaattagtatccactaagtgtcaggtggtcttcttagctcggcagattcatagaggattcaaaggtgagtcagggaaagtctcagctttatcatgattttcagtctagtaagcagggcaaaggctatagaatagaaaggaaatataacacaaaaaaaagtaatgaccttggatatttccccttgggccacaatttttttttttttttgagatggagtctcgctctgtcacctaggctggagggcagtggtgcgatcttggctcactgcaacctccacctcctgagttcaagagattctcatgcctcagcctccagagtagctgggattacaggtatttgccaccaagcctgggtaatttttttgtatctttagtagagatggggttttcccatgttgggcaggctggtctcaaacttctgacctcaagtgatctgcctgccttggcctcctaaagtgctgggattacaggcatgagcaactccacccagatgggccacaatattaacaatagcatatagcatatgccatgaatcatgaagtattttcttactgaagaaattctaaagaatagtctaaatggaggagaaactgtgagttccttctacggtaactgctcagaaatcatttcctaaagcttttattcctaaagggccccactgtggaaaagctttaaaaagctggcatgtcaggagttaaagtgggctcggggagaaagtgcatgggatagcatgcctcactcagtaactctctgttccctatggtgaatcctttatcccttccaattcttttctttttcttttttctttttttttttttttgagacagagtctcactctgttgcccaggctggaatgcagtggcactatctcggctcactgcaacctctgcctcccaggttcaagctattctcctgcctcagcctcccaggtagctgggactacaggtgcgcaccaccatgtctggctaatttttgtatttttagtagagatggggtttcaccatgttggccaggctggtcttgaactcctgacctcatgatacaccctccttggcctctcaaagtgctgggattacaggagtgaaccacggtgcccagcccttccaatcctttttttccgcagccctgcctaacctcccagggttaccttcagatgtggctagaataagctgccactatatatactgtatatgtgttgtgaaaagcagaattgtctttataaagatggcgctaagcatttctgcagcagaattgtctttatctataaagacagtgctaagcatttctgagttctggacccatattttaactttcacctggttgttcaattgtcactcaaacatttcccagccctgcctcctcgcacctgattgtccttctgtgttccttctcatgattcatggtgtccgtgtttcctggtcactcaaactcaaaatccgttagcccccctcagtccttctctactcttaatccccatatctaagtggtcacaaagttttgtgaactctgccttctaaattatctggtgtctttgcttttcttactttactgccactgacttggttcagaacttcatctctcacctgaactattacggcagttgcccagccagcctccctgtcaacactcactcttcacctgccgttaatcattatatttttaaaaacacaccgcagtactgcactcctgattctccatgtaaaactgctcagaataaatccaaacttgtaaggctggtgcagaagcatcttcctaatgtggcctcagacagcctctttggtgtcattccctacaagcctcctaaagcaccctgagcttcaaccacagtgaatttctttctgttccctaaatactcagcactttgttgttttgcagcctgaaactctctccattatctctgtaggaaaactcatacttatcctttaaaaataaaatcaaaatatcacttccttcctgaatcttccccatcttcttgtggccccatcactgccccactctgtaggataccacaagagaacattgcttgatcattactagactgtgaatcatccctcttccccttccacccatcatattgtgaaatcctcttgaagagaccctcaaccctcctttcataactttgaaactccagcactcagcatggtgcttgttgcccagttgggttggtgtcccatagtatttgctggcagaataaataaaagaatgagtgatcaacttacatgtgaacctgtatctgctagtttcataacaagatatttggagaaagtcagtccaaatattgttaggttggtgcaaaagtaattgcagcttttgccattgcttttaatggcaaaaattacaattacttttgcaccagcctaaccgtacaggatattaggagattatatatcacagagtatgaatttaggggacataagtaaaatcaagtcatcccaaattttcttatatctatttatccacatctgacagctgcttttagaagccaggccaggtggtacatggagatatgggtgttttgaaagcagaccatggcctgctgctcctagagctagacagttatttactaaatacatgcagatgggccagacattcttctaagcactttgcaaatattaactcatttaattctcataacaaacctaggaaatagatactattattattcccattttacagatgaggaaactgaggtcaggtggaatgtgttttttctttgcatctactgttcatttcactgagatttctcttcctgccattcctcttctgaaatgtaagccattgttctctgtgctctcttagcatcttttttatatgtagtgctcacgcctgtaatcccagcactttgggaggccgaggtgggtggattacctgaggtcaggagtttgagaccagcccggccaacctgatgaaaccctgtctctactaaaaatacaaaatttagctgggcgtggtggcacacgcctggaatcccagctacttggggggctaaggcaggataattgcttgaaaccaggaggcagaggttgcagtgagccatgattgcaccactgcactccactccagcctgggtgacacagcaagactctgtcttgaaaaaaaaaaaaaaaaaaaaaaaatatatatatatatatatatatatatatatatatatatactacccacgtcattacatgatagttgctatgtcagtctgttccacaagtaaacttgggcacattacttaattttagtttctttgtcagtaaaatgggtgtagtaatccttaccttgcagagcagctgtgaggattaaaagcacctggcccaattctgcggctacaagctcaggaaatgagcttgtcctattgtctttttgtcattcttcacacagttgttgacacatgacaggtgttgtcctgtgagaaactgaagggaagggagaaaaggaaaaccaggacaacccaaagtcagggccactaagggcgcagaagagtgtcagcacttgcaaatctcagaaggtggcttacaattcagagaagaccgtttggtttgatcatcagtaatgttttcgataacagccttagcaggctatgaggtgggaggcagatgcaagtggttaaggagggagtgggtggtaaagaaatgaaaactgagggtgcactgtcttctcttttaggaacagaggagaagggttagagtagcagcaggtgaaaagcatgcttcccggtttggataggagagccctgaatgcgtctgtaggcagggtgggagaagcccttagcagagaatgaccagagaggatgtccttccttctccctgctctggtggaaaggctgcttagaaccccttttgtccatggtgggacttggctccatgagtcctcttactgctttgcatctcgggcatctctcacagtctagctggctttgggtaatgtacccaaaatgtaccctttcagctcagggcctgggtaatgtacataacttgtctcagctgcagtttcctcatctgtaaaatgaggagaataatgtgtacctcacagggatattgtgagcacagaatgagataacatgtgttcagtgccaacgatagtgtctcaaccattgtgtctttttaacttttctcttagagacagggtaaaagaaaagcaaaaagggtaaaatcttagcattttcttgaactgcagaaggaagaatttggggatgtgcccctggataactgctgtctcctctgtaaagcagagagggagtgagtccaccgaggcaaagggaatgggaagtttgtagttttgagggcactggtagtttgaggccgctgggttctcttcactacacaagggctgatgagcagcagcgaaagcctggctgggcatagagatggcagttaggattgtgtgtgtgaccttccatagccaggcatgaagggaatagggaaaggtgtggacggaactggggactgacaaaactgttgtattagtccattctcacactgctataaagacataccaaagactgggcaatttataaagaaaagaggtttaattgactcagttctgaatgactcgggaggcctcaggaaacttacaatcatggcaaaaaggaaagaggcacatcttacatggcggcaggcaagagagagagagcgagcagaaatgagtaaaagggaaagagccccttataaaaccatcagatctcctgagaactcactcactgtcacaagaacagcatgtgggaaactgcggccatgatccaatcacctcccactaggtcctgccctcaacacatggggattgtagggattacaatgctgagatgagatttgggtggggacacagagccggaccatatcaagtgtcaagggggtgtggggttctagtgtgtgcatatgttgggggatataaatatgcactggggagatgacagccagtcctttagtcagatgggaggtgctgatggcccaggtgaatgaggcaggtgtggaagtcctgtggtgacaatgaggatgcagagcaggttcctgggagtggggtggggaccccaaagcttgtggctagagctggggtttcagaacattagataaaagaattttcagagactaaggccaagggatggctggcatctcaaatacgatgttcttaatttctctactttttcttctattctttgtcatatgaatacctaccaatgaagaaaaagtaaccttagtctttatgcaacttttgtgtggaattcatctgttaatattattcagcaaatattttttatttctacattgtgtttgtaataatttttagtggctgcattatattatctttgcacatactgctttgtcttcttttagatttttccctaggataaattcccaagtgtgggataactatgcttaaaggtgtggatgattttggagcagggagtcttgatgggctgttagttaattgctgcaggcagatctacagcaggcagggagggcaggcaaatggggaagaaaattagaatatttaataatagactctgaatggaagctttctgtgaatattttaagtccacctcacataactctcaattctgtgtgctgcctctactggaggcatttaccccagtgaaggggaaaacagagctggctggaagttgcatgtgtgattgagtaaatggaattttgcttggcttggtctttgacgctttctttttggggactatcatcaagaacatgaagaagttgaacaaattgtgtatctggcaggggcaggtagcaatgaaagggagtttttctgttctggagttatgtatttttttgaaatagagtcttactgtgtcacccaggcctgaggtacagtggcccagtctcagctcactacaacctctgcctcctgtgttcaagtgattctcatgcctcagcctcctgagtagctgggattacaggcgcacagcaccacacctggctaatttttgtatttttaatagagatgggggttttgccatgttggccaggctggtctcgaactgctggcctcaagtaatccacccgccttggcctctcaaagtgctgggattacaggtatgagccacggcacctgacccattctggagtttttttgggggggcaggacagaacagtttcatcttgataaattaaaggatttaataattttgattacaataatcacagtgttagtattttgaataattttagcagttagtgggaaacatgatttagataattttaaagaaattgcaatattttgaatcagagcaaaatttccttaacaatattactgttaatttttttatgtcttatgattctaatgtttctcctttttttcttttaacagaagaaatacagaaaggggtttattgatgtttcaaaaatcaagtgtgtggaaatagtgaagaatgatgatggtgtcattccctgtcaaaataagtatccatttcaggtgagctggtgtatttttgtggcagtgcagtgctgggcttagtcatgtttgctctttgacattacagtttcctgtccttgctttgctggctgatttgtaggttcatttgccactttaatagttgtgacttttcttcatgaactgtttaagtctttgtggaaacattttctgattcttaaggagttggggctaagactgaaaagtgaggttgaagtgttccctatgaatctgagaaactgagaagtgaaaggctcaagtggaaatgagattaaaaggctgcttgtgatgaaaaaaataatattagacatatattaattaaactatgcttcttcggggtaatcatgttattttttttcccgacaatggttctgttgcataagggaggtaaatatctcattattctcatttatgtctgaggaaatcagtgctcacctgttaaatagcttctccaaggtcaccttgtaaatgaaaagtctgccaagcacacacacgcgcatctcctctccagaagaggagggtccggcgtcctgagctactccgcattcctgccagtatcttggttcccacctgccttgagaactcaggaatgtggagttggatcctgataatctggagctctcagcccctccccagcacctcaccacttccttccctgctcaaggatgtttttatgctctccttgagcagtgaatgtccctagtgaaagtcgccttttacccatggctgtggtctcaccatgtcctgaaaggaaagttgcaaaagtctttttcaatgtggtggaatttttgcttgtttttaattgctcttatgaagttatcaattacgttggaattatacatttaccagttttgggggatgaagatgtttgggaagcagtgagccaaaatatccaagctcctggcttattctccgctagagtggcaacatcacaaatggaggaagggctacatttaattttccttttccctgttccttattttatagctaccatttctctgagtgaaggacagggacagtaagtgcttagagaggtgactctgaggccaaactgcctgatttgcttactggctatgtgagcttgtgtaagtcacttaacctctctgtgcctgtttcctctcttaaaaaatgggaataataacaataatagtactcatttcatggggttgttgtgaggattaactgatgtgatatataaatagctttgacatataatcagagcaaggtaagtggtagttgctattattactattgctattctcttactactgctgctgctattaatattacacctaatattacacctaccacctggatctagaagtaagataaatttaaaccttcttcttaagtatgtttaatgcatatataatggaaatttagcagagaaccattcctaccacacttctttttttttttttcctttgagatggagtcttcctttgtcacccaggctggagtgcagtggtatgatctcagctcactgagacctccacttcccaggttcaagcgattctcatgcctcagccacccaagtagctgggattataggcatataccaccatgcctggctaatttttgtatttttagtagagacagggtttcaccatgttggccaggctggtctcgaactcctggcctcaagtgatctgcctgcctcagcctcccaaagtactgagattacagtcgtgagccactgcaccgggcctcctaccacagctttgatggctattagacatgctagggattgacagcattggggagctgtggctgtcatgattctggacccagcattaggatttttgctgtccaagaaagagagattcactctgcaagttttgggttgcttttaagaatgataatacaagtagaacagaacgcattccatccctgaactactaaaattgttgagatgaataaatatgagaaaagtttgaaaacaatctgaaaaattaatcaagaagggataagcttgagctttatacaatttaaagcagcatgatttaaaaggtgaaaaataccctctcttattataacttaagtataactaagaaagtatagatcctagtttcacattttcatagtgaaattttacattaggttcagatgcaaagtgaaaacaataaaagtagaagtagacattttcaaaagacactgggagaagaaagtaggacggatggagagaatggtggggaatccacaccagctgcctagatgggatggttgctccttcatgcttttctagatgagtcattctgatggcagctgggagatccccaggagctggcatgtcttccctgggcttcaaacccagatctgtctaccttttgtctgtgctgtttctcctacaccacactattaagtctatggaataaatgaatgagtggatggaagatataaataggagggtgggtaactaccagtgggtagtgttactgagggagagtattccctccttgtttaaatggtttctgcacttgaagtttgcaaagctcttccctcccaacagcctctgctgtggtaggatgactcagcacaagaattaaggcagcgagaaacacagctccctggatccttctccccaagaggccaacattgtgtgatctgaggtttgctcagggagatactggcccacaaatacctcttcagcctgagatgccaaaacagggtgctattcctagaaacttctcgtagaaatacaaatgccccaagttagctaggtaatatatcaagctagttttagttatcgaaactctgaatttggattaggttttttttggtggggggaggcggttagctagtctaacaaactttaaggaagtttcacaggctcacggtactgacacgagatgagttttgtggggaagttagactgcttggagtctggaaaggcagattccaggaggggaatagtcaagggatatttgggggttaaatatcctactcatatgacttaacctcagccactttggttttgtcatttgaaaaaagaggattctaacactaagaaagaactggattgctgtatggatgatatgaggcagtgcatataaagtgcttagcccaattgtggggactcagtaaattattataataaattaaattgttattacaatacaccacaggtttctggaaggtccaaggccctagcagtcttttccagacatctcaatgtcaattcagaatgactagttcacggtgcatagttccttctgtacagagttggttgtgtgggcaagcctgcataaatgtgaaaatcatggagcaaatgaggaaacacatctcttcacatctcctttagcactttatcgctctgatatcatggctcactttctgtcttgtaataaggtatttctatatttgtcttagaaacaggcttcatgtccgattcatttttgtgtcttatgcagttccagcaaggtgcgaatggtatatagcatcatttgttctatggtgttcacattactattacagtgcatttctggctggttaccgtggctctcacacctgtaatcctagcactttggaggctcaggtgggaagatcacttgagccgagggggttccaggttgtagtgagctgtaattccacccctgccatccagcatgggcaacagagcaagaccccatctctaagaaaaaaaaaaaaagtacattcctttgatttaaatgaataagaaggaattctctattgaatatggtcagtgataaccatttatcaatgaaagagctatttggttttcaatccagtgggtgtggacgtgacaaagggaggtttctagccatgtattaactttttagccagtctaaacagatttctgccttgtgactgaccatgaagaataaaatgaaaaaatttctggcttagtttcccagggttatcttattaataatattagaaatgttaaaaataagactgtctaattgcccaccaaggactacctctaagtgaggcactgtgattaagaggctgggctctggagtctgaattctggctttctggattaccagccaaatggcaatgggcaggttaggcagtgcaacatcaggggacagcatctgcagtgcatggtgcatgagtggtatctgctgaagttacacaggagtgggggcctgggtaggcctttattttctcatttataaaatagaaaaactcgtaccttgatggcaggattaattgagttaaggtctgtaaagcacacagcacagtgctggcgtagtcggtgcttaatccagttagctactgcaattattgatagtggcaaaaggaaactataagagtgatgctgaaggagtagtccattcatctaaaatattatttagagaaatactgaatctctgttacagtttagttaattggattgaaagaaatactgagattaatgaagtatcctggcctttatatttttttctataaaacatggtcttttgcaaaacgtgtattctacttaatgtagaaatgaagaagtacttgtgcttttgtaagaaagtaacctgggttttctggatatgaagttattgactttcagttatttgagaatcatttattggtgtctgtagtaccaagggttctgtgctagacagaagtgctgtgtctaagtcctcttcaccaattccatcttttgttttattttaggttgttcatgatgctaacacactttacatttttgcacctagtccacaaagcagggacctgtgggtgaagaagttaaaagaaggtaaaactcaatgaaatattactctgtatataattttaggagatgtaatattgttatcattaagacagaaatacagctaatgtatctattgcatttgtaatctcttaatctacagtaagtgtttctccaaggatatgctgttgttgtaagttataccagcatattgaagataactttcctttttaaaatctgatttttttctagtagcatatagtttctaagaaaagcacgctctcatttaatgtgtaatatatctgaaggtgataaagcgcaagcttttatgataacagaatttggtgttttcttgttttttttttgagacagagtttcactctgtcacccaggctggagtgcagtggtgtgatctcggctcactgcaatctccgcctcctgggttcaagcgattctcctgcctcagcctcctaagtagctaggattacaggcacccaccaccatgcccggctaatttttgtatttttagtagggacagggtttcaccatgttggccaggctggccttgaactcccgacctcaggtgatctgcccacctcggcctcccaaagtgttgggattatagacatgagccgctgcacccggcccaggatttggtattttctaacaaagtgcccatgtagtcaatatttggtgtggatggaatgacatattcatgaagggtttaaatggatgatttgtcctgcatagtcctcattgcttctcctgaagaacaaaatggtggcaggttgacttttgcatttatccatcattggtgtagcagcagtcatttctgctaacaagggtgcttcacacacaaaaaaagaagaggtcaaagagaactatagagcttttctgaatgctgagtcctgtgatctaagggcgttcttatagtaaacatagtgtccaagaaataagtaatgatcgacactgttatttatgaaacattctgtagttgcttttgtatttcactattaattactatatctgtgaattacagaaataaagaacaacaataatattatgattaaatatcatcctaaattctggacagatggaagttatcagtgttgtagacaaactgaaaaattagcacccggatgtgaaaaatacaatctttttgagagcagtaagtattcattttattccataattatattgtgcttagaatgaacgtattattggtatggtaagaaagtgacatggttttgattaagtacagcacactttctagtacagtgaaaatgtagggtaggtgtgttttgtaagaaaaattatatttagttacagtgagaccttctcgtggaatcagaaggtctattttgggaagcttttatcacaatattgaatcttgttcaaaatgaatccattgaaagtgtgagcctaatgtggcactgtcagcagctttgaaaagcattaatgttcttcaacaaataaaccaagatgtggagctagaaacctcatgtagcagtgcatccacagtctgattagggctgttctcattttgatggggtatagcagtatggatttcagtagtggcttcagtctgttagaacagtaacatgtcataatgatactcacatgtaaatgttgagatgaacaatgtctaaggttaattttgacacctaaaacctttataaatcctgggaatgagagacccttagtcataagctaaaaatacgtggagattgttaagttactagtgctgtagtaggacacccatagtaatgattggatataccgtttcctgctggtgccatgcagaatgctcactgggtccatcagaactgacagagcttctggatatgagcagaactactacttggcagggatgctgtattatgaacgaggccagatcagatgaccttctcagtccatctagccctcagttctatgagtcctggcaccctgattctcttgggatatcctcacattaacttagcacattaaagaggaagcccaagtttctaaggctgttattgttccttattttttttttaatgtcttaaggtttggtattagtgaatgcacagtctgacctgctgtaaaaagggacccaaaagttacagtgacttaaactagagagaaatttatttcagtctcatgtaataacccagaggtgaaaggtgggtgacccggggctgggggtattcctgcagtggttcctctggttgctccagctctagcagtctctctcttcctggaagcagaaagaagggggtcaaggatgcccatggggaatccttttagggatgagatctaaaaatggcacaccccatttgtacacagaatcctttgattagaatttggtcccattgccacacctagctgggaaacattctttatcttgggtagccatgtgtcagccaaaactctaggactgtggactgtagaggaatggacagccaaagctgattaatttctcagtgttgtcatgatttcaatgtttgattccatgagcattattgagtgcccagtttatgcagtggtaggaatacaaagaactggcctggcttcaatccctgtggcatttattgtgcgttcagaaaggcagaaatacaaaccagctataatagcagtttttaattctgttctagaatagagatacaagcagcatacaccagagttggtcagagtgtgctgcttgtctatgtgttaacttccacttttccttaaaactacccatatcttatttttatcaattattggtagatagcattttaacctgtttttgttgttggcattttcaggtataagaaaagcactacctccagcaccagaaacaaagaaggtaggtggtctttagcttttgatagttaatctttacattttaagcctttaagtcttaagttttggtagtgtttgtgacttactgagtatgcggtttattcattgatgtgacacaatttttccctaggatcgtctcagaagcagatgtgctgtagcttatttcaattttttgtggtgtcaaataataccaatttaattgtatgagattttatcattggagatcctgttatcatctggcattttgcctctattttcacttaaagagttgtattaagaggagtgggatttagataaatatttcagtcttaagaccacagtgtgacaaagaagtgacttcactgatataatgatatgcctttcaggagtggggtatagtggaggaaacatgcactttggactcattcaagacttgatctgatatgagtgactttgagtgggttaattaaatcattgttaccttagttatgaaacaggaattataatactcttcttcatgagagtttgttggattatagtaagtagacttgaagtttctagtttattctgtggtgatgtatgactcatttagtgttttgattcatgatcagtttcatatagaagactaaactttcaaatgttatcttccttgtctagcgaaggcctcccccaccaattccactagaagaagaagataatagtgaagaaatcgttgtagccatgtatgatttccaagcagcagaaggacatgatctcagattagagagaggccaagagtatctcattttagaaaagaatgatgttcattggtggagagcaagagataaatatgggtaagtattccctctatgtgtgtgacatgcagtgggtaggtgggagtcaagtgttgagtgagaagtagataagtcgtaactatcgtgtaatgagactaatttcaccagccataaatggaagcacaccttattacttggtagtaacacagtcctttcttagtggtcactcagtaaatgcgaattgatcaatcacttcttttcaaaagttagaatacattggtctctttctcatctgatacatgtttaatgtgattattttgaccttgagggaaattaaattttatattttgtccccacctgccataagtaagtaatcttagatttttctaagagtttattgtaatttttttcttagactctctctctctatatatacgtatgtgtatgtgcgtgtgtgtatgcatacacatacacagtataatgaagcctcttctcacttctttctctctctccatgaatatatggaggaataagagaatatatatatatgtatatgtgtgtgtctatatgtgtgtatatgtgtttgtgtatgtatatataaaatacatatatgtacatgcaggaaattaaacagcaagcttttttttgtacaagttaatttaggatttaaagaaaacagtcctttcaaccctatcattgataaatatatgggcagataggggtaactgtaggggatgagtatcttgcaggcttcataagcaaactctgtatcctgtgtttacctctgcagtgcaatcccacttatactctgagttccagtggatgagaagaggagaactttttgtcctgccagagcacactcttcttccacctgccctctcacctcccagccccagccccaatttcaagtcactgttcctcagttcacttctggagaagcagtggaaacctctagtttaggcggggtccttttcttctgcttgattcctaggcatggtgcatatatgagtgctgttttgctgtgcattattaacttatttgcaactcttaaccttttattccatgtttacaggaaggttgtcactgcttctctttatcggatgctgtataagattgatttctatttttaatttttttttgttgtagaaattttcaagcatccaaaaagtatataatagtataatagaatctctttttgcttgacttcaaaaattaccaacattttgccagtctaatccttccatttttttctagaatatttaaaagtaaattcaagtcatcatgttatttcactcctaaatctaaattctaaagacttaaaaaaaacaccaccatgtcattatcattcttaataacagtattttaaataagatcgtctgtagactttcccttaatatttttgtacctggaggaagagtacaaatgagaatccacataacatatatctaagtatttaggagttataaatcaagctagcaaactttatcctccaacttgacaaataccctttcatagtgacaagaaaggcacggtttggatttagagctctgtgccagaatgttgcagtgcatggaaagctggctctgggggggctacctctcttctttcttccctcctgccctggctctatctctcatgtaccatatggatcttccaacctgtacacccacactcttactgcgtggcttgcaaaagctaccccgcatcatggccacaccttcagcctcagtgaaagggaatgcacatggccagccagcacaatttgttttttagaagatggacccagtagaaggcccatgtagaccttggaaatgagcagggagttctggggtcctagttacccagaaaggagcatgggaacacaggtcagagggaacacgcacttttgcagagctctcaaaagtgtggggttagagcaagagcttctctggcccaggtctaaggatggaaccaattatgtaattccagtttccccgattagctctaatacttatttttactgttggtttattcaaatcaggacccacacactgcattttggttaatatatctcttatgtttctcttattctacatttttgatttattgatgaaagcaggtcatttaacactaaaatgagccataatctagatgaaacagattgttttcttgtggtgtcacttaatatgcctgtgtttcttgtatttcttgtgaactggcgagtagagctagaggcttgatcacattagaaggtgatctctggatgtcctacttttagtaatgctaagattgcttagtggttcaggtgtcagacttgttcctctgtcataaagttcttcattggtatttaccctgatgatttgggggttcattaatgattctttcttagagtcattatttcattaggggttacaaaatggtgatttcctaattttgtcattccatctgcatttagtagttctctaaagaagaactgcctcatataccagttcatttagttcatgaaggaaaggaaagatgaaatttggattcttaaacttttactagttttcagaataatgagttgatgactgagctttctctagtgataacaatggtaaccaacagtttatttttagtgttattatggatacttatatatttggttccaatccattgccaccattattctctttgcttgaattggccaaattaggtcgatggtggctgtttttggtagaggatcctgttagtttttctttcctactttctggctcagtgaaatggctcaagttatcttgtatttatttttctggccaaacttacaatttgacatttttcttttcttttctttttctttcttttttttgagatggagtctcgttctgtctcgcaggctggagtgctggagtgcagtggcgtgatctcggctcatttcaacctccgcctcctaggttcaagtgattcttgtgcctcggcctcccaagtagctggaattataggcatgttccaccacgcccagctaatttttgtattttttagtagagatagggtttcgccatgttggccaggcgggtcttgaattcctggcctcaagtgatctgcttgccttggcctcctaaagtgctgggattacaggcgtgagccactgcacctggacacaatttgacatttttctaagggggactggctccttttagtcacaaatggtatttagagacagtggcaatgctaagatcttaactgctgctggattgccgttccttctgggcctttctcagtgcaacagagctacctgtatgcacacatttgtgtgtgtgtgtgtgtattatgagttcttactaatactttaaattcaaatttaagattataaggtttctactcaatttttaaattttatatgtatatctgttttcttatgctgaaaaccttagctcctacttacataagagtgcatcttaaattgtgatgtgtgtgaaagtcatttggggtaaaatcggacattttttgacctcacataggtcttctcagttcacatttattgggttatgacccaagaatttgctgttttaacaggtgccccaaatgatactgaccgaaaggccaggaattatcctttgtgaaactattctataagaactattgaggtattagagtggtgggtatttttaatccaacactttgacttttctcaagtaatggtttctttaacacatatcagcaaaactgtgaattctggagaagtattgtggaatgttggaggagcacaggagctagtcacaagtccagagtttgagttctggccctgttgctggctaactttaggacctttgggaaaaaaaatcctataacctttctaagctttagtttccccaccagaaaataggtacaataatgcctgcctaccgcagaatttttatggagaccaaaagtgaaagtactttgtaaaatgtcaagtgaattacagatactgcattttggggggtcagctagtctttcttataagctttaagcaatgtcatgctttatttcaaaaggcaataatctttctttctttcaataacctcccagtaaagtaagtttacctaaagtatttttcttatttctaggaatgaaggatatatcccaagtaattacgtaacgggaaagaaatcaaacaacttagatcaatatgagtaagtaaatgtttattttgtgaatgtggaaaatcagaaacttttcattttcctaattatgtaaggcattttgaagattaatggatatctttcatgattctttgaagggggtgctaaaatatccttaactcaattgcctgatgtggtaaaagactgagaattaatctctataatatatttttcctgaaggtactgtgtgaatggagttacataggcttatgtacataaattacataagcataattgaattgatttgaaataaatcacagattagctgactttgaaatacagatcatgtccattcattcaggacataagcagaacagtttccagagtggaaatgttaataagaaaaaattactgaaattaattagagttgacctttgtcagcattagtatatttcctttcaatctttttactatttttgaaaagatagaatcatgcttatttcctcatacactttaatattctttgaaaacattttcctagctacattttatttcatttgatcataaatttattaaatatttactgagatcttagcatgtatcaagcattatgtatggccttagagacataaccaggcagatggcacgtggatgtccaataatttatgtaatcatttccttatttgtgtggtttaggttgttttaggtacctttgctatattaaaaaaaaaatgggataacgtcttgtttcttatcttaaactggatctctaaaatctatgtgctgggctacaggctgtacgtgaacattgttagggttcccaacgcatgctgtcaaattgctttccagataacttgtattatttatatacccactagcagtgtgtggccaagttgtaacgtgaggctcatatacattgaacgctcttttatggtcattctgaggtggtgtattgatgcttcattcacttccttgaaaacaatagcaacaacaagctgttcctctcttcatgtcacttgctataccataagtgtaccttaacatctaggaaagggttaacaagttcaaaaagccacagcgctcagtggatgtgatctctcaaagtaattttagaagtagaagagagtataaacaatgtataaataaagtagcatttctgcccttaagtcaaatagatttttggaaaaattataaaatccttagaattagggaaggtgctaaaaggtgaaaacttgggcctggttttaaagcgatagcgtggagaactgattgaatttggggaaagaggatgcttggaagccagataatccttatctaaatatgagaactccttttatgactcatgtgatttcagttgaggtttttcaatattgaagtttatgattcatggcctcgagtgtttcaaatgtaccttaatttggaaattttctctcttccaagaaattttcttcctctgcataactctgtacttcagcctccagcgtgggagtgccactgcattctgttcagaggccagggaatccacatggcctttgtaccatgcccagtagatgaccaaggggaaacctgttcccatgtgggcaggcagagaccctattctgtcttcctactccatgttctgttttgttttgttttggccaaagcccaccctgtaacacaattgtattagtcagggttctctagagggacagaactaataggatagatgtatatataaaagggagtttattaaggagtactgactcacgatcacaagctgaggtcccataataggccgtctgcaagctgaggggaaaggaaggcagtctgagtcccaaagctgaagaacttggagtccaatgttcgagggcaggaagcatccagtacgggagaaggatgtaggccagaagactaaaccagtctagtctttccaagttcttctgcctgcttttattctggttgtgctggcagctgattagattgtgcccatccagattgagggtgggtctgcctttcccagtccactgacccaaatgttaatctcctttggcaacaccgtcatggacacacccaggagcgatactttgcatctttcaatccaatcaagttgacactcaatattaaccatcacaacaacttaaatgttctcaagtattaaaaaaaaaaaaaaaaaaagcctctggcagctgtggagtgaatagttctctttgcttgggcccaggaggaatcccaggccacagactgtcactgggctgaactcaggatttccaggcccgcagctcctagtgttatcagtaacctagttctaacttccatacccagtcaacagtgtagggaggagaagatcggagagatcagtgctggaaaagaaagcagattcgttgtgatggttaataacaggatgttcttggtggaaagatggtaaagggagaaggtgacagaaatgaaagcgcccttaggactggaaaaagcttaggataaaggctttgagtgggtggcatagttagaagggcagaattagagaacaagctaagatgtataactggttggttttatgtttttcctttgttctacctcttgtcttcttttcatgatttattctcacccattctcaccaagaagcttggcaagggtctgacctttccgggttaaaagatgaaatgccctcaaacctcttctttccttattgacactgctattttggggtaactagctaatctgaaaaactaattcacattagggatttaatatctaagaagaatctgacaaatgacctacaaattcagggcctaatttctagatgtatagttccttcatcaaaaggtattagcctctaataaagcttttctgtggcatgctttttttttttaaatccctacttttcaacccgctgcttttgaattaattccttcctcccttcctccctccctctctccctccctccctctgtctctctctctttctctttctctttctttcttcttttcttttctttctttctttttttcttttctttctttctttctttctttctttttttttttctggagacagagtcttactctgtcacccaggctggagtgcagtggtgcaatctcagctcactgcaacctctgcctcccaggttcaagcgattctcctgcctcaacctcctgggtagctgggattacaggtgcccactaccacacccagctcatttttgtatttttagtagagacagggtttcaatatgttggccaggctggtctcaaactcttgacctgaagtgatccactggccttggcctcccaaagtgctggcattacagacgtgagccacctcccctggccaaaggtttttctttcaattgttgggccctctttctcctgtctctggactgctgcgctggcaacatggttgttcccagcattggaattaggcttgggtgtgtgttctacttcaggaccccattgattagcataacagtaggcaaattttaacctcttagaatcagttttctcatctttaaaaggtcaataggaaccattttagcactgcacaggctttgagaccagacctttggttcagtttttggctttgctgtttcccagctgtatgcccttgagatatattttgcttctctgtttctcagttttttcatttgcaaaacagtggtgataatactacttaacctcctaagagttgtgaggatgaaatgaggtaataaatgtaacgtgcttagagcagcacctgactgctgtggcttggatctggagaccttgccaagtctcatgttgaaatttgatccccaattttggagcaggggcctgggggaagatgtttggattatggaggtagagatctcccccatgatgaatggcttggtaccattctcaaggaagtgagttctcacgcttagttcccacaagaactggttgttgaaaagagcctgggcttggcacagtggctcacacctgtaatcccaatactttgggtgctgaggtgggcagattgcttgaggtcagtagaccagcctggccaacatggtgaaaccccatttctactaaaaatacaaaaagttagctgggcgtggtggcgggtgcctgtaatcccagctacttgggaggctgaggcaggagaatcgcttgaacccaggaggggcaggttgccaagattgcgccattacactccagcctggacaacaagtgtgaaaccccatctcaaaaaaaaaaaaaaaaaattagcgtggtggcatgtagttgtagtcccagctacttgggaggctgaggcaggagaaccacttaaacccaggaggtggaggttgcagtgagccgagatcgtgccactgcactccagcctgggcgaaagagcaagactctgtcccaaaaaaataaaaaagaaaagagccaggtgcctctctcttctcttgctttctctgtcttgccatgtaatgtctgcacgccagctcccttcatcttcggacgtgagtggaagcagcctgaggccttttttcagatgctggtgctggcaccatgcttcttgtacagcctgcaggaccatgagccaaatatacctcttctctttataaattagccagcctcaggtattcctttatagaggtgtgtggtatctgtgtcacattttacctgtgtgtatagttattcctgacaggagaattcaggggagcctttgttgtcttttttttttttttcttgcctggagatagataatcacaggagaggagaaagaagccaccaagaactgaactgttagaaaatcccgaccatgagttaattcatttatttatttgtgtatgactccttcctcctttctgtctttcaacagacacttaaaggtctgaattgatatcccaaagaagggaacatcctttccagggaacatcctttccagggaacttgccaacaccataaaaatgatccctcagaacaggattttcaagagccttccttttgtgcagtggattccttctttcctcctccttctgaggagctggaaacagtagatgaggaagggacctccttctttttctgagtatcttatgtttggtttcctcttgagagctacaatttagcttcactgatttcttgtatctgaacccaagatgaaaccacctttgcttactcttattgtgaagatggactggatcttctgtttttaataactttttttcagtctctcaaatcctgctactttataattcataattaaagctccaggtgtgtttccttagttaatttttgtgaatgtttttggcacttgacaaatgtttcttatatcagtggaaaagcgttagggtcagaattctgttctcctaatttactatatttcttaattgcattcagaaatgtattgatcacaactgcaattttgttgaacttggtctcattttataaagcgggatccatgtaatgagatgtttgcaattctgaggcctggttcaacacctccgattccaaataaaatatctaacagtctttagcttggattgaggctgtaatttgcatttggctactatataaaagaatctggacagaaaaagatcttgtattgtcttttttgttctttgtgtttttcccttctttagtcagggaaggcctgtgtttccctgttttagggtttttgctgggccaaaagcaggtgctggttctcttatggaaggctgaagcagtactgggaaatttaaatgtccagaggagctgagctgattttataacatttgaattctcagggtatatgactgtggtggagaattctttgccaacaagtaaggatctaacaaaataagtttaaaaccaaagaccgaagaaaattgtctatgttcttatagcctatttgcttaaatcacatggagggattgattatgctggggaaagtagagagaggcaagtatctctgaggatgaggtggttaatgacagtatcaagaaaagggctttccaaaggataagaagaggtacagggccaggcatggtggctcatgcctgtaatcccaggattttggaaagccaaggtgggcagatcctttgaggccaggagttcgagaccagcctggccaacacagtgaaaccctgtctctactaaaaatacaaaaattagctgggtgtggtggcgcatgcctataattccaactactcaggaggctgaggcaggaaaattgcttgaacctgggaggtggagtttgcagtgagttgagatttcactactgcactttagtctgggtaatggagcaagactctgtctcaaaaaaagaagaagcggtgcagattggcagggccttgggatgtggcacagggtggtggaaagatctggtgggagggaagaccagctgcttggtcatggtagacatttctacaatagagtcttgggcaaccacagggcttggggttctgctggaaaccagtaagtctgaagacccaggaggcctgtgcttatgttttgccgtttcttttgtcacctgggacctttgtgaaattcattgagggagcctccattatgacttgagatgaaatctgctgccatattgataggaggagggcttggaataagatttagtttgaattacagacaataatacaaagggacacttcctgcatgttttagtcagtggagtaaaattcattcttgccatgattctagtagtgaaaaattaaaaatgatttttatgttgaacagtgaagaagagcttaaataaattatgacacatgcatactatcatatgtagacctatattgatttgcaaaaatatcctataatgttatatgaaaaattcaggttatcgtatagcctatgtagtttgatctcactttaatgaaacataagaatatgggcatacatacatgttttcatagaaatatgggtagaaaaagtctggaagtatatacatcaaaattattagttgtctattattgaaattatgagtgatatcttgttcttatttgttatatttattattgatgagcagaattactttattaattctgaaaagaataaaatatatcctaaaaacctgaggcctgaaatgtattgttttttctgttcagatggtattgcagaaatatgaatagaagcaaggcagagcaactcctccgcagtgaagtaagtgtttgtacttgtgggtttggcttaagggcaaattaattttaatgagtccataataagtagttccacatatctctctttctaaatgtgttcagcagtgagcaagtctatgcaaaactattcccagaggctgagggagctgagaggctgaagaaagaggctgacaaattcagtttctagaaataaatatttaatagggacttacaaacagaagtaatcatgggtggcctcaggacagttatccccacacctgccctctggacattattctttatatagcaaacttttagggtgaaacatgtgcagctggacatgtcttcagcctttcttaccaacacacatgaccactggtgaggttagataaacatctttatgaaagcattgtttaaacaccttgctgcagaacaccttgataagtggggatcgagcactggtcatcattgcggtttcacttcaaggttacatcactcttgccatgtaacaggctgttttcctacacgctacaccttgaaactggcccttacaatttcatatacccaaagccttggtaaaataaccagtgtggttattgtagcagtggtgtccccagtatgtcctgttacaaaagaaaacatattcttattgaacttatgcaagtaactgtattgccacaaaataagaatactcacaaatagcttctaaattttgaagaaatcaggtagagagaatagttagtgcttcagtttggctctcaaaagtatactttactcaattgctgtaagttttaaatagttcaaaacacacaaaaacacattttcttgactcttcttcagagtagcagtcttctgcacaggatgttgtccattcaccttggaactgccatccacaaacctagcaactcttggtaggtcagttgagagctgtttattgggcactgtagaatccagcagctactcacacagttccagagtcagtctttgggttagagaagccccctgctcatgagtgtctcctccttgcacccaccagatagtgtgatcctgtatcaactatttccattttatgatggaactcttttagatactgctgtctctattagagtgttcctctgacatcacctgaaacagcatggacatttcaggtgtcaagatcattttatattcttcagtcatagatgtagctatagttagcatccatagcaaggcagtaaatgcccgtctagtagaagttctgtagtccagagtcccagtagttgtcactgggaggtgctaactggcttttgccataagacctactaaacactcaacaaaagactatcaagtagaaaatttgtccctaccagcattccaacttcctctacgctatgagcttgggcagttatactggctcccatttatcatgtccaattaatattgcttgaaaggcagatttacatgccctctgttttacaatagaagaaacattccctagtcagatacaatgttcattcccataaaacatatagataaaggagacacagctactttacataaagcctgttcaaacattccaactttcatagtcttataaacctttatgattttatgttttagtcctaggaacttcttttctctacctccagaacattttaccctctgttgtgcaaaaggctttaggttcccagtagggggttgagccaagggaccctggcccttttgtcagtctttatcttgattaacctgcttcagttttgccctgaaacaattgttggtcagccttatcattataatccctgtcttttagctttttaagtttctgcagactggggatatagcaaactaattttgggctctttaatgttggggactcagcaggggcttcttttagtccacacaaccttcaatagtgttgtattaagacccttgttttaaccccataaatttccattttattcatttgatttttttaataaccatccaaagatttcctccctgctgggacaagttccatgactctttcctttctttttcttcattctctttctacccatttagttttatctatatcattttttcccttcattttgaaacaacctttaaataacctctaaactagaaaaaattactttttcttaagcaaaaaccatatcctatcttttatgtagccttcttcaccaaaaactcatcttcctttctttatacactgtgtatatagaattgtttctcttacatgtggtagttttaattacatacactaactactattgtaattcttagtagtactaatttccagtaaaaaatctaggaagtgattaattttaattaagctcacatgcaagtcaagcaagtgtcaagaaggtcacagaagcagcagttttatgaccttaatcagagacaacctaaacctgtctgaccagtaggtctaggcaaaatgtctgaattaaattctgaagatgtttctattttattttaccaacaatttaaaaactagtttcatttaccaaaagttttcttagatcacatagaaatgtcacacacacataacacatatagacatataggcatacaggcacacaggagcaaaccttacagctttcataaggagttgtcactgccagctttcagatagttttcattttcccttttgttagcacagcataccctgtagcaatttatttttcatcctgaaagtaaaagttgctttatcaagtcccatgaaaacctgagcatagatggtttacctcattcttaattcttagagaagcccctggggctttccactgaccaccacaaggttgtccctcctggtaaatttccttcattaggccaaacctctgtcacagccagaatgatccaggccataaggctacaattcccttgtgtatgccttgcattatgaaggcgttgctgcagggctgggtgggtagtaatgtcactcatttttttctgcttcattcctggctagggaaataccatcacccactgtgtcccgcagttagaccatccaagcagccaggggttccctaggtagttgttgttgttgttgtttttaactcatttgtgctggaggttgcaaattttttgtgtgtgaaaaatcagaccttggtgatgactttgagcagtagaatataaataactcccacagcttagtgttccaataatggaacactaggcataaatgggttaaaggctaatcaagtgacgcagtgggagtagagaaggaaaaaagaaatctgtaactggttgtcatcaattagtagtaaacactactgtgctaggaccacccagtagttggttaaaggtctttgcaatctctgagttctgcagcagtgtattccctggccgggagagtctcctgtagtggctcatcctcattttcctgcaattgttgcactttcactttccttagcatgaggggcaagcttactctaatgctttcttcctgattgatcatttgctcccttgacttttagtacttaagtatttcttttttttttttggcttgaagttagttattttaaaataatttacattgatattacataatgtcttttataaataaagcgttaatagatgtttaattccatttagaaataaatgtgctgaaattgctatacctttaaaaagaaataaaatgaaagggtaaaatgtatagagggaactactctgtgctgagtaaggggacctgggtctacctgtgacttttctagtctactttttgcatctgtaagaaaaggagttagactagaagatgatctctacaattctctgcatttctgatttagtattctatttagttattgtttccagccttttaaactcatgctttctcattttacctcctgcttattatcatgctcaagattttgttgagtgcttgtttttgtagttgatgttaaaaaaacaatagtaggtgactttgcttgacaactacacataaccatgcccacaggattcttccatgactctctggagaccctacagtgagaggcagatgtaggggagtgagtagctaaatggcagcctggggaccaaatcctggctctgctacttactagctgcatgacctggtgcaaattacccagccagtctttctgttctcatttccttacctgtgaaataatgtgggaataacaatagtacctatgtaataggactgtttcgatgattaaataaattaatatgctagaacattagaacagaataaattttcgataaataagtgggttgctgttagactgtatttatttatttatttatttatttatttatttatttatttatgatagtatctctctctgtctcccaggctggagtgcagtggtatgatctcagcttactgcaacctccacctccaggattcaagtgattctcttgcctcagcctcctgagtagctgagattacaggcgcgcaccaccacgcctggctaatttttagtaaagatggggtatttttagtagaggtggggttctgccatgttggccaggctagtcttaaactcacgacctcaactgatctgcctgcctcggcctcccaaggtgctgggattacaggtatgagccgctgtgtccggcctctgttatactttttactgaccagttacaattattatccctaattgttaccagatatttttgtggagccttatttatttaattccattgtttttcctatcaagaagagtacaatttattttatttttcaactaataaaggacacacttttcattttaaagcaatttaaatactagagattgatggtagtgttactggacagagaggtatttgaggttcgtagggtctatttcttgcttttcagtttggaagctgagaaagatttgacctttagtgctttagcattgtttccaactattgattttctctgtttaagttacttgtgcctccatctctccttttgtaaaggctgatatttggctgggtgtgttggctcacgcctgtaatcccagcactttgggagatcaaggcgggtggatcactggaggtcagaagttcgaaaccaagctggccaatgtagtgaaaccccggctctactgaaaatacaaatattagctggacatggtgttgcacacctgtaattccagctactcgggaggctgaggcaggagaactgcttgaacccaggaagtggagattgcagtgagctgagatcgcaccactgcactccagcctgtgcaataatgtgagactctgtctcagaaaaaaaagaccgatatgactgatatttaacttcaacttctagagaattaagaatttttaaattcattcttataaaaagcactgagacatttttaggaaaattcagcatggattgaaaatcatactgagtcaggaatcaaagcttataacaaatacaaaaaatgtatgaaatgaaacccaatcattaagaaatacattttttcatgacagttttcctacatgtccaggccttacaggaattgcaaaatcttgtctctcagttctggaagggcactgagagattatctgattgaaatgtctcaccattcatgaggatttgtgattgtggggaattgagtgtgatttccttaactactctcctagcgcagtaatttgaagtacaaagtcatgtgggtgggagaaaccaaggggccctactggtaagttgtgcttcttcaaagcatttttttctgggaaagaataataatcataaaattataatattaggttctttagtcttctccatggcaatgctattagtaattagagtaaaaaaaattttttctgaacttggattttaggataaagaaggtggttttatggtaagggattccagtcaaccaggcttgtacacagtctccctttataccaagtttggagggtgagtaatcctgccatttttttttataatttagagtttttgtatgaacttcctatgtagtttatatggattcctaattttcataaaaatatgcagcatttcaccattaaaaagaaaacctgaacttgatttctaaagtgtatatactgttttttgtatttatattttcagtaattttccttatagtttttcatatatatttgttgagtatggctataataactttagtaacattcaacaaacatttatagtgaactgtgctggtcactaaggataaaaatatgagcaaaggaggcagagaccctgcccaccagtaggttagtagatgctgcagcccagtaacagagagtgatggtagtaagtgccatgtgggagggtaatgtgtgtgtgtggcgggtttggggatgggggatggtacatacacagcccaggcacatcttgagttagtcatgaacgctctcccaagtgatatccaggctgagacctgataggcgagcaggaaaaacttggagggaggagacggagtgtttctgacccaggaaattgcctggacctagacgggagagagtatatggtgagttcaaggcactgaaaagtatgttgtagctgcaggtagaatgggagcacagagtgaagggaggagagagaagcctcagagttgaagcagaggcaagttcatgtcaatgtcagtgactctgagctttaccctaagagcaacaggagtcatcttgaaagtatttttagcaagagaggactagagaagatctgtgctctagaaaggtccctcaagttgaatatttaaaagtctaatttattcactattggtgatttaagtgttctagacatttgtaagtttatgcaacagcaggaacaaaaagcagtagctgctaatagctattttaagacttccaactgttgttaaatggaattcataaatgttctctttcaaaatctcatgcaaagggccaagtatgttttcagtgagtaatttaaaaactttgacatgctaatatgaaagacaaagctaagaagaacaaggggaaagtaaaatttgtgccaggaatagatgggatcatatggagagacactgtggttgcccttgtagaaaacatcttaagaatgaagttctattatttcaacttggttctgacacattttgatttttgttctagagaaggttcatcgggttttaggcattatcatataaaggaaacaacaacatctccaaagaagtattacctagctgaaaaacatgcttttggctccattcctgagattattgaatatcataagcacaatgcagcaggtaagtgagctgtgaaaacctacttcaaatataaggtagtgattaaaatgatcagatactgtgattaattccttgagcagttttattttatagttagttcattgtagaatgtggttgatttaaaattactgcatattaaaggaatgatatatacaaagaaaatttagaaataatatcaagttttataaaaagctctgtcttgaccttaggacatgagttattccagtggtatatagtaaatgttcacattacatttatacactgttggtggcagtgtaaattagttccgccattgtggaagacagtgtgatgattcctcaaagacctaaagacagaaacaccattcaagccagcaatcccattacttgggtatatacccaaaggaatataaatcattctattataaagacacgtgcatgtgggtgttcattgcagcactattcataatagcaaagacatggaattaacctaaatgtccatcagtgatagacaggataaagaaaatctggtacagatacaccatggaatctatgaagccgtaaaagaagaatgagatcatgtcctttgcagggacatggatggagctggaggccattatccttagctaactaacacaggaacagaaaaccaaatactacatggtctctcttataagtggaagctaaataataggaatacatggacacatagaggggaacaacacacactggcatcttttggagggtagaggttgggaggacagagaggatcaggaaaaacaactaatgggtactaggcttaatacctgggtgatgaaataatctgtacaacagacccccatgacacaagtttacccatataacaatttgcacttgtaaccctgaacttaaaagtttaaaaagttcacatttatgtggtatatatgtccttgacactaaagtccaagatatgtctatttcagaatagtcacagaagatgccagataagccaggattcagtcctatgctataggtttccagagactagagtaatcatgtcccacaagttaaccgtcttgaatctctggtacacttaccaccagagtgggaacaaactgaataccaaaaaataacagaaaccacattcatgaaaattagagttccacaggattatatagaaagatttccagcctttgactttaaaaatgtaactgggcagggatagcccagtgcttcacacaacttatgaaaaattttgaaattttattgaaggcaccctttgcaaagcctattattttgtgactgttcacttttttttcagataataataatggttatttagataaaatttacatactataaagctcacccatttaaagtatacaattcagtggtttttagtatatttacagagttgtgccaactatcagcataatctaatttttttaaagaacattgtcatcatcccaagaagaaatcttgtgtcaaataattgtcatcccatcccccttcaccagcccagccccaggcaactattaacctactttctgtctctcttatagatttgcctattctggacatttcatataaatggaattatacaatatgtggtcttccgtgactaagcttctctgacttaactgtttttgacattgtcatgttgtagtatgtagatgtattccattcccttttttaaaaacatacatcacaagtttattgaaataatcagataatataaacaaaatgaacagggcttgacacatagtaattgcacaataacttctacctattattgagttacaacccagagcctaacacaatatttgtggaatgcttaggttctcaggccagcatacaagtctacatttaactcttaaataaaataacagtttcaaattgagtataataatgctaaatggtgagacaggatcaacccctctatctccaaatatagggggattatcttaccatccacctgttgtattagaaagtcatgcttcatctacttatggaagccaagacatagcctagatatgtacaaactatagatataacgatgttaaggaaaaaaattgctgacaatatcactagggattctagacaatgtaaattgccattaatgtttattgctgtgatggacttcctgaacacattgttagaaattggtttgtggccaggtatacaaataattcattgtatggattttattattcatcagttgatggacatttgggttgtttccacatttgttctcttatgaataatgcttctgtaaacagttgtgtactagtttttgcatggaaatatgttttcatttcttttgggtatttacctagttatgggtatgctgcgtcatatggtaactctgtgtttaacatttcaggaactgatttcatatcaatttatatctcattctgttgttttcttttttggtgtttttgctccctaattttttcttccgtgttcctgtataagttttatttttcaccgtcatctcaattcattcaacaaacatatatcaagtgcctactgcatgccagaaacagagccaggctttggggagacttcaatatttcagtggtggactaggtgtagtcactgatcctgattttcccagaccctaccacttgtggggagacagagaagtacataacgattttaaattgctttgagatatcttgtagtagaggaaatacagagtgctatgggtgtttatggaagagacatctcctgtttcttatttagtgctgtatgcgacttgggttaaaagatccacactgatttccagtagttggtattcccagttgttgctatcctagagcccgatttgtatgctaagattgctaatactgagtcatgtcaggtgaataacttccatttttagcagactaatctaattccctttcatagttcagctctcatattggaaaagaacacgaaataactgttagaaaccttttaacatcctttaaaatatttgaaaaaagagaaagctggcatggtgcctgttaaacactgtagtatttaaaagaaaatgtttgttgaatgaataaaagcatatagcagagtgctgtatgtacacacagaggatgagcagtaaatgaataaatgatgaattttctaagtgagtttcctgtagcatgtgaccaagcagaatgattatgaatgagtttgactgcaacgctttctttgattattaggacttgtcaccaggcttcggtacccagttagtgtgaaagggaagaatgcacccaccactgcaggattcagctatggtaactcttattttgtggttgcatgagctaattttccttgaaaagaatccattgtcataagataaatttggatgtgtactatttcacatactggaactgttttttataagtttatagtataggtttttagataattatacttaagaccatagcagcctaggtattcaattttcatcattattcataattccatagaaaactttctgtcagtgaaaaataagcattatcatgttaacatctaaaataaatcaaagcccttcctggttctcactagctttattggctacaagaacgtgagtaaggatggaggtaagaaagcaagcttccaacttaattgtctttgttgcttctggcaaaagcctttaaaacagcaaattagattatttccaacttgatggaattgaaaaagaacaacaacaaaaaaaaaacctgagaaggaagagtggtaaagaaggaagtatttgtttgacaaaagtacctttaactttcaggctatattattattagcttgttatgcagaattgtcttgccttcttcatttcacgttggttagaagggattcatcctccccacctttggcagttcagatgcaggtttcaagtctgttctgtgttttaccaggaattattacagtgttatcctgtaattttgaggttgatcttggttgtaggttctttttccccctctctgattcatgctacattttcctttttaaatatgaacactttccctttctgtcctgcagagaaatgggagattaacccttcagaactgacctttatgagggaattgggaagtggactgtttggagtggtgaggcttggcaaatggcgagcccagtacaaagtcgcaatcaaagctattcgggaaggtgcaatgtgcgaggaggactttatagaagaagctaaagtgatgatgtaagttgctatcatctttctggctcatctttttgtattaagaagtggccccttaccaaaaacttggtagtttcttttcctatagtaactatatatatgtcttccttcccaggaaactgacacacccgaagttagtgcagctttatggtgtgtgcacccagcagaaaccaatatacattgttactgagttcatggaaaggggctgccttctgaatttcctccgacagagacaaggtcatttcagtagagacgtactgctgagcatgtgtcaggatgtgtgtgaagggatggagtatctggagagaaacagcttcatccacagagatctggtaaccctagccacccatattcccactcattggctgaattcctttgtaacactggctcagcaaatgtgcaatgatgtattaatagccaatttttgttcttaacaatctttcaccattatttttaaagttggtaaatttaacttgccctgtaattttaaacgaaagatctttattcaatctaatgatttacttagttaatatctccaagcaagtttccatgttttaatttttcgatctccataagaatcccatgagatagctactcacagtggattctcttaccatcattcttgtacagatgagaaaattagcttcagggaagtcaaaaggctcgcctactgtgataaatagggaaattggggttggccttgactttctaactagagcccaagttcttttccacctcacacactataaaaagaaactataagagaaatcctttggatttttaaaaaatctctcaaatcactgggaaaacatggaggttcatgttaacttctcaaaatgctagaaaaagaaatccgttaccagttctaaattatgatggagacaatttttcccttctcacctgttctcactctctcctccattcttcttttccttctgtttttcttctctacctgttctttacagatgctttcagctatcagtagcactctgtcccctgaaaataatcagctgaaaatgtctgttttcagcatatcggtagcactgtctgtcccctgaaaataattcttttaccaagaagagtgtaattttcatttgggactttctcccatattttagttttagctttctagtgataaagcatggacacatttcttttagaaagcagaaaaactttaaaaaaatttttttttcctttgagacaggtctcactttgtcttccaggctggagtgcagtggcgcaatcttggctcactgcagcctcaacctcccgggttcaagcgatcctcctgcctcagcccccaagtagctgagactataggcacgtgccaccatgcctggctaatttttgtagagatggggtttcaccgtgttgctcagactggtctcgaactcttgagcttaagcaatctgcctgcctcagcctcccaagtgctaggattacaggtgtgagccactgcacctggccttagcaaaacattttttaaagttaacagtcaccttagacagacattgttctgataagtattttacaaataaacttgtttaatcataattctgggaagtagattttcttattattccctttttacagatgaggaaactgaggtgcaaataggataaaataacttccaatgggcaagtaaattgtagagccaggatttgaacccaggaagtttggctctaaagtccctacttaactactatgctatgctctctagaattaaaacatattagagaattgaagatttggagatggaacactttatttcctaggtgtgttttgggatacttaccttatcttatattcagtttctgtgtctgtaaattgtgggttataatgttgtttggcttccaggactgttttaaaggtcacattatttgactggggcaatgggctttgtaaaatagacatgctgtagataacatcagttattgttatcattgtgtcagggatgatgaagaacatctcgtcagttaaaacttgtgaactaagaactaagaacaaaatagatgtccttataaaactgataaaaactgagtatctacgtgggtgtggcagattacacctgtccacacagatgatgttttggcaaaaacgattcttacatttctgtgcctgtgatattggtattactatggtaggtttgtgtcaccccttatgggaaactttggatgctcttgtctccttggtaaagaatcctgttgaccatccagtgcaggcattgtggagttgtgaagtgttttcataggaagatgcaggcagtccagggaatggatattaactctcactttataagactcttaaaatgcactcagcaagaaggaacctcatatgagtggaattgccacatagagaaaatagaattatgaacagtcaggaagaaaaacatatcttggtctatgggttatggtattaaaaatattatcggccaggtgtggtggctcacgcctgtaatgccagcacttttggaggccgaggcgggcggatcacgaagtcaagagatcgagaccatcctggcaaacatggtgaaaccctgtctctactaaaaatacaaaaaaaattagccaggcgtggtggcagacgcctgtagtcccagctactcgggaggctgaggcagaagaatcacttgaacccaggaggtggaggttgcagtgagccaaggtcgcaccactggactccagcctggtgacagagcgagactcagtttcaaaaataaaaaattaaaaaattaaaaaaaaattcttgtcttccttttgagaaataccacgtctttctatcaaactattttcttaaaccttgtaaccttgaagaacatgcaagaaaatataaattaaataatccacaattgtatttgaccaattttgtacatcatgttataatatactgggaacataaatgaaaaagcaaactgtatttacacatagctgttctttttgagacggagtcttgctctgtcacccaggctggagtgcagtggcgcgatctctgctcactgcaacctccacctcatgggttcaagcaattctcctgcctccagtcctaggtagctggtactacagttgtgtgccaccacacttggctaattttttttgtatttttagtagagaaggggttttgtcatgttggccaggctggtcccgaactcctgacctcaagttatccacccgccttagcctcccaaaatgttgggattgcaggcgtgagccactgcacccagcctgttctttgactgggatgagatgaccaatcactgagcagaaatattggataagagattggtcgcccatcattttgatggttgtgtgttattaagctcacctagtgagaaccggattaaggacttcaagagatgttctcattgtcagtaagaaaattggatagtttaataagaacaggtctgggaaggagaaaagtgagttgacccttctattagcccttgtttaagaatgacagttggccggtgaggttgctcgtgactataatcctaacaatgggggaggccgaggcagatggatgaggtcaggagttcaagaccagcctggccaacaaatacaataattagctggctgtggtggtgggtgcctgtaatcccagctactctggaggctggggcagaagaatcacttgaaactggaaggtggaggttgcagtgagccaagattgtgccactgcacttccagcctgggcgacagaggcagactctgtctcaaaaaaaaaaaaaagaaagaaaagaaaaaaaaaagacaattggtaaagattatgtaataatgccttattgcaaatacaactttctgacctgcctattcatttttttcaaatacacaatggaaatacttccataggggtaaaaacaacttattaaagggtgtttccactctctgcaaatgttgactaggttacactaaatttaatataaatagaacttacattttcctacttaaatgatagaatttttaaactaatataccatcataatgttgttttccaggctgccagaaattgtctagtaagtgaggcgggagttgtaaaagtatctgattttggaatggccaggtatgtccaagtatacgtggttttaggtgatgtttgcatttttttggtggaattaataagtgtgggaataatttgcactgatgaagcagaaaggaaatcttgttaactggttctcagattaaattaagtatatattgtgatggtagtaattctctccactaggtggtagtatagcctgttaaatacactgtatttcctggtgtggattagatttctagaatcttttgttttcacaaaaacatatttggtggtgaggttcttagtatgtccatgtctgcagtgtttttcttctcttaatttttataatttaatagtattataaaataccttttaaaggtatttagtttattttttctctcttctccctccgtctatccattcattcatccatacatccacccataaaaaatcaggtgcctgctctgtgccaggcataatgataagctgaaccatatagagaataagacctacaagtccttgcccgcatgcagcttacattgaggaagagggtgaatcagaagacctgataaagttacatgatcgagcacggtcgatactggtaaactgtggctgtcagtctgacccaaacctcatttgggtttcacatttttaaatggatgaaaaaaatgaaaagaatattatgacatgtaaaaaaaaatctgaaattccaatgttgctgtccataaaaatagcgtgattgagacacagcctcgctcattcatttaggtgttacctgtgactgctttcctgctacagatgcagagtcaagtagttgtcacggggactgtatggcctgccagatctgaaatatgtgttatctggccctttacataaaagttgactgatccctgtaatagagataatttggggtggtgctgaatgatgatgcagggcaagagtgagggtggctacttgatctgatgttcaggatgacctctttgtgataggcagatttgactggagacgaaaaggtaggaagtagccagtgtaggtgaaaataaaaggataaactatttcaggtaggaagaaaaagtgaaaaagcttgaagtctgggacacgtctggcctgctcaaggaacggaaaaagcgccagggtagctggccaacgggcagcgccaggaatgctcataaatgcaggcaaagaccaggccatgtagggccaagtttaactcctaaggaaactcaggcccagggagattagaaaactgttactgtcagaaatgggaccagaacttccaactcttaggatattaattacccaatgctctttatttgcttttatatacagatactatatatttgacaggctgtctgccgctttcatctgttcaatcttcatatgttaggctttcagaaaatctgcacttttgtatcaaccactcaaaaacctctttataccctaaattcagactccactggctgacagtttgatccagcccacagtggcattgtctgccagccagcagctggctttgtgccgagtcaccatctttgtctacatagcaaaggatgtttgtgcaattcttcgaaaattttctcatggaaccttttagaaattaatggtatattcacacacaatacagagatacattccttttgtaaatatgtgctgcccaccttacagaaagggctgaagtcttttcatctaccaaccctaatcaaggattctcccctaaagttagctactgttaccagtttttgtatgttcttccagaaggacattgtatgttcacatagaaaaattatatagtattgttttgagtgtatgtatgtatgtggggatgttatgtataaatacatactccaccatttacatgtggcattttgtgttgtgtttttgtttttgtttttttgcatttgctattttcatatgctgtagttttaaattgtgctctgtggaattggaggcctgaaagcctgtgtgtttctagatgctttataccacttcctctggagcagctctgctttagattttttacatatggggcctttgggtaaaattttatttaaagaacaaaattgcttacaaagaaaagcttgcaaactattttatgataccttgtctctactgccttataaaaagaaagaaaaacagaaaaatgaaagtgcagatggtaacgtggtgatggatccatctcatgcacttaaattaagctgagaggaagttggaaatcaccaggtgtggccactgaggtgaacatttagcttcaaccggatgcttgttggacttcagtcaactgtgtttttgattgcaaggggaaaaaaatgaaagagcaagtagaaaaaacagattgttcttcagaggtgtaaacccatggtgtgtcttactctaggtatgttctggatgatcagtacacaagttcttctggtgctaagtttcctgtgaagtggtgtccacctgaagtgtttaattacagccgcttcagcagcaaatcagatgtctggtcatttggtaagatccatgtttcctcatgtccgtccgccctgaggagaaagtggatacatccatttggtaatccttatccttttccaggtgttttaatgtgggaagtattcacggaaggcagaatgccttttgaaaaatacaccaattatgaagtggtaaccatggttactcgaggccaccgactctaccagccgaagttggcgtccaactatgtgtatgaggtgatgctgagatgttggcaggaggtatagattttttgtgtgctttctttttgaatctcttagggattgggcttggtagatggataacatgcagtctttatagcctagtgaggtggtgcatctttatagtgatttcaagctctaggtaggaagccaaccctctcaactcaagttctgaataacgggaagaagaatgtaaagatgtggaaaatgctaataactacctcgatacattcaggctgcttcctcacttccaagtgggactccttccatggttgcctgagatagggacttggggaataagcctggataagtagctcttttttcattggttcacttgtagagttgaagtattatttttttaccagagttggtttctttctctaaacctcaactttccgaggtctttgaaagtattgaaatgttacctcctaaaagagattagataccaaatgacttctgaaagacagtaacattagctcacatgtattatgtaccaggcactatacttagtgttttggatttagttctcaaaacaacactttgaggtggagatactttgactgtagccactctgtagatgagaagattaagggtcatgaggttgctgcttgcctggggtcacttagctacagaacagtataggcctgtctgattccaaagcccagagtctcaaccacttgctgtactgcctcccaagagcattgattgggatgggcagagacattctgggcaggaagtggtgctaaagggagagagaacagcttgagcaaaggtaaggaggtggttataaacacagtgtgcacaacagtggagacagtggccctatttaacagacagcccatgtgagggattttgtggggaacaagattgggtaacaagagggtcgggaagtggcagattatagaggctcctacaaatttgcaggacttgatttcacaggcagtaaaaagatctatcagggtcttgaagagagacatgaaagcagtgtcttagaaacgttagcctagcagcagtacatgcagggtaaattagggtagagacaagacccctttggagatgcctgtatgtcctagtcccaaagcagtgaagtctctctgtaatatgctgtgtttaggagttggagcagtgagaggttttttggaatggattctggaacccacagcttctctttgacttttaattgtagaaaccagagggaaggccttctttcgaagatctgctgcgcacaatagatgaactagttgaatgtgaagaaacttttggaagataagtgatgtgtgaccagtggctcccagattcccaagcacaaggaaggatgggcattttgtggcttttaatttattgagcacttggacatgtagatcattttacttatacagtggaaacacataatttgcttctagaccagcctctgtctagacttgcttctagacagaatctcccagagtgtggaaatgttgccttagaaatggtgattaaaatcactcatttctattcattcctcaggcacttgagtgacagttgtttaccaggcactgtgtgtagccccagggtttggccattcaggggtgcacacatgggaccatgttagctgatgccagttgaaggccagggtatttgggaaggggaagggtattagagtcatgaccaagcaacccttctttttccctttgacttctacagaaatctgggcctgagacattgtctacaattgggttctagatacatcaggaacccatcttggataaataaatacctatcttttgttttgaaaacatctcagttttcaagactgctcttagtattacatgaacaatatttgtatgctgtatatattgtaaatatatataatatataaagttatatatttatgagaaacacgaattgtcttttaattgaaacttttaatcctgtagtataggagttcaccttcttaggactagagactgtgccttatagctgttaattcatttccccctgaacatcaaatatgcctgaagagaagaaagtctagattcttctatgagtaacgccccctcctcactcaggtaaatgtgtctggggatgcctgtccagcttaaccacgtgcatttggcctatgtaatcctgcccatggtggccgcagctaatcagaatcagatggaaaattaaaccgggtaatctacttctaagccttaagaatattccctgggacacagacactataattggaagtgctgagctctggggcagaaggatcaggtgaccttcgcaacaaagtttgcccccacctcacataggacccggaagcagcctgagctgtggcggaggatccaggaagctacggagagaagcagccagcatggtgttccgtgcctcccggacgtttttcaggaggcctggttggacttgggttcctggatggtgggattgttgtacagcctctcaggagaccctgctgtcaagactgtgtgtgtggatttctcacccttagaagctctactaagacatcaacggaattagggccttcctttttgccttgtgagcgccaaggaaaagaaactatctcggtcacgtgagcgccagcgaaaagaaactgtatcagtcatccagagaccgtttattgcccaacacgttattcttgctgttggtggggtaactagccgaggaagacacagcgccttcccttcaggagttgcgtctcctctgcaggccacgatggtctgctctggagcattgggtgaacacacaggctggctgctctgggcagcgccttcactctgaccctggagaaccatttcatttcatcctggtcagtctagagtctgtgcaccaggcagtccatccactgaaggctgtgtttattcttttcctgtgcccctcataatggaagaaagtaaactgcttatcccgagccttatcacaatctgccacattccttcttgtctacctgtttaactgtacccccatcacaaaaacaggcacaactttttttttacattccagggtacatgtgcaggatgtgcagttttgttacataggtgaacgtgtgccatggtggtttgctgcacctatcaaaaactcatcacctaggtatgcattagctatttttcctgatattagcctgatatatatatttcctgatattagcctggcatgcattagctatttttcctgatgctctcccctcatctgccctccccaacaggccccagtatgtgttgttcccctccctgtgtccatgtgtttcatggttcagttcccacttataagtgagaacatgtggtgtttggttttctgttcctgcattactttgctaaggataacggcttccagttccatccatgtccctgcaaaggacatgatttcattctgtatagctgcataatattccacggtgtatatgtaccacattttctttatccagcctatcattgatgggcattttggttgctaaccatgcacaacttttaactgacttgtagctcattgaaggagtcggtcctggcacactctaccttactatcactgtcagccttttctccttccttcctgaccttccctcctcccatcccatacttcccttttcaccttgaggagctacgggaagtactaggtggtatgaaagagagtgaggagaagatagagtccctgtcctaatggtcagtgtatgctttttatgggaaaacaagatagatagcacctggcaacatttgtcaacatttccttcaaaaatctttaaatatttttcactaagacttagaaaaaaagttttatacgaaagcataacaaaggcaaaaggtgaagtaaaaataacagtcatcacccagaatgctaaggagaccttaatctaaaccaggaaattggaagggcgattagaatatgctgtgtcttcattaaagttgctctgttaattagttgacacatggttatgctttccagtgggatgaagtgaaactcccaagtgtgttttgtattgttggtgtttttatatttctcagccatcccccaatcacattttagggttattactagattgacttcccccaaataaagtgtctgctgagtgggaggatggaacattctaaactcaatattccagagcctagaatctaattgtttctgccactcacggtgtggccttgggcaagtcccttattctgtctgtgccttcatttccttcccagtccagagagggcagtttgatttgataattttaaaggtgccttttaccaaaattttgtgatttcttgaaaatgatgtttgcgagtcacccacacctttggggatgagagactaatagcagataccctcagagattgggatggagattactgagctttcttatatatgccattggttgtcatttatactcttctgaggttttcagaacaggaaaataggtggggttaactctgcccgtgagaaacatcttgagcgaactatgatttcagttgaaagatgtgtttttgtgagtagagcaccgcagaagaactgaagactgttgtgtgctccccgcagaaggggctaccatgatcctttcctcctgtgagtaagatgggctttgtcatttatttttggggcttgttctggggcctgttattcttgaacagcagaggaagttttttttttccaaggcatagagcttggggacattaaaagataatttcctcagatgttgtgacagagttttgtttcttatttaaagaaccacagtgatgatgtaattctaataaaggttcagcattgagaacataaatgaaagaaaaacagaaagagtgtccagaaatctgcatatgtgtgtgtagaaatgcaatcagtatgaagtacttgtttttagaatgagactgtaatgagctctgggctgaaggccaggagaccaagttctagttctggatttgctccagcagtggtggatcacagtgggcaactttatatatatataaatacacacacatacacacacacacaaataaatatctatatttaaggcaaaaggaagagaagtcaaaacacaactgtgtttatactctgaaattatctgctttatcaagtaaacatatagacttaacctttattttcacaggggtatttattcacaattctatgtagacttccgttatcgaggacctttcccaagcaattgaaatttaggcaaaactgattcttatctgcagtcagagcctgagtaaaggccaaaataagagtcaaagtcacgagtctctacctggttaaaagtgtgaacatggtcaagtgtgaacactggctcaaatgtctctttccctcatatataatactacatatgaagatgttattttaatatttttatagaatataagaccatcattaaaaataagtgcttgttttaggagaacagagaaagattccctagacactgttatctgtgaagatccttggtttgaaagagctgtgggggatgcttataaatccaaagaaattagaataaaaaaaaaaacaagcagaatagtcttctaaataagaaggcagccgtcatatcagaattgcaatgtgtttgtttctttataaaggtatttattgagcacctactatgggccatggtctataccagttcctttatattcattatctgaaatcttcactacaaactggcaaggtgaaaattgttattcttatctagccaataagaaaattgtgcctttgaaagtttaaatcttgccagaaactcatatggttgtcagacgcaggatttaagtatgagactttttttttttttttagacagagtcttgctctgtcacccaggctggagtgcagtggcacgatctcagctcactgcaacctccacctcctgggttcaagtggttctcctgcctcagcctcccgagtagctgggactacaggcgcatgccaccatgcctggctagtttttctatttgtagtagagacagggtttcaccatgttggccaggttggtctcaaactcctgacctcaagtgatttgcctcagcctcccaaagtgctgggattacaggcatgagccaccacacgcggccaagcatgagacttgccagactcgggatttaagtgctcttccttttgccttaaatatatatacacacacacatacacacatatataaatgagtttatatgtataaataagctctcaaagggagtgtgtgtatgtgtatatttgtatacatataaagctgccaactgtgatccacaaatgctggacgaaatcagaactagaactttagcccaggccactccctttttgcccaccttgcaacaaaatataaagaaacaataaacctgagaggtgctttaagaactttattttgggagttgctttggaagactattcagtcccatgtgcagttttggaaatacttattaatttacctctaagactcagagggccttattttgcagataaggaaggaaaatactgtctgattttaatactaggtgacgatggaaccaagcttcaacaaagctcagtcatatcagattaaagcaatcaaagaccagctaaaaaagtcaagtttttacatttctgacttttaagtagcattaaggaaaaattgattgtaatttttaaatatcatctgtttaagcgaaatcccctcataggagccaacaattgtttgtagattttgtaaaaaaaaaaaaaaaaaatcaggttattccagttgtgctgacctgaaaataactcatagtcttccattcacgcagataagaacaagcctcctgtaaacagaaatataggccaagcagagcaaagcagaaaaagcgacaaagcagcaacctgtgtcccctgccacctccactggcaggacaagctcagcagtgacttaaggatctttaaatattaaaagctgtgtgagcatctgctctttatttccctcaaggtcagaactaaagaaaatgctgtaaattacagcaggaaggattcggttatatataaaataaatcactgtgagtgttgagacaaggatttgattgtccaagggattaaataagggactacctattggcgggatattttgaggattattctctctggcatggatttgatgaaatctcgttctcctttccagcttctgttaatttgatttgatggtaagaatcacctgttgtctactgtatattgcagctgaatgtggctacattttctgctgggtaaaacaatgagtgtttactattgacaaggagacagctaagtgatgcctcaagatgtattactgttaatcaaaaaacaaacaaacaaacaaaaaaagtccagcgaagaagattgcttaagctgaggagtttgaggttgcagtaagctgtgactgcaccactccactccagtctgggtgacaaagtgagacccagtcttttaaaaaaaaaaaaaaaaaagtttatatgtttgttagggtcatttgccaaaaacatttgttgttttaagcattgtcatagaatcctggcttcaaaggctgctatagggtgggagaagataattgtggagcgtgggatattgatcatactgatgggagatttggagtggggtctcagggcactgctccagtgagattcagtttgtgaaacgtacttggtattgccagcatttccatcaactcacagttgccctgagaacagatccagcctagaagagttatttaaaggacagggcaagggaaagcagctgggggcttaaagaattcacctcttagctcccctgtttgcctaatttctctgcctttctttattcccaacttagagagtagaaagagtggtttctaagtcttggtgtgcctgaagcatgcctggggtgctgttaaaaggcaggtttctgggctcatctccataactggatctgagggtaaagtaaggatgttttggtcacactgcctttcttgggcctctcttttcagagtcctatcttactcctttttgtatctgattctcacaccaactttgttaggtcaacaccttccattattactattatgaatatgaagataaggagggtagctgtggtaggcagcctctaagatggcctgatgatatctgcctccagatattcacgcccttaggcagtcctcctccttgagtatgaattggacctagtacctcacttcttgtgattagaatatggtaaaagtgatggaacgtcacctctgagaccaggttacagaggtggcggctcccattcctgcgatctcgggctttctgtctcctgcatcgccggctgctttgttgggagcactctcaggcagcccgcagagaatccccatcacgagaaaccgaggcaccatgacctgcttggaattcgcttagaagtgtattctccagctctggttgggcccagcttgactgcaactccatgaaagatctggagacacaagcactcagctaaaccattccagaactcctggcccacaaaagtgtgagataagtgttgtaagtcatttggtctcagaataatttgtttccaacaatagataactaagtgtgtggcaaaagcaggagaagccgcagattaaaaaagaacttggccactttggccacccttctgcctggggctggagtttgatgccctttctgaaagattaaaatggacactagatgtgtcttttcttttgtctttaaatcatttcagtttttaactcgtcactgcagctgccttttgtaactactgcagatccccacatttctcctctgtggagctccccaggccagcagtgcccacactccctgcccaccgagggtcagtgagcagtacggcttctggcccagtgccagccacgcccgtgtgccttgtggccaagcacttcttcacatcacaagctggctcgatgtcttgggtgtgatgtctgcgagcttattatgaactttgagctcacagaaaacagtgttctaggaaacactgttttgagatgtgggggagtggggaagttgtgggcaaggtgcctgcaaagaccaactcacatcagccccttctgagaaagaaagaaaaattgcctcatagaccaaacaagggtttgggtggctgctgtccgtgtctggggagttgccctggcagaagctgggaaacagatgagcggtcatcatcaggaagatttctgcctttccttacagcaccttttactcccagaaacattgtcttccctggtgcccgggactccatccagcttgccaggcttctagaatctcctcaccccacacagcaccccttcaggccatagacaggtcaagcaccactcttccactcaaattgatcagtttggtgtcctgttagctaggtacttgttttctcttagtcaccagtgactcccctaaagtagttatcctcccttctttaaggtttcactggcagtataatgtcaaaaaaacagaacagtcaaggtctaacacaaattactcacttattttatccatacatttagaaaaactaacatctctggagaccatcacttcttagaataatggacattttagtatcaaaaggaaaagtgcacacacgtgcgaacacagacacaggatcacttcagaccccaaatgtataaagggcataaactcagaataaaggataactttctaaattgaataaatatgtgaaaaactcaatgtcccaattttactattttcccctctccttggtgtggggtcttggtttggtgtctaactccaaaccaagaagtctaactccaacttggaagtcttttctaactcctgttcagaggtagaaatccatccatgctatagccaagctagttatgtgtcactctccccagataatatgggttaatgtggctaaaacgtgcctatcttcaaaaggcccttaagaaatggggccttttgaagataggctgggcgcggtggctcacgcctgtaatcctagcactttgggaggccgaggcaggtggatcacgaggtcaggagatcgagaccatcctgactaacacagtgaaaccccgtctctactaaaaatacaaaaagaaattagccgggcgtggtggcagacacctgtagtcccagctactcgggaggctgaggcaggagaatggcgtgaacccgggagcagaggttgcagtgagctgagatcgtgccaccacactccagcctgggagacagagtgagactccatctcaaaaaaaaaaaaaaaaaaaaaaggatgtagtggtgggcatttatggcagagtaatgaggaagtttggcctttctgtaaatttctggaaaaaaaaacaaaaaggatatgttgcagcaaacttacagaatcagctctggtcacccagagccatttttccaaagccacaagtttttaaggctttccccactcaccacagcccatcaactgcaaaagcagccggtatcagacattcctcatcttaaaaccacaacctggagcgcctggcttgggcaacaagcctggtctttgggttaaggcagctctcaaaactgagccagtttcaagccatgtttttaaatataaatcactagccatgtgccagttattatgatgaccaaattcagtaggaatgcatttcactcaaggcactgattcaaaacgaaaccctgacatcggaaatgccaggggatgaactggaggtgacgatgtaaacttcaaaacattagacatgaggaagcgacagcggctttgcttcccgcgcagcccgggccccacagttcttcacatctgttcctttgtcctcttcagagatgaccttaggagctattctgagaaggggtgcttctcacttttgctttcttccagtgccccctggtggaaacctgttcccaatcagcccagctgttgccacccaggaacctctgggggtggaaggaatgtcaataggagcctctcctagaggacagaggggcgcaaatccttccaaggaaaaaacacaaataccaaagatgggagggccaactgcctatcccatgacagatgtgccggtttctaaaggtcacagagattacatctgatgcgatgccctttttctgatttgctggcctgaggctcatcattagagatatttactgaggaatgagaagtagatgaaaagaacagcgcagatgtaagcctgggagaggaagctcagctccttcagtgataatcttcaagcccgaatatattctttccacatttccttccagcaggcaaatagtcattgcctatctctggggcatttttgtcactctggcaaaggcccttgatatgcatgagttcctgcctaagttgggaatttgctaaaagctcaagagctttccctctgcaggttaatcggcaaaacaattcaaagaatggcttctgtaatcacagaatgcctgtggaagggcgctgtctatttacttactgggaacacctgtgctgctgtaaattgaaaatgatcatgaaatgaatactccttgatacctgcattggaatgaattttggcccaacacttcaacctgtaaataaagatgcctgctgtcttggaaagtcatgccaagcaagggaacaccagggagctgtttggctttcatagtgtgatttttcttctcgcaatgattatttattggacagcaactctgctgggcagaggatggaaccacaaacaaagcagtggtttgccttcctgctcaccactgttcttggtctttgagggaaattaaataaaattgggtcataattaaagcagtggtagggtaggtctgtatctttctttaaaggccattgtctttgctattgaatcaggaaacataagaatttttgaaaatattttctcctaaattccaggctgcagaagacagtgaagacaactaaggggaatattatcaggtgtggccatgtgttgtgaggtcagggagctgggggaggcatttctctagtcccagatactcctgcctgctgactgataacagcaatttctctttcaaagttcttgacttggccaggcatggtggctcctgcctgtaatcccagcagtttgggaggccaaagagggggatcacttgaggttgggagtttgagactagcttggccaatgtggtgaaatcctatctctactaaaaataccaaaaaaattagccgggtatggtggagtgtgcctgtagtcccagctacttgggaggctgaggcaggagaatcgcttgaacctgggaggcggaggttgcagtgagccgagatcatgccactgcactccagcctggatgacagagcaagactccatctcaaacaaaacaaaacaaacaaccacacacacacacaaagttgttgacacttgaataaggtggttccccaaaatgtaactactcatagcctaacattgaccagaagcctcaataacataaatgttgatcaacacgtattttgtatgttatgtgtatcatacactgtattcttacaataaagtaagctagagaaaagaaatgctttaagaaagtcataaggaagagaaaatagatttactattcatggagtgaaagtggctcatgataaatgccttcatcctcgtcatcttcatgttgaatagtctgagaaggatgatgaagaggagggattggtctttctgtctcaggggtgacagaggcagaagaaaatcttcatgtaaatgtttataccatgtttttcaagtgtcaaactatttaaatttaatgtgttgtgatggttaattttatgggtcaacatggcttggccatggtgcccagatatttgatcaaacattattctggatgtttctgtgaaggtaatttttggatgagattaacatttaaatcggtggacttggagtacagtgggtcaccctccatcatgtgagtgggcctctcccacagttgaagtccctaatcaatgaaagtcagacctcccctgagcaaggaggacttttgccagcagaccgcctttgggctcaaactgcaactcttctctcattcttcagcttgccggcctgccctgttagattttggacttgccagt

SEQ ID NO: 786 - DNA, 3689 bp, Homo sapiens
gggcggggcggggcgctttgctctggactctggggcgctaggctccggactccgcggcgcagactgcacctcgcagtctccccaggtccgcccagcagccgcgcttcagccagaatactgggatcttcagtggcaggaggagtaatcagaagacggagatgaattttaacactattttggaggagattcttattaaaaggtcacagcagaaaaagaagacatcgcccttaaactacaaagagagactttttgtacttacaaagtccatgctaacctactatgagggtcgagcagagaagaaatacagaaaggggtttattgatgtttcaaaaatcaagtgtgtggaaatagtgaagaatgatgatggtgtcattccctgtcaaaataagtatccatttcaggttgttcatgatgctaacacactttacatttttgcacctagtccacaaagcagggacctgtgggtgaagaagttaaaagaagaaataaagaacaacaataatattatgattaaatatcatcctaaattctggacagatggaagttatcagtgttgtagacaaactgaaaaattagcacccggatgtgaaaaatacaatctttttgagagcagtataagaaaagcactacctccagcaccagaaacaaagaagcgaaggcctcccccaccaattccactagaagaagaagataatagtgaagaaatcgttgtagccatgtatgatttccaagcagcagaaggacatgatctcagattagagagaggccaagagtatctcattttagaaaagaatgatgttcattggtggagagcaagagataaatatgggaatgaaggatatatcccaagtaattacgtaacgggaaagaaatcaaacaacttagatcaatatgaatggtattgcagaaatatgaatagaagcaaggcagagcaactcctccgcagtgaagataaagaaggtggttttatggtaagggattccagtcaaccaggcttgtacacagtctccctttataccaagtttggaggagaaggttcatcgggttttaggcattatcatataaaggaaacaacaacatctccaaagaagtattacctagctgaaaaacatgcttttggctccattcctgagattattgaatatcataagcacaatgcagcaggacttgtcaccaggcttcggtacccagttagtgtgaaagggaagaatgcacccaccactgcaggattcagctatgagaaatgggagattaacccttcagaactgacctttatgagggaattgggaagtggactgtttggagtggtgaggcttggcaaatggcgagcccagtacaaagtcgcaatcaaagctattcgggaaggtgcaatgtgcgaggaggactttatagaagaagctaaagtgatgatgaaactgacacacccgaagttagtgcagctttatggtgtgtgcacccagcagaaaccaatatacattgttactgagttcatggaaaggggctgccttctgaatttcctccgacagagacaaggtcatttcagtagagacgtactgctgagcatgtgtcaggatgtgtgtgaagggatggagtatctggagagaaacagcttcatccacagagatctggctgccagaaattgtctagtaagtgaggcgggagttgtaaaagtatctgattttggaatggccaggtatgttctggatgatcagtacacaagttcttctggtgctaagtttcctgtgaagtggtgtccacctgaagtgtttaattacagccgcttcagcagcaaatcagatgtctggtcatttggtgttttaatgtgggaagtattcacggaaggcagaatgccttttgaaaaatacaccaattatgaagtggtaaccatggttactcgaggccaccgactctaccagccgaagttggcgtccaactatgtgtatgaggtgatgctgagatgttggcaggagaaaccagagggaaggccttctttcgaagatctgctgcgcacaatagatgaactagttgaatgtgaagaaacttttggaagataagtgatgtgtgaccagtggctcccagattcccaagcacaaggaaggatgggcattttgtggcttttaatttattgagcacttggacatgtagatcattttacttatacagtggaaacacataatttgcttctagaccagcctctgtctagacttgcttctagacagaatctcccagagtgtggaaatgttgccttagaaatggtgattaaaatcactcatttctattcattcctcaggcacttgagtgacagttgtttaccaggcactgtgtgtagccccagggtttggccattcaggggtgcacacatgggaccatgttagctgatgccagttgaaggccagggtatttgggaaggggaagggtattagagtcatgaccaagcaacccttctttttccctttgacttctacagaaatctgggcctgagacattgtctacaattgggttctagatacatcaggaacccatcttggataaataaatacctatcttttgttttgaaaacatctcagttttcaagactgctcttagtattacatgaacaatatttgtatgctgtatatattgtaaatatatataatatataaagttatatatttatgagaaacacgaattgtcttttaattgaaacttttaatcctgtagtataggagttcaccttcttaggactagagactgtgccttatagctgttaattcatttccccctgaacatcaaatatgcctgaagagaagaaagtctagattcttctatgagtaacgccccctcctcactcaggtaaatgtgtctggggatgcctgtccagcttaaccacgtgcatttggcctatgtaatcctgcccatggtggccgcagctaatcagaatcagatggaaaattaaaccgggtaatctacttctaagccttaagaatattccctgggacacagacactataattggaagtgctgagctctggggcagaaggatcaggtgaccttcgcaacaaagtttgcccccacctcacataggacccggaagcagcctgagctgtggcggaggatccaggaagctacggagagaagcagccagcatggtgttccgtgcctcccggacgtttttcaggaggcctggttggacttgggttcctggatggtgggattgttgtacagcctctcaggagaccctgctgtcaagactgtgtgtgtggatttctcacccttagaagctctactaagacatcaacggaattagggccttcctttttgccttgtgagcgccaaggaaaagaaactatctcggtcacgtgagcgccagcgaaaagaaactgtatcagtcatccagagaccgtttattgcccaacacgttattcttgctgttggtggggtaactagccgaggaagacacagcgccttcccttcaggagttgcgtctcctctgcaggccacgatggtctgctctggagcattgggtgaacacacaggctggctgctctgggcagcgccttcactctgaccctggagaaccatttcatttcatcctggtcagtctagagtctgtgcaccaggcagtccatccactgaaggctgtgtttattcttttcctgtgcccctcataatggaagaaagtaaactgcttatcccgagccttatcacaa

SEQ ID NO: 787 - protein, 623 aa, Homo sapiens
MNFNTIEILIKRSQQKKKTSPLNYKERLFVLTKSMLTYYEGRAEKKYRKGFIDVSKIKCVEIVKNDDGVIPCQNKYPFQVVHDANTLYIFAPSPQSRDLWVKKLKEEIKNNNNIMIKYHPKFWTDGSYQCCRQTEKLAPGCEKYNLFESSIRKALPPAPETKKRRPPPPIPLEEEDNSEEIVVAMYDFQAAEGHDLRLERGQEYLIKNDVHWWRARDKYGNEGYIPSNYVTGKKSNNLDQYEWYCRNMNRSKAEQLLRSEDKEGGFMVRDSSQPGTVSLYTKFGGEGSSGFRHYHIKETTTSPKKYYLAEKHAFGSIPEIIEYHKHNAAGLVTRLRYPVSVKGKNAPTTAGFSYEKWEINPSELTFMRELGSGLFGVVRLGKWRAQYKVAIKAIREGAMCEEDFIEEAKVMMKLTHPKLVQLYGVCTQQKPIYIVTEFMERGCLLNFLRQRQGHFSRDVLLSMCQDVCEGMEYLERNSFIHRDLAARNCLVSEAGVVKVSDFGMARYVLDDQYTSSSGAKFPVKWCPPEVFNYSRFSSKSDVWSFGVLMWEVFTEGRMPFEKYTNYEVVTMVTRGHRLYQPKLNYVYEVMLRCWQEKPEGRPSFEDLLRTIDELVECEETFGR

SEQ ID NO: 788 - DNA, 3576 bp, Homo sapiens
aatactgggatcttcagtggcaggaggagtaatcagaagacggagatgaattttaacactattttggaggagattcttattaaaaggtcacagcagaaaaagaagacatcgcccttaaactacaaagagagactttttgtacttacaaagtccatgctaacctactatgagggtcgagcagagaagaaatacagaaaggggtttattgatgtttcaaaaatcaagtgtgtggaaatagtgaagaatgatgatggtgtcattccctgtcaaaataagtatccatttcaggttgttcatgatgctaacacactttacatttttgcacctagtccacaaagcagggacctgtgggtgaagaagttaaaagaagaaataaagaacaacaataatattatgattaaatatcatcctaaattctggacagatggaagttatcagtgttgtagacaaactgaaaaattagcacccggatgtgaaaaatacaatctttttgagagcagtataagaaaagcactacctccagcaccagaaacaaagaagcgaaggcctcccccaccaattccactagaagaagaagataatagtgaagaaatcgttgtagccatgtatgatttccaagcagcagaaggacatgatctcagattagagagaggccaagagtatctcattttagaaaagaatgatgttcattggtggagagcaagagataaatatgggaatgaaggatatatcccaagtaattacgtaacgggaaagaaatcaaacaacttagatcaatatgaatggtattgcagaaatatgaatagaagcaaggcagagcaactcctccgcagtgaagataaagaaggtggttttatggtaagggattccagtcaaccaggcttgtacacagtctccctttataccaagtttggaggagaaggttcatcgggttttaggcattatcatataaaggaaacaacaacatctccaaagaagtattacctagctgaaaaacatgcttttggctccattcctgagattattgaatatcataagcacaatgcagcaggacttgtcaccaggcttcggtacccagttagtgtgaaagggaagaatgcacccaccactgcaggattcagctatgagaaatgggagattaacccttcagaactgacctttatgagggaattgggaagtggactgtttggagtggtgaggcttggcaaatggcgagcccagtacaaagtcgcaatcaaagctattcgggaaggtgcaatgtgcgaggaggactttatagaagaagctaaagtgatgatgaaactgacacacccgaagttagtgcagctttatggtgtgtgcacccagcagaaaccaatatacattgttactgagttcatggaaaggggctgccttctgaatttcctccgacagagacaaggtcatttcagtagagacgtactgctgagcatgtgtcaggatgtgtgtgaagggatggagtatctggagagaaacagcttcatccacagagatctggctgccagaaattgtctagtaagtgaggcgggagttgtaaaagtatctgattttggaatggccaggtatgttctggatgatcagtacacaagttcttctggtgctaagtttcctgtgaagtggtgtccacctgaagtgtttaattacagccgcttcagcagcaaatcagatgtctggtcatttggtgttttaatgtgggaagtattcacggaaggcagaatgccttttgaaaaatacaccaattatgaagtggtaaccatggttactcgaggccaccgactctaccagccgaagttggcgtccaactatgtgtatgaggtgatgctgagatgttggcaggagaaaccagagggaaggccttctttcgaagatctgctgcgcacaatagatgaactagttgaatgtgaagaaacttttggaagataagtgatgtgtgaccagtggctcccagattcccaagcacaaggaaggatgggcattttgtggcttttaatttattgagcacttggacatgtagatcattttacttatacagtggaaacacataatttgcttctagaccagcctctgtctagacttgcttctagacagaatctcccagagtgtggaaatgttgccttagaaatggtgattaaaatcactcatttctattcattcctcaggcacttgagtgacagttgtttaccaggcactgtgtgtagccccagggtttggccattcaggggtgcacacatgggaccatgttagctgatgccagttgaaggccagggtatttgggaaggggaagggtattagagtcatgaccaagcaacccttctttttccctttgacttctacagaaatctgggcctgagacattgtctacaattgggttctagatacatcaggaacccatcttggataaataaatacctatcttttgttttgaaaacatctcagttttcaagactgctcttagtattacatgaacaatatttgtatgctgtatatattgtaaatatatataatatataaagttatatatttatgagaaacacgaattgtcttttaattgaaacttttaatcctgtagtataggagttcaccttcttaggactagagactgtgccttatagctgttaattcatttccccctgaacatcaaatatgcctgaagagaagaaagtctagattcttctatgagtaacgccccctcctcactcaggtaaatgtgtctggggatgcctgtccagcttaaccacgtgcatttggcctatgtaatcctgcccatggtggccgcagctaatcagaatcagatggaaaattaaaccgggtaatctacttctaagccttaagaatattccctgggacacagacactataattggaagtgctgagctctggggcagaaggatcaggtgaccttcgcaacaaagtttgcccccacctcacataggacccggaagcagcctgagctgtggcggaggatccaggaagctacggagagaagcagccagcatggtgttccgtgcctcccggacgtttttcaggaggcctggttggacttgggttcctggatggtgggattgttgtacagcctctcaggagaccctgctgtcaagactgtgtgtgtggatttctcacccttagaagctctactaagacatcaacggaattagggccttcctttttgccttgtgagcgccaaggaaaagaaactatctcggtcacgtgagcgccagcgaaaagaaactgtatcagtcatccagagaccgtttattgcccaacacgttattcttgctgttggtggggtaactagccgaggaagacacagcgccttcccttcaggagttgcgtctcctctgcaggccacgatggtctgctctggagcattgggtgaacacacaggctggctgctctgggcagcgccttcactctgaccctggagaaccatttcatttcatcctggtcagtctagagtctgtgcaccaggcagtccatccactgaaggctgtgtttattcttttcctgtgcccctcataatggaagaaagtaaactgcttatcccgagccttatcacaa

SEQ ID NO: 789 - protein, 623 aa, Homo sapiens; identical to SEQ ID NO: 787

SEQ ID NO: 790 - DNA, 639 bp, Homo sapiens
gggcggggcggggcgctttgctctggactctggggcgctaggctccggactccgcggcgcagactgcacctcgcagtctccccaggtccgcccagcagccgcgcttcagccagaatactgggatcttcagtggcaggaggagtaatcagaagacggagatgaattttaacactattttggaggagattcttattaaaaggtcacagcagaaaaagaagacatcgcccttaaactacaaagagagactttttgtacttacaaagtccatgctaacctactatgagggtcgagcagaggtaagagacaatcacgatttacttttctgctttctatgtagataacgattttataatattgcctgcctctccaatcttattgaaaatgctttgggttaatgaagtaatgatttattatcatttggacttgaaagatgaatttcagagtatggatagaaattaacaaatctgttaattataggtttattataattaacctatgaattaatctattagattacattacttttagatcctcatggaatttgtaaggtgcattgtacatatggctctctcctgtaaaccgcctattatgtatcaaagtcttctttagcaaatataaattgtatccaagtccattact

SEQ ID NO: 791 - protein, 58 aa, Homo sapiens
MNFNTIEILIKRSQQKKKTSPLNYKERLFVLTKSMLTYYEGRAEVRDNHDLLFCFLCR

SEQ ID NO: 792 - DNA, 45875 bp, Mus musculus
  misc_feature (1)...(45875): n = A,T,C or G
cctgcgtgtaaatcaaagaatacaggaagctctctgagaaaccagggccagcctggtctacagagtgagttccaggacagccagggctacacagaggaaccctgtcttgaaaaaaacaaaaaacaacaacaaaaaaaaaaaagcataaaaaaaattaacataggaaattactagttacatttatccttgcttctcttgtcagagcagtagcaactagaaagcctgaaaaggtatcaatagtcatatgtgcatatgttatttttttaaatcagaaatatgaatatccatttgcaataattgattaagtataagttaattcctctagaattaacaccattgtgtggaacaggtagaaactgaggacattgagaacaagtctttacagtttgatatgcaaattttccaaaaataccacattatctcacaccattactattttgatgatgtaaagaaggaggttaagtggccaatcgttcttgtataaggcttatacttgtataaggcttataatctgcctgggatataaatccgggacagcatcacctcaagaggtcctgtccaggcaatctaggaggagttcctttttttttttttttttttttttttattttggtttttcgagacagggtttctctgtgtagccctggctgtcctggaactcactctgtagaccaggctggcctcgaactcagaaatccgcctgcctctgcctcctgagtgcttagatcaaaggtgtgaaaggtgtgcgccaccagacccggctgcaataaccaatttaattgctcttcaaaacaaggaacaggcaggtttttaagactttaaaaaaaaaaaaaaaccttcatgtttttatcctacaattcctttttaacaccacaacagcgtcataataggatgttaaaactttacttgggccaggtgtggtggtgcaccaaaaaacaaaacaaaaacaaaaaaaaaaccaaacgttacttggagatgaataaagatgattctacattaatattctcttttgtcaaagaattgctgtgggcacattgagtaacaataactagaatatgcagctaatatttgattaccattgattataattgataacaattgattacagaagcttcctctactttctgcaaaggcttttgtttttcaccagtgaatttgcatttcccttaataacatccaacaaaggcttaagtcctcttgtggtgagctttaggtgaggtcttagcaggtctcctggaagcttttgaaaattatttgaagtaagcaaatgctatcatcaggtaggtggtgggatactgggtattttttcctgtattttgaattaaagttgacagtcactcacaagatatattatttttgtaaaattaatatcctagagatagataaataaaacacgaatgcttttgactcttgttgcccttggaactccagactgtgaggcttgcagtcaccagcaggtggcgatgtgcaccttggtggagttccctcagtccttccttcctgcctccctgggagcggtcttggccagaagctgtgtctggctgtctctcctattttcaagtccaaggcttcattaaaggggtggaagaagaactgggctgtcctggaactaacttgctttgtaaatcagcctggcctcaaactcacagagattccccctgcctctgcctctgcctctgcctctcaagcactaggatgaaaggtatgtgccacaactgcctggctctgttttcttgaaaggcacgatctaactatgaatctctttcttacacacacacacatagacacacacacaaacacacagcatagacctcatagaggtccacctttgggattaagcatctgtgctgccacgcccaccttcatgcagtttgtatagcaacaaaggagaaagtcatagaacactttgagttgtgttgatggtgcttcaagcaaacgaggcagagacatctctgctgcagaccctctgggtccctttgtctgtgtggaacgagtctctggggcaggtgagcaaggcgtcggtgggtgacagacagaccaacacaggagattgtgtagaatctgaatgtattctcacaaagtgaacagcaatcttatatagtacagaaaatacaaggggtcagacgtcacagcaggcaaggtacattgaagttacctgacacaaaacaaaggaatgacttcaaaaggatttacaggagccaggtaaatgtttacagtaaagataaagcagtcctgcctagggtcagcttagtgacaggcaaggatttcacactctagtgctatacctttgaaccttgtgaaggcaagcaccaggggctcttggcaggcctcatgaataatgcagtatcacaacccccctatttcctaggccttgctaaattcttttttgttgtttttgtttgtttgtttgtttgtttgttttttgagacagggtttctctgtgtagccctggctgtcctggaactcactctgtagaccaggctggcctcgaactcagaaatccacctgcctctgcctcccgagtgcagggattaaaggcgtgtgccaccacgcccggctgctaaattcttatatgagtgtaacttttaagtaactggagaatccatttgtcaggagaattcaccaacttgcttctaatatgcaatgcagcccgtactgaagatttctatctcggtgggattccctggctctttcatggtattcccttgtttgggtgagatttgctactgtccttagtaaatcctctgcagaccagctctgagctactggctccatcttttgtaatgcttaattagttactgaatagataacttctttttgcattctggccgggccggaatccaagttagtcggcttctgggaacttggaacactggggagacttaactatatcagaatttaatcttaaaaggcatttataataaaatactaaaaaagagctcatagttccatacaccagactaacacggggatagggtatgagtatatgggtaaatgagaacgccaaagctccaggaggtgagtttccttgaaactcttttcctcgtgagtgcttacagacttctcagcctgtcaagcagacttgaccggagtgcgtgggacatctctgctgtctgtctctggcactgtctgataaccttctcagctcttgggttggtggaaggtagcgatcttcacattccagacggatttccctcggtcacaaggtttgctgtcatgacagaagtgggcaataaatggttactgaggtcctgtgagtgacagcccaagattcaaggctctgagcctgtaccattcccagctctccagaatcactgtagctgtaatcagccatcagcctctgcaggacattctctattggtgtgtcatctgtagtgagcactgcattgcctacctcagaccctcaaccccagttagctgtctgtcagacaggcggttcccacatctgctctctcttgtcctgtgtacctggctcctctgcagtcatctactctgagcctcccggggcctctctaggcctcccttctcagccctgtccctctggtgtctgtaggtgatgtcccgcacggccttcgggaagccccttgtggagcagggcaccatcctggcagacattgcccggtcacgtgtggagatcgagcaggcccggctgctggtgctgaaagctgctcacctcatggatgtggctggaaataaggtgggaggcttcagagatgacaggggtcaccccgaggtgacactggaatctacctgtctctccttgtttggcaaactgtgggaaggctcagccagctcttggacaatgatgactgctactgttctgtttgaactctagagggtcagtcatctattgcaaaccagaaaaggccccaggagagaggtgaacttccaccatgtggtcagccctggaccatgctggtgcatggaggtagatgaaggaggagagctgggagaaaggacccccgcagacctggtccaaatacagcattagcctacacaggagcctgttcccatagcaacattacccatttcctatggtgggtggccatgatgcatgtggcttgctgtgctatccggcctcttatgcaggggtcctagacccaggcaagagctgccctaccaggtagtggagccaggtattctgtcccgggttctttgatgcccttgttgctggcggcctgaggatgcccaggtctagctttggtccagttgcccgcagcactgtatccagcatccaccccgacagtcagtttggctttctgttgtcctcctagctcctcatcctgtttttctttcctctgccttctctgcaggctgcagctttagagatggccatgattaaaatggtcgtcccttccatggccaatcaagtaattgaccgcgctattcaggtgagcagccctggactggcctcccgctgtgcctgctaccttcttttccaaactgagctagtcccctccccctcaagctccccagctcccaccccagccctcccggaacagtatgtcccttgttcagtgcattctacttgcaagtagtgagacagctgttgtcagctgttttgagcatgcattcactcttagaactccggctttcttctgttttccaccccatgtcttccaggcctttggagcagcgggcctcagcagtgactaccccctggctcagttctttggctgggcccaaaccctgcgcttaggtgatgaccagctgaaggtggctaagatggaactgaagaatcagtccaggctgcaggagccagcagcacgcagagtgtagatgctgagtttggcatggcctgcaatgtgtggtcctcacatcctatccagcagctcagtctgcgacagtcactgtgacctgagcctcctggggtctcttcaagaagatgtttctggagagactgagctcaagctttaggcgtggaggaaggggatttgggtgcctgggtagctgttcttgagttcttcagatttgacctgtgacccccgccccttcctctgggctgtaggaatctgggcaccttggactctgatgtctccagaggccattaggctcctcctttgtgcttctaggaaagcagggggcgtggtgcacagcaaatgcccctgggatgaagccactgtgtgaccactgatgtgcccacgtcacagaatactgattcagatgctctgtggtaaaagggcctttcgggacacaaagaatctgtctacttcctatgtcacatgagggacatgggtgataaagatacccactgccccacctatgtcacatggaggacatgggtgataaagtttcccactgctccatgactcaggcatctatggctttcccagtgctggccttatatactggggtcctgcgggacatgggtgctgtggctatgataatcccacaggtctccttcacacctcagcagcagttcagaaacgtccccaaaggagccatgtcatctgaggaagacccccattcactgtcaggatctgccatctgccttattggttgtgttggggcatggagggtgacaggcaaggtgccgctgagatttgaagagtaatgtgccctccctcgggatggggggatggtcccctaggcaaggtctgacttctcagagaagcatgggcaccacaatcctagaaaacgatgaagttacagctgggaggagtcaaccttaaggtgcagccacagtcctggtcaggtcagctagtctgacagacaccatcacatgctatactgtagacttacctcaggggacctgccttttcctaattatcccgctgctgcagcctgggccatggattgcagagtgcacagtggccacaggctgctaagtaggtttctctggtgtgctggtccccccacccccatgggctggggacacaggtgccaccacacttgcaggaagatccacgaaggcccccagccctcaatggcagcatagcccctgcatactggcaaattccagcaacccgagccccacctctgtttcaggcctgagagaaaaacaagggtttataaaaaaggaagttgttatcacatcacatgtcatgtggccctaagaatgtctcagaccagctatttcaaggctgagtgcaagcacccagtcttaaccactgagccatccgtctaactcccagtttggatgtaaaagaccctccctgggctggggaggaggctaggcagggaaagtgtttactgccccaagggtcagctcctgagattgtgatccagaacccgagtgggaaagctgggtgtgtgtgccatgtacttgtgatcaatgggagagccatcagaggagggtcctggtggctctctgaccagccagccttgcctgcttagttagttctaggtcctatctcaaccatcggtgtggtcacctcctgaagaattatacctaaggttattctctggcctctatacacacgtgaacagagacactcacactcgtattcgcacacacgtacacactcatgcttgctgtactgtctggtgtgtcaacttgacacgagctggagttatcacagagaaaggagctccaggtgaggaaatgcctccatgagatccagctgtaagacattttctcaattagtgatcaagcagggagagcccattttgggtggcaccatccctggactggtagtcctgggttctataagaaggaaaactgagcaagccaggggaagcaggccagtaacatccttccatggcccctgcatcagctcctgcttcctgacctgttttagttccagtcctgacttccttggtgatgaacagcaatgtggaagtgtaagccgaataaacccttacttccccaacttgcttcttgatcatgatgttttgtgcaggaatgaaaaccctgactaagacacttgtgcacgtgcacacacatgtgcacacacacgactccttcacttttcacacttggggttggtttgaattgagaatgtaatgagctcgggacgtgggtgcacagacatccagtgttgatatttctcaaggacactggggatgccaacaaatgcaagaaagagcagaagggacacaggggtgcccgccacctgcctcagtttccagggaatagttaggtacataatgttcccgcaccgaagtctgctttctgagtacagagagccctgctgtgcttcatttagctgtgagcatgctgcctgagaggcgcacttctctgttgaactggagatgctgataacacagtagctgtaacaataaaagtgaccctggctgggcaaaactgcactcgctggctctgggaagctgtccggagtttcctgcttcccgttctcagttcctcctgcatttatcaggagaattgatctgaggaacctcttagaaaagtttaccatccattcaaggtaaagttcccccaacatccatggactcccagtggagtctcccacaagaatagatgtgtgtgtgagagagagagaagagagagagagagagagagagagagaagagagagagagagagaacaccatggcttcagaagatacaagggaaggatctgatgatcacccctggcttcttcagatccgaccatcctgtgtccatcaggaactgtcctggtacccagtggggaaggacacgtgactttgagcaacctgcactatcttcttcttccctgtgcttctcttggcacgcaacaggatggattcccatagggcggtggcactgtccgacactggggtcccatcctacccagtctttttactgacttttgataagtaggatttacagcacggcagtgacaatagataagctgtgttctgtggtaggggtgtggaagtaatttgtttgtttgaaatagagtctcctgtagcccagactagcctagaactctttatgtagctcaggttgaccttcaactcctgatcctcctgactccacttcctgaatgctgatgttacagggcaggtaccacgagaaagtagactttcttaaaagtctttttttgtttgttttaggttttttttttttttaattttatgtatatgagtgcactgccgttgtcttcaggcacaccagaagagggcatcagatggttctgagccaccatgtagttgctgaaaattgaactggggacccctggaaaagcagtcggtgctcttaacagctgagccatctcttcagcccgaaagtagactttcaacacattcttgatttgtgatacttccaacctgagaagagttaaaggccacacccaatcataaatggaggaggagcctgtatatagcactatcagtatttaattaggaaatgtcccatgacttagtggctctacaaaccggggcattatttgtagtcccccaagattggaagccacctaaatgtcacccatagaaaattctttaaatggtaatgggcctgtagtcaatgagacagcaagtagcccttttacaaacagtgaatggggacaccttcctgcaggaaatgggtgtggagattcacgatccacatttggcaaggcaaaatggtttacttctgcacaagggcgaattgccacgcagaacaagcaaacacacccagagggcccctgcaggtgaaacttttgaagggatatatatatatacatatatatatgtatgtatgtatatattgatggctagccggaactcatatgtagaccaccaggctggcctcgagctttctagagatttgcttgcttctacttcctgaatgctagggctggagaaatggctcagaggttaagagcactgactgcttttcaaaaggtcctgagttcaaatctcagcaaccacatggtggctcacaaccatcagtaatgagatctgacatcctctgtgtgtctgaagaaagctacagtgttcttagatatataataaataaatctttagactgaagccagcggggccgacctgagcaagcaagcagaagtcctgaattcaaattcccagcaaccacatgatcgctcacaaccatcagtacagctacagtgtactcataaacataaaataaatacttcctgaatgctgagattaaagacccagacccatttttctgctgtttttcttttttaattctgaaaacaaaggggtcctgtgtgtctctctgagccaagctttcattctgacctgattgactaatacagagctgcacagtctccagggagatatgaaattcgagcatatcttttggatttctgtatgtgcagacccccggggggaatctggaagtctgctcagtggctcctttttaatttctcccaacagcgttctcagtttcccagattcctttgcacctacggtgggtcatgtgaccagcctgtgaggtccttaaatgcttttttcctcatgttttgtgctaacggtgcggagtccggaacaacttcagctgtccggtgctaaaatgagaggcacacgaggaaacgcgcccagacaccttgtctggtcactggctattacagcgcgggtgacaatatccttcgagtcaccaaagcagggcgatgctcatacacagcagtctcctccttctgggtgcttcagaaacaggctgggcctcagcttccaagggctccacccagtttggggctcctgggtttcaaaacacttctctttgcactacccagaagcccctgccaagattctcaccatctccttagcctagtgatgcgttcacctggttgaaaggcacacaagtgaccaggcgtccacgtctctttctagccaatgacgtcctgcacctcaagtgcccagtcccaggctgttcatggaataaccgcattcatgaattctcttcgccgccatatctgcacagatgtgagccttaggcgccagccaccctgctaggagcgcacaccactctggctaggctttctcagggttctgcaaactccatctctgacttggctttgggagccaggggtcgcgccccttaggccgtgaggggctgggactccctgaccacgcccccgtgtctccgcctcccattggcggctgcagggggcggaggcgaggacttgttcttcaacgctgcagtcgccctccgatcggcaaggcttctctcggctccgttcggctcggctcgcccatttcagttcagttcgggtcagttaagctccgctcagttcagcatgctgcgcgccgcactcaccactgtccgccgcggaccgcgcctgagccgcctgttgtccgccgccgccaccagcgcggtgccagcccccaaccatcagcctgaggtcttctgcaaccaggtgagactcacttcgcctcctcgggccctagggcgggacggagcgggcgacgcggcctcagtttcccctccgcgcccagcgatctttgcgcgcgtcttcccttgcccatgtggccgcagtgtgtcgcctctcggcctgggacagtcctgggcctctttaccccgcatcgatgcagcctgctccttccccgcgcggtccgggttcacccaggaaggcccagccgtcccagctcctctctgcgagacctcccatacacccctacccgattcacgcagacctgagccagagttcagaagcaaaagctgggtcaggacccctctgtggccgctcttacccaaccgggactttggaatgttgtcttagctttttgagttttggtaaagtctggaatcacatgaaagaacgtggttgtgaagtattctttttgtttgtgcaacaagtgggacttggctgccctcttctgtaaaatgggaaagcagtcagggctgatatcttgatgtgttattttgaaagaagatctcattttgtagccaaggctggcccggaattctgtgttcttccgtcagccactcccaccccactttggatttgtgcaggccagacacgcagctaccacctccggtcttcagctttctctctactttttctttgaaacaggatctcactaagttgtccaggctggccttgaacttgtaattctcctgccccaggcttcccagtgctgggcgacagtgatcccatgtctcttgatactacagggcctcgtgcacttggcacttggtgtgagctgcagtccgggttccccaaaagtcccctcccccaacctttgtgcagggcagcgtcctaaacaattcagtctttaacccataagctttagaactgggagtttgatgctataactatccccactacacagctcaagagactgaggtctggtcaggttcctaaagagccaagttaaggtgaagtctgggttcttgtctgggattccaaaagtaagcccttagccaaaacattccatggtctcttgcaactctgggtaggagcagtggtcggatctcatgttgaacgtggacatcctccagatggactgctgaccaccggtgttgtagccttagcctcttgctttctgcagtatgtacttccaggacctggcagccatttacacatgcgcaggacctgtttgaaaatgcccatgaggagtgctacaaggagtcaatccaagggaaaacaaacaaacaaacaaacaaacaacccatcttttgcataatacaagctgtaaatttcagtagctgctggttttttaactggcagctgatgctgaagcaatcagtcaggcttgaaggagctgaacttcaaaaagagccggaattgactgcaagaggaagcacctgatcaatagctttgttcctctggttcatcaggaggcagggcacaaagtatcaggtccaatgcgtgctctggcttgattcagttgtgagtgatccgtgggtggggggtggggggnnnnnnnnnnnnnnnnnnnnttttcgacatcacaaggatagtgcacgttcattaccgaagtttcatggcactgacctattgcacacatcacaagagcactgttaatgcgagtggccttgctctgttctttgcttttataagtttgtgtgggagacagcatgctggctacctgccactcgggtccctaaacactctgtctccggaacactgcttatctttctcagcttttaaagcttttttttggagaacacaagctctctgccctaagccaggcagctcgtggagggaacactagaaacctcggggtgttaaaagtgtggcatcattgcaaaccctgctgccagggatagcaggacttggaagcagtggctctgggttctgtgtgttcctgcataatctctatggctgtcactagggccatttgccccaaggagcagccagtgtggccttgaggtggcttccctagactctgggcttgctaacaagggcacctgcagggcccaagcatcccagtaggtatgtttttttttaagcttcgtggccccatctgaatgtcctcaccttcttgcctaaccgaagcaagctgaacgaggtttggctcatctttctggagtcctctcgccttctgtcccaagtgtgaccacaggttaggtaaacttcttaggtggaagatactttctgcgacttcagcttccctcagaatggatccctgagtgtggcttctgaaagaagcacattttacccctatgtgaatttcagatctcaaggcttgaaatccacccagtatcagtgaagttaatttttttaaaagatttatttattacatgtaagtacactgtagctgtcttcagacacaccagaagagggagtcagatctcgttacagatggttgtgagccaccatgtggttgctgggatttgaacttggaccttcggaagagcagtcgggtgctcttaaccactgagccatctctccagcccatcagtgaagttaatttttacatttaattattttgtcgcttttaaagtgtataaagatacctccggcaccacaggtgtatggatggcttcatgcctctgtctgggcctcaacatcaccagttctgtgtgccagagtctgtaatgaatgtgcaaaccaggttgggtaccatcaatagtgtgtagtttaatgctctaccggcgcctctacctccagggagtggaccgcactaccagcccccacctggcttcccttgaatcctcggaaaacacacatacacaatttgttctttttcaacttgccttagcacacaattgctgggtgcaactatctccgcctggaaaagcccttaccaattttttatctccatctctccacctgccctaaacttcagttgctaaactcccctggcctgtaggagcagcctctgtggccattgcattttgagatctcacatggttgccctcttctcctttctccaaagctggcgaacctctcctccctcgaggctccctttaatcccgacacctgggaagccaagaggcaggagttcaagatcagtgtcagctacatcctgagctccaagccagtgggaacaacacgagaccctgcctcaaaaatcgggaactaacaagatcgagagattaggggtgggctcggttggtgaccaccccacccctacctcccacccccgtgcccagtctgattcccagcaatgcataaaccagatgtgagctcttgcaatcccagcattcaggaggtggaggcacaggaaggccagagagattactggctacatagtgagttggaagtcagcctaggttataggagaacttgtcccaaaaggggaaaaaaaaaaaaagaaaagagaaaacaataaaaaagcgtatacagttccacctcaggtttaactgtttgccacaccccatgttgatgggcctcaggagttagaaagtggagactaagtcccaagtgaaaagcggcagcttccgcataatggcaagtaacaaacccaggagggatgtgcagggtcaagtctggacctcagtggccacatctgtaaaatgggtcaataatcccccccccccttttcgcagggtggttgtgaggacaaaaggggtgtgtgtgctcctcaaccctcagcagggcctgcttgtggttaccatggtcttgcatgtcccagctgggtaaggacgttgctgcttagtttactgcgccacaccaacattagctggtgaatttgggtttgtctttaaaactgagacctaggggctggtgagatggctcagtgggtaagagcacccgactgctcttccgaatgtccagagttcaaatcccagcaaccacatggtggctcacaaccatccctaacgagatctgactccctcttctggagtgtctgaaaacagctacagtgtacttacatataataataaataaatctttaaaaaacaaaaacaaaacaaaaaaaaacaaccctgagaactagttgtggggagactgagtgggagctttgggttcattaaacgtcggtccttttcttagcctcttaacccaacacccaggaatcaaggagaaccaactgtcaggaaaggaaccagagacagtctccctacagagaaacttttctttagatttttttattttacatgtgtgagtgtgtttgcctacatgtgtgtttgcctatatgtccgtgtgtgtgtgcattcctggtacctgagggaagtgggcatcagattctctggttaactggagttacagaccactgtgagctgccatgtgggtgctgggaattaaacccagatcctctgcaagagcagccagtgctcttaactactgagccatgtctccagcacccaggatttttctcagttgctacactgttacacctgcggtatagaaagtgttgtagacagccgggcgtttaatcccagcacttgggaggcagaggcaggtggatttctgagtttgaggccaaaaaaaaaaaaagaaagtgttatagtgtggtaggaggtctctggaaacattcaccgcccttgattgaacttgcaagagttcccataggcagcacttgcaagtggatgcttctgggtggctggcagagtcagctgggtctcaaagactgtgctgcaagggggagatcgataggccttcgttctttgtaatatgaagtacattaagtcaattaaagctcaccaaccaagatctgcctctggacacttcaccatgtacagcgtgtaccagcagactggagggcggtggttctcaacttgtggcttgagacccctttggcaaacttctgtctccaaaaatgtttacattacgattcataacagtagcagaccgctgggaaggagcaatggaaatgactttatggtcagcacatcgtggaggactgtattaaggagtcacagcattggggtaagaaccactgctctagggtgagctgagcctggtgtgttcctgagtggtcagggaaggaagggcagggaacgcctgtggaaagaggtgactttggctgtattttatttgcttcaagtgcatttactgtaatcaaatagtcgaaatacgacattcggtggaggggcacacctgcaatctctgcatgggggatgcaggatgcagaggcaggaggctcaaggctagacaaacctacattactgtttgagtgggcgaaggtggagagatgatgaagggggcagggccggagagaagttgtggacaaagatgataggactctgacagatagataccctgccagcaacatcaacagagtgagtgctgggctaacctgggatacagagtgtgaccatagcttatttgaactgcccccctccccctctggttacaccactagtttactattttttttttccctttggtttttcgagacagggtttctctgtatagccctggctgtcctggaactcactttatagttcaggctagcctcgaactcaagaaatccgcctgcatctgcctcccgagtgctgggatcaaaggcgtgtgccaccacgcccggcactggtttactcttatagaaagctaggggtgacccacagagcctggagatgtctttggccaccactgattttaaaaccagggaccttaaacagtgttcaataccacatgggtgacccaccctgacccattccacaccaccttcccacccattcccacactctgctcatgtcaactcccagatacgttacaatggatccctagggagtgaccctatctctggctcctttggcgtagagccacggcaattttcataaacggcgagcatttgtaaattcaacatttactcaaaagcagtggctgcagtcctgtctgtggggtcaaggtgagtctagcatgagtttgggcatgtctccattatgcctggtctgatagccaagctctatcatctggccccggactgaaccttccttcacctgtcaactacatcctgagctccaagctcctgtccactgttttctagacagggtttctctgtgtagccctggctgtcctggaactcactctgtagaccaggctggcctcgaactcagaaatccgcctaccactgcccggcccatccacagttctttaagtctgtgagttactgttatccctgccacaaaatgggtttcaggaaggccataggtttgaaaccaggctttgctccgcatagcttgatcatggacagataagctacctcaggatgaagcccctctgggtcagaaaaagagtaaatatttaaggagacatttgatcaaggctttgaaatcagctgggaggagccgcttctgtgatccaatttgtatttctgcttggcaaggaactgccttagagtaaatattgagtttacaaatgcttgctgtttatgaaaatgtctgtggctttgtgccgaaggagccagagatatgatcacttcctggggacccaatgtgaaatatctgggagttaacatgagcagagtgtgggaagaggtgggaaggtggtggaacgagccagggtcaggggtcatggtgagacagaattaccagctgtttaagcacagggacaaattaaaacctcactatcctggcaaaagtttcaaaatagagccaagccccacctccttcctgggaggggcgacgataaatttggcagtacaaaaagcactggcttgggagctggggggtgggggggagctcagtgcctgaacatctcaggggttccccttagctttgaccacaagctgaccctaggtgcctctgatgttaaagagtacatctatatgtgtgtcagtctgtgcttatctggaacttgacccccttgggatcttgtaatgcaaatgctagcgggtgctgttcactggatggttacataactgccttttaagaagcagatgggcgcttgcttcctgctgcaggccttgggtttgattatagcaaagaggagaagcagagtaaagagatgtgggagagattgagcagggctggtaggcgctgggcgtggtgccgctcaagaggctgaggcaaggggattatgggtttcgggctagcctaggctacttcaataaaggaggaataagctaaaataaaaataaaggaaggaaggaaggaaggaaaaagcgagaaagccagaagaattccctaaaccaaacttttttttttttttttttttggaatcacccgtggggggtgggggtgaagcgctccaggatcgtgggtatcctaggagacttccatgcatcaggatttgaaagggattcccaggatggtgctttctttagcaaactgagcagccatctgcccgcagaacctagtgcccaggtttccttgggactgcatgtctccccagagtcctgctgtggtaggaaacgcaaagatggctgtaggaagtggatggaagagcttgcctgctgccttagatagagtaggattcacaaaacaatggcagcatctgatccggaaagacacctgcagctcctattctcagggggccaagatccatggtccttgtctcccagtctcctgggtcctccctgcggggatgatagtgctccattgggaagccagcaatggactctccctctcacaatgtgatgctgctcctcctggaccaggaccacctgtgagagaatattactgcggggcagtggtggcacaagcctttgatcccagcacttgggaggcagaggcaggcggatttctgagttcgaggccagcctggtctacatagtgagttccaggacagccagggatatacagagaaaccctgtctcgaaaaaccaaaagaaaaaaagagagagagagagaatattgccaatgagtcctcttgtttgccccttggcagtgttctctacagctaaaggcacaggggctctttatcatcatcttccatcactggaggccatgctgaggaggaagattcgttccctttcccgttaaagacagttccacacttgggaggcagaggcaggtggatctctgagttcgaggccagcctggtctacagagtgagttccaggacgactagggctaaaagagaaaccctgtctcaaaaaaaaaaaaaaaaaaaaaagacagttccagaaggggctgggaccagaaagtgcaagtctcacttctgtagtgagtgtgaaaatgaaattctttgactcttttagtttaaaatcaaaacaaacttgatgccccaccggctggctcatcggccaaggatgcttgtggttgggcctgatggcctgagttctagccatcaaaggcccaaggtagaaggataggatgacagacttccaaaaacatgtccgctgaccatgacacactgtgacgcgcgcgcgcgcgcgcacacacacacacacacacacacacacacacacagagttaatcaaacaaccaacttgaaattctttctagaaagttccctccttccacatatcacagcttgtggtggtttgaataggagtgccccccccccccccgtgttggcccatagatttctaggattaaattaataaaatgcccaatgtatctagctgagttttcttaaaggtttgctcttatatttatatagtttatactgggattaagagtgtgtaccgccacaaaactcttggggtcctctttaatggctccctctgagaccctccactttctccacagcctatgtgcagtcactgggaccctctcctcctcaaaacttaagctccagggagccaaggctttgctgtttggccctgtgtgcctgtcatggtggtggctctgacttactgccagagcttagaggacacctagagtctgtgaaaccctcttgacaggggcagacactgtttggattttactttagatttcagagtgttacctcctgacctgtgtgttttagaaaccgaagaggaaatgcattcagcaccttacataagaaaggcaggccttggttgggggccaggagggttagacgccagtggacttgtggcttggattctgccctcttgtggtctgaaggcgctggctgtgctgggctgtgtgagagcggcctgccctcctggctccccaccagcgcttggctgggggtcaaggggaggggcgtggtggggaggaaatggggaccatgaactcagcaatctcttatttcaccagccaagaaggaaggaaggacagaactttgaccagtcactcccacagactggaagaatgacacagcatattccagccttgcctccgagcacagggacaaggcagggtgggacagtgttccaagaccacctaatttgattaggccacctctctctgtccaacttcctgatgtttcaaagtgccctgagaatttcttgggggtaaactcatgaattctgtctggaggggaaagccgggtggctgagtcactcctggtctgagatcttaagttgtagctggctgtgcccttctaggataagtgttataaaacaacctgtggccgggtcctggtccggaactgcacacctctcatacagacaatctttatacagacatctgagactcatttccccagtttccaaatggggaggggctagactccagtctatgcctgcctcaccttgaagttcgatctttctgacattcagaataaagtgtagcggggcgggggtggggctggtcatgggtgggggtggtgagtaagactgatggcaattgtatttttattgggtactactattattattatgactttgtgagactgggttttgctatgtgctgtgtgctggtctcaaggcaatcctcctgcctcagccttctaagtgctggggttatatacatatgcctccatgtttagctttgaggagatactaacctgggccatggctggagttggaagagggcagataacaaggtcttggcatctgtattagtcagggttctctagagtcacagaacttacggatagtctctagttagtaaaggaatatattgatgacttacagtcggcagcccaattcccaacaatggttcagtcgcagctgtgaatggaagtccaaggatctagcagttactcagtctcacgcagcaagcaggcgaaggagcaagagcaagagcaagagctagactcccttcttccaatgtccttatattgtctccagcaaaaggtgtagcccagattaaaggtgtgttccaccacacctttaatcccagatgaaaggcatagcccagattaaaggtgtgttccttaactcggagattcaatcttctggaatccatagccactatggctcaagatcttcaaaccaagatccagataaggatctccaagcctccagataagggtcactggtgagccttccaattccgaattgtagttcattccaaatattgtcaagttgacaaccaggaatagccactacagcatccgaatgcttgcattccaccctggctcttgtctctgctgtggatgtgaacccatggccaagcttccccctcccctctcccctcctgtacttggtgaagggaattaagacgagtgctggtagcccggcagtggtggcgaacacctttaatcccagcacttgggaggcagaggcaggcagatctctgagttcgaggccagcctggtttatagagtgagttccaggacagccagagctccacagagaaaccatgtctcaaaaaacaagcaaacaaacaaaaagactagtgctgctcacagctgtgcctgcggatggagctcgtgtagacatggagcagatcatgctacatttccctgccctctctagcttggccctccagcaccctcctaacgtctttctgtgccgccttgccatggagggctctgtgagcctgtggcacgccgcatccattcccaagtcttctccacttcccctctgatccttcctcccctttgcttcactcgaacctcgatggggagagagagagagagagagagagaagggtttttagcccctggggtcccagcccaccacagcacaggtggcctggaagtcagcccagatgagttaaggtttcaagtctgagcctcacatccaagtccctcactgggaactatatgggtctaggaaactaatattggtggatattgaagccacacaagcatagcttgacagtcgagtttacctttacatgtatcttgccagattcgggcagtgagcagctgcgtagtgcagttcagtgagagaaatttgtgactggtacagaaaattcagctacccaagacgcccaatgcccattgcagtcaacacagccagctgctcatggcagggcatgcctgggcacgccaccttagaaggggaattgtggactccgctctggaggtaaagaaggctgggccaccttcagggtcagaagtccctgaccctggggacagagccaggtatagaaatgtccaaatctttagtccaaattctaccttcagcctatgtccttaatcactgaactgggccactgtccccggcacgggacagagcctgacctggaagttattcagtgtatgctgcagagaggaatggacctactgaagaccatctctccctagaataaagatggctagctggatatggtgccgcacacctttaatcccagcactcagaaggcagaggcaggtggagctctgtacatttgaggccagcctgggctacagaatgagttctgggaaccagagccactctgagaggccctgactcaaaacaacaaacaataataaagaggtcggctgttaagtgttttcttgtttgtccaagagaaaaggagtactcgtgccccttctgtgagtctgggtctgtgacacattcttgttgaagctagtctctgattcttcctcccagccccatgctcaaagaaagaagacttagactcaaaattatatttacaaataccttggccatatagctaggctcttctctgacttgatataattaaaagcatctcatttattctaacccactttctggcatgtagctggttacctgtactcaggtctcatgcgtccatcttgtcacatcttcccaggtccatcttgtgtgtctggctctatcccagaatccttctcttctggaatgttccacctctatttcctgcgtaagctgtaggctttttaattgacaggcgacgtatccgtacaatacatgagatattctctcctacacgtctgacctatagaattcagcaaacggagagagcagcttctaaaaataggccaagggaaacctttcagcttccttctgggactccctggagagaaaggccagctgccccggggcagctgactagtcagggtcctccatgctgtcaggaaaccaagggtccatttggtactgggtgaataaaggaagagacgccttgctcatcctgcccaggtgactccttgactgcagtcgcatgaggagcccaacccatgggcacagctcttagtgaatggtctcaagccactgtgtttgggggtgtttgttacccagcggtggatgactgacacatcgggaacagtctcattattccgcaaagagtcatatggtcagtaggggttctgcttttgatgtgcatattgctagacttgtgcttctaacctggaatctgcagctctctggcactgatctacatctccgtgcttactctgttttgttttgttttcttgtttaccttacgggtgctcggtagagctgaaagcggaacctgagaacaattttttttttctcgttgcagatcttcattaacaatgagtggcacgacgccgtcagcaggaaaacatttcccaccgtcaacccttccacaggggaggtcatctgccaggtggccgaagggaacaaggtaagacctggtgacttatatccctgtagcttgggctttgtttgtttctggggtggagtctcattctgtagcgtaggctggcttagaacttgatatatagcccaggctatatatatactggaacttgggacagtcctcccaagctgtgctccgagtgtaggatctataggtattgctaccacacagtgcttctggcctccgttttgagacggtcctttcctttatacctactgagtaaaggacctactgtgtttttctggcttatgggctatctcgatggtagatgtattaaatgaaagccctgtgccccccctctcagctcacagcttcccctgtgcgggatatgctaggctgcccagcctccaactgttagggtaatcccatcatctttttttttttccctttatttccccccttccctttcgctacggcccataggtttttttatttgtttcctcattaaggatggctgtgagccacaatgtggttgctgggatttgaactcatgacctccagaagagcattcagtgctcttaaccgctgagccatctcaccagccccgaatcccatcatcttgcaaggaatggttccttcggctggacttgcttcctcggaagcacggaaacagggtccctttctaaggattgagtcatgggagcctcttgctcctaatggccagaggttttcccatcacacccccaggtgggggtgtatgttggtagcttaggttcggggccctggaggactgtgttgggaggtctcctgcactgcccgtactgactgtcccatgcagtgcttggcagtggggtgtacaggactgggaggcattcactgctgaggtctgagctcccagggttactgttttacaggaggacgtagacaaggcagtgaaggctgctcgtgcagccttccagctgggctcgccctggcgccgcatggatgcatctgaccggggccggctgttgtaccgattggcggatctcattgaacgggaccggacctacctagcggtgagtcctcagtcttcttgcccacatgtcctacagctgaagtgagctatagtgaatgaagctcatagcatcccctggacacccagaggccttgctgctcgtggatcataatggtatccgatggacagatactttcgggatctacctcttcctaaccagctaagatctccgtgtctgccctgatgtggccaagatggaagagttctagaagagggggagtgtttctcttacacaggccctttgtaactggtcacctcccttgggccactctgcatggtgggccaggcccttaccttggccaccctgatgggaaaactcaaagggagccccattctctatggtggtcaccagagtgaactgtccaggtgcaccatggcattcaattcatgaagttttgggacaaagtctttaacttggcaggttccactgctgggcaagctgtgccactcgctggctcagacccctctgcttccccttggttagttcttgttgttgttattgttggctattttgggagagggggttttgttttgctttgtttttcaagacagggtttctctgtatagccctggctgtcctggaactcactctgtagaccaggctggcctcgaactcagaaacccgcctgcctctgcctcccaagtgctgagatttaaaggcatgcaccaccactgcctggctccccttcatttttttgacagccaggcttcttggagccctggaaactttgcacacactgtcccctcctgctggactcatgacttcatctccctgcacccaggctgcccctccccatccttcagggttagtcctcgttggagtctctgaggtggggagacttgttctttttcccagcatctttaatatgtgtgacaggtgttccacatcagcgtgctttttgatcgtttctgtattcctaacagttggatctgggtgaggtccaaacttaaaagtctgtctgtgaagtgggtgaagctggctcctcacgccttctcaacccctctccctgttgggagaagctggggcaatggtccaaatataccggagacaatcagtggtccagaggagactcaccctgagcctccaccgtccctgtcgagtcaggcccagagtcactggtcatccatttacttccctttattcctgcaccaacatgtctgccaaccttggtctctcctcaggccttggagaccctggacaacggcaagccttatgtcatctcgtacctggtggatttggacatggtcctgaaatgtctccggtatgggctttgttctggccgtctcgaagagggagggagcaatgccaggagggagaaacagttaaaaagatgcagagtacacagggactggagcctccgctcagggtccttctcatgagaaaatcactcagtgtagaccggccgtctaagtcagccctctgagattctcctctgtcttgagctgtggtcagtaatttctgtggtcctcggaacgaaatggccagttactaaggaatctaatgtgttggtcttcagttgttcatggtttctggcagtctagtctttccagtcctctactttggtttctgcttttagcctggctaaaggctcgacagttgttctgcttgctgattctgttgtttttcaacatcttttttttttttttaatgtatataattacactgtagctgtggacatcaaatcgcattacaaagcccagcatggtggcacacgcctttaatccctgcacttgggaggcagaggcaggtggatttctgagttctgagttctggtctacaaagcgagtttcaggacagccagagctatacagagaaaccctgtctcgaaaaaaacaaaaaacaaacaaacaaacaaacaaaatcacattacagatggttgtgagctgccatggttgtgctaggaattgaactcagaacctctggaagagcagtcagtgctcttaacactgagccatctctccagcctgatcatcatcttaatgaccaatgaggtggctgattagcccttggcatttgcccattatagacaatagcaagagtcatgtctcagagtgaaaggcctacgtctcaaccccactcccttatttcttcttttgccacacgtggcttcttcagggccagcttttatgttgtcatcccgtagaccaaatgccaacattcctggggaagggtctgcaacctgtttgctttgcgtctgaccagccaggggctgtttggacagactgtggtatggacagtggctggcagagagcagcagtgcccaaatggcaggagttgtcttccaaagcacgggagactccgccaaggtcatcatgtccccaggggcagtgagcgcttccagaggcatgtcctgtcatgactgccagggacggtgctgctggctctgtctcagagaggccagggacactgctaaatatcctgagacccacagaacgagtccctgcaacaaagaattgtccaactcaaaatgtcagatgtgctaagcctaaggaactcaagtcccaacctgttcagctttggcagaccctattcacttcgggaatctttcttctgccaacccccatgcctcatcctgagtcttccctttcctaaaggcgtaacggtacacgccatgaccacacactggctctcccttggcaattctgcttttctgtcatctgtgtaccctgattgggatagtgagcatcatgggtagaggctagtctaggatgtgtctgccttcctccactggtcatacctgtgatcctccagtgctgggctggccccacacacttgttaataaacccaggtccttagttaaaagactgagtctccatcaggtatgctgaataggtgggaaacagcccaggctgtggacctcgtatttgtctgaggctccgaagtttctttgagagagtagattactcccatgtcttgttggtcatctgtttccttctgggaataagccaaatgccagggttgttgcctgtgcagtacgagggcatctctctgccgtgtagtgcaggctagacatgcttggatttttcttcttttagctattacgctggctgggctgacaagtaccatgggaaaaccattcccatcgacggcgacttcttcagctatacccgccatgagcctgtgggcgtgtgtggacagatcattccggtgtgtaccagcccctctggaagtcatggtgccaggggggtaaaacttggggtcagccatgctcatttggggtaaaatgggggtatgtccattgtgaagtgggagattctcctggaggtgtcacctgaaggtgactggttgattgttaggttcggcgtgtctagtgggataggtttaaatcgtttatcccctataaagcctcatcttcatctgaatagtggcagtcaattgatcatggggagtcaggaactcgcggggtacctagtacccaagaggctaataggtgtgagcctctgtccctatcagctaccagtctcatccagtggcccaacccatggctaagtagtagggcccctcaggagtggtccttcctgccacctgctgtgtctctctgaggagcacccgcagttggttgactgttgttttgtacagtggaacttcccgctcctgatgcaagcatggaaactgggcccagccctggcaaccgggaacgtggtggtgatgaaggtggccgagcagacaccgctcaccgcgctctacgtggccaacttgatcaaggaggtgggtggcttgcttctgctgtgacctctgaatgtcctcaattggcttgctctggagatctgaggaaaaccttggactcctgagactgtcgtagaaatctgtcctagaaatctgtcctctgtaccttacagaggggaacttggtcctcagtaacttacccagaggggaactcagtccttagtaccttaaccagagtcagttaagtctttcacactttatccagaggggaacttggttctcagtaccttagcgagaagggaacttggtcctcagtaccttagccagaggggcacttggtcctcagtaccttaaccagagagaaacttggttctcagtaccttaaccagaagggaactctgtcctcagtaccttatacagaggggaacttgggcctcagtacctttagcagaggggtccatattactgtctctcacactgggccctgtggcacaagactccctaaaggatgaaaggcactgttctagaactgtcagctcctttggggaccctatagccaggctccttgtcccagccacttttagggagtccctgtagggtggctcgtgtagtatggagtggccttcatttgtgtgtgtccccagatcacttttggggacaatagggtgagttttctttgtcaacgccctgggagcaagaggctgacatccacgtctcctggcttcccctacaggcaggctttccccctggcgtggtcaatatcgttcccggattcggccctaccgccggggctgccatcgcatcccatgagggtgtggacaaagtggcgttcacaggctccacggaggtaaggtgtctcaggtcctcaggtttgcagcatggtggctcaggctcagggcctgttcccttcatgcctctgggtccctaaatgacagctctcatatgtgtgccagaaggcagctcaggactatgttctctgtggtctgccagcctccctggatgcagcttccaggtggggacggggatggtgtcagcacttaccccagggggctgggactctccggcttcagaaagcctaggtgaagtccaggccatgctgttgtgcccctgggggacccaccggatgcccagaggctctttttattccctttgagaccaggatgttgcctttaaccccagcatagggaggtgcaggtaggaggatcaggagctcagagaaagtgagctacttacttagtaagtttgaggccagcctcagctacacaagacagtgcctcaaaacagaaaacaagccaggcgtgctggcaggcggatctctgtaagttcaaggctagcgctgtctacacatagtgagaccctgtctcaaagcaggttaaaggaaggagggatggatgacagctcagtgacttatggggatgaggcaggacagcagtttgtgggtgcttgctcacggctgtgcggaccaggtcaacaagacaggaagtggggctcagctgtaacctcctacaaaggacccacttcctccacctggacaacaattcgaaaggttccacaatgttccaaaacactgccaccagctgggtgaactagatattcaaacatgaaagccagcggggtcattgcacgtcgaaccgtgacacttgggtgagcccacctcgttgagcctctccatcttggacggtgagaaccaagtccgtgcacgggcaccggccacggcatgctgagctgtggctgcttcagaagcagtgcctgtgtgaagcctagatgagaggagcagggtggttatggggctgctctgtggtagagacttagagagtccctaaacaagctgtccttggaagcagggacacatttcacatgccagaggtgagcaggtccccaccccaccccgaccccctgacatctcagccttctgagaggggacactagttagtgtgacaacagtggtttccagacagctttacctcccggccccttccacacccagccttcagtcagaagctttgatgagtgtcacagaggcgcatgtggggtcacctttgtgccaggctctggggaagagtagtaacctgtgcctgcctcacagacaggacagcactgagccaggaaggaggccacacaatagtttgattgggtcctgcctcctcattggctatcggggtaactggctatgcgacttggctactcctagcctcagccccctcatcctcaagccattccggcctctaagggcgtcaggagggctgagtctgagtcccagcacctggcacagatctgggttcttgtcatgagctcagtggcggcagtggaaggtgaattcttgggtctcttgggacccagggactgcgtgtgtggagcatctagcttccttccccctgctaacagcagtccatggtgtctgtgtctccgcaggttggtcacctaatccaggtggccgccgggagcagcaacctcaagagagtaaccctggagctggggggaaagagtcccaacatcatcatgtccgacgctgacagtaagttccgggggctgcagcgaggcctcggctccagtgggattggtttggggcctgtgtggtctgacattgacctctctccatagtagctacctgttctgtcattagggccagcctgagccctgtactgcccacgcacaggcccctaggccaccatacctcagcacgtcctctctacgagacacttcctttcctctgtctctttctttaaaaaaatatatatatatatttatttatttactttatgtacactgtggctcacactgtagctgtacagatggttgtgagccaccatgtggttgctgggatttaaactcaggaacttcggaagagcagtcagtgctattaaccgctaagccatctctccagcccctccactgtctttcacagttgacagtcttcagcaagggaagagggttctgtttcattctggccaggaattggcctccagcaggcactaacccctgatcttgtgaacagggtttgtgggtgagcattactggtagttaacatctcctcgtgtcacctctctctctctctctctctctctcccatcccacagtggactgggctgtggagcaggcccactttgccctgttcttcaaccagggccagtgctgctgcgcaggctcccggaccttcgtgcaggagaatgtgtatgacgaattcgtggaacgcagcgtggctcgggccaagtctcgggtggtggggaaccccttcgacagccggacggagcaggggcctcaggtaagtcaggcagctgctgctgagcctggagtccaaagccagtgtgccaaagcagaaaggaccggatggcttagccttggtggggctgggttcaagtgtctcctctgctgggtactgcctgtgtatcctgttaggggagaccccagctcctgtcttgagtcctattatttcttattcttcatagaccatggaaggagaatggccaccaaacctgctaaggagccactcccttaatagcctatgttttttgtgttttcattttgcgaatctctgaatttaaagaaacaccggggtatgacgtgccttgcctagtggtaaaggatgtggtgtctctctttggcattatgcttctgaccatggccattttctctttgactcttgctccttaaaagacctgcgtctcccttccagctacctctggctgtaggttctcagcccagagctgcagagaggccctgatcttagcttctcagtcctctgcgcctctccctcaggtggatgaaactcagtttaagaagatcctcggctacatcaaatcgggacaacaagaaggggcgaagctgctgtgtggtgggggcgctgccgcggaccgtggctactttatccagcccaccgtgttcggggacgtaaaagacggcatgaccattgccaaggaggaggtgagcccctgggccctgctgcttttggtaggagggagaaatgggtgatttggtccagttttgacagtgtcccccagactctggttttgagctatctccatgccttaagttatttacacgaagattctgatacgttgctgttcccttaaggtttctagggcttctcaccaacgtagcccagcccacaggactttatattctttcccctggaagtcatgagtctgggaatgggctcatctggccctttgcatagttttgacccaagtaagacatcagatgaggccccgtgtttgacttcttacccaacgtgatagctcttgctcgcctcctctctgagcttgcatgaagctgttcagctaggaagctgtatgcaggacagcacagtgtcaagggtctcgattgcctgagtgtgctatgcatcagcctgtggtacctcgatttagttcccatcccgactctgaggttcctgggcatcctcccctcctctgctctgtcccctgccccctgtcctctctgggaatcagtcatttcattgtggagacatagttcctcttcctgtggagtccggaccccattcccctcatccccagtcactgcagactgccacttcccagcgacttccttcctggctcccacttctaaggctcctctgccccagctcgatgaacatgctggtttcatggtaggtgctcatacgatggcccatcatccctcggtgggcttctgggcaggtctgaggtggcggcaccgactgccaccgcagcacatcttgcacgtaggtcttggtttctgaatttcattctccaccataggaagaggagctacatgaacaagtggcctgttctggaaactgcttggaaaaaaaaaaaaaaaaaagcaagagaaaccagaggccacttcacaatcgcttgctcagcagccagcctgtgccttgtcccctgggttaaattggatgggagccagtcttaaattctctaggctaagttcacatgctaacatatttcattccctgtgagcctgtttagaaataagataattgtatgcaaagcacagactacccaggaggtggccagtgctgccagtccttgtcccctccctttgtagtccaggatctgggaggcagctgtagtccagaactggttaggtcaggtctcaggctaaacagtacttgcattctcctgacacttttcagtcctgaaagtggggagcaggtacctccctccttccattcttccttctctgcttctccctccagatctttggaccagtgatgcaaatcctcaaattcaagaccatcgaggaggttgtggggcgggccaatgattctaagtatgggctggcagccgccgtcttcacaaaggacctggataaagccaattacctgtcccaagctctgcaggctggcactgtgtggtaagagctgctcctcaacccagtaaaatatctccccaaatatctcgaaccccagaattggttctcctatgccggagaaggacaccgtcccccctccagatcccacgaagcgggtgatgggctcccttcctgagctgtgacggtgagagcccaggctgagcataaacaactgctcagcgcctgcttcatcaccgttaggattaaagaaagagcaaacgtggatggggctgcatagagatcagtaccctctgcttgactggttggaataaaatagtcagctactgtggagcacactctctggcaggccttcaagaagttcatcataggtgactgtgtccagagaagccttctgcgctcctgtgggtgggcatcagcaccctgtaacggctaaagcccagaagccatggtgtgagccagtggaaaatgatacattctcacaggactctcgtgcagtggtggcgggcatggctgccaacaggtagcaacaactcaagtgttcttgagctggtgggtaaacagacagaaggcagcccgtccctagtggaaagtgattcagaaggaatggagtcctggcgctggctgaagtgtgtgtaaccatggcaacataatgctaagtgacaggagtcaggtgctgctaaccttcatatcatctgactgactctacagccccacgggggggtggggggggtggtgctccattagtggatgctgggcctggaggaagggggcgggaagagaccattaatgtttctttttaggatgctactaatactgtgaagttagacagtggttagggcctaattcagaagacttctggttagaccctattcctatgagtgtggtactaccaccaagctgggaccttctttaaaaaacattgttttaagtatgtgtatgtgtgcgcgtgtgtgtgtttgtatgtatgtacaggggatacacctgccacagtgaatgtatgtgggtcataagacataggtggttttctttcttttatgtgggttccgggaattgaacttggtagccaggctcggtagcagacccttcacccacccatccactcatgttgctagcctgagccgaatgcttttaagtgtagagttttcacaaacatttttaattaatttttaacttaaaagagggagccggggtggtgatggcgcatgccttacgcctttaaactcagtacttgggaggcagaggcaggcggatttatctctgtgagttcaaggccagcctggattatgtaacaagttctaggacagccaggtctacatatacagaagaactctgtcttgaaataattaaaaaagaaagaaaaaagaaagaaaaaattataagaaaaaaaattaaaagaaaaaagataaagaagaaaagaaagggagaggtgtgctgtgttgatgcccatctgtgaccacatctgcacagacaaggatgacaggggagtggtccacgtgacctgccccgcctccattttccatataaggtggtgatggtggggctatccacagcctgcaaccgcacgcagtccctcacctgacccgtgtgttctctctgatgacaggatcaactgctacgatgtgtttggggcccagtctccatttgggggctataagatgtcagggagtggcagggagctgggcgagtatggcctgcaggcgtacacagaagtgaagacggtacgtacacagccttcagactccgtggcctggcctctcctggtcacggaagctagtacttgtgattagtttatagtttaagccagagaagccacagaaggggtcagatacagtctctaggatcttacccacaacaggcctgtgtggtcacttgccacagagttggtcagcctgagagaaggcaggaccccagtgggtagaggcagtgaggggcgtccagtaaggagcgtgagcaggcacagatccaaggcaccagttctgcccacgggaacgtagcccagaccccatcggaagcacaaagagggtgtcagtgatgtggacacaggttgtcaaaaaagaaaagtcaggtgtgacctaaatgcccagtgtgttaatgtctggccagccacggaatacagatccctttaaaaatggcttgccgcacatttgatgtgggaagtgctcgtcttttgacgtaaagaatgcaaagtaaagaaaatgcaggtagaggcagattttagaacactttgtgatacctacaaattgagatgcagctctgggctatgagggcctttctttgatgagacacctgtggacgtagccttttcctcagagatatcctgagggctccttgttgggggctgtacagtgctggatgttgcagcttcctgaccttaactcaccagatgctactaaactatgatgccctccaatcctccagaaagggcggccggccccccatacactggcagatggcccctaggtccttccttgggtgaacatccaggaaggggatacactatgctctcctgcagaggtcaggctgctgtcaaggagatgtgagaaggaagagaggggctctcgtccccaacgggacctcctggcattatgaagaattaactgcttctccgaacccttcacaggttactgtcaaagtgccacagaagaactcgtaaagcggcatgccagcttcctcagcccgcacctgaaaacccaacaagatatactgagaaaaaccgccacacacactgcgcctccaaagagaaaccccttcaccaaagtgtcttgggccaagaaagaattttataaacagggcggggctggtgggggggaaagctcctgataaactgggtaggggatgaagctcaatgcagaccgatcacgcgtccagatgtgcaggatgctgccttcaacctgcagtccctaagcagcaaatgagcaataaaaatcagcagatcaaagccacggggtcagttctctaagacgtaaattctgagtcttatctctgttgcattccgtaactctctgctttgggaggagacaaggccgtccttagaattgaattagctctgtggaacactagcgccttggtgtttactggtcagaagtcatgaaaggcaggacccctctctattcctggatacacgggacgccaggatgtccccactatttggtgatatcatgtatatctcattaccctcatccccatcttggtacctgggatcttggttctcacaagtaattctaggctgacgaggagggatgtaagctaaagggaggggagtcactattcttggctgcagctacattttggaatttcacactggcctatctcacaggccagaggaggtagtgacacccgtttgatcctttccaagggtgagccaggttaggtttcaaccaagggacctcacggctcggcatcagttgcatgctgctaactaacctggagtcgattcagccaaaagacagtttccagaagtggctctgttctcccaatctgttctgcggcctctttgaggcacagagcagagcagagccatgtcatgtgcacagtgcaaggtctgcctctcgaactaccagaaccaagagagattggaggtattagtgacagtggcctgatggaggtggcaggtgatggcccgtgaaggtagattttcagggaataagagaatgtggcagtgactggcagctgcaatgcagactctggttcaggctatggtcactgcagatgcctggatgtgtgacagatgtgatgacattgctgaaagacagagggacccactcccagtggaaggccaagagagctcttgagcagggctccagttacgtgagctttctccctcttgtaccagaaggttccattcctagaggttttagctacctgtgacctctgccctgtgtataaatggggttactgtgactatcccaaccctgccctgtcctaaagtaccttcaagggccaccttgtgcccaacctgtagattattccctatacagaaatgctcatgatgtttggcataaaaaaaaaattaagccagcaattagcaatagtcattgtgagaagttacacaactcttggtgccgctacgcttgtgttttggggtgttgagttagctctgcatgggtgctgcaatactcaatcctggaagcccaggagccaagatggttgctcgtagctgataggtgggcaaatatgccacgtgggtacaacggctgcaggcatgatgctcacatcgggcacagggccgcaccgatgcatgcagcctggaccagtgtgtgcttattttcagaatttccgtttatactcttatgctatgcatgacgattagctgcctggtacctgccctgagcagggataagcaggtcaagtccaaggtccacaggagctgggaagcttaggggcgaaggtcacagatcttactcacctagtgagtgaacaaggcgtggagagcaagctgccatcacaggcacaagaaacggacggtgagcttagctttagaactagccagtcagaggcagagctgagggtagaaggctgatgaagccctgaagttgtccttcgacctccatatacacatccctgtatgtgcatgcgcactcaatgaaataaataagtaaatacaatttttaaagatcatatgcctggcgtggtgcctcacacctttaccccagtacctggaggcagaggcacttggatctcttgagttgaaggccggtctgttgtacagattgagttctgggacagccagggctacaccgagaaaccctgtctggaaaaaacaaaaattaaatttgggtggttgcctgtaatgacacaccctgtaatcccaagatttagaagacgatttagagaaggcaggaggattaccaagagtttgaggccagcttggacttaaaaaatcctgtctcaataaaaaaagggaagggggtggtgtcaggccaccaggtagcttggcgaccacagtgaccaccgtaagcagtaagcagtgacgtgagcacttgaaacctgcaggagtgggccctaccttcgtcatagtgtgcaaagtttaccatggagacgccaatccaagcaccacgctgcacatactgactgcatgacatttggcaagtgtgtcatggaattgctgcaggaggattactgtagtctcaagaaaccaaatccctctcaggtgacaagaggaaggggaggagtggggggagtgaggggtctgcggtgagagtcctggagggctgggaactgcttcttttcacttccaaagggcttcctcatctctcaagctccacctccgtccagcttcattgcccattctggcttctgatgagtctggatccttagaactgctgcccagccagccttcctccccaaggccctgcaaggagaatgcctgtggccctggtgtctggtccggttgatgtggaatacctccatcaagctagtgctatagagatgggatgaagcttagatccgagtcgtaccatctaccccgtgaccaggagacgcatccccactagtgatagatacccaaagaagactagaatttgcaacatgagaaattagcaccagcccgatacacacgcattctcttatagtcagtgaggcagagagcagtaggaagaatgggatggggtgggggtgtgtgtgtgtgtgtgtatgtgtgtgtgtgtgtggtggtaattcttggccccgggcgtgtgaatccaactcagtgcgagacaagcagttaatccggaactaaggcaggcaggtgtgatgagcagcctgaagcacaggcttccacacccaagacacggtaatcctttctctgtgaaggaaccctctgggccggaagcagctgtctgggagtgaaaacaaggttctcaggttccgtggaggagcctgatctctctgggtacttggatatgggccgatcacaggagtattgggtgcaaagccgttgtttgtgggtttggccttctctgatcctcaggaggaaatgccggggtcttgagcacaacaaaaaggcacgtgggtgctggagcggagacccagatgttagcgcctcctggtggccaatggccaaaccacagcgatatcctctgaagggaatcaagactgcaagatggctcaaagggaggaactgaaaacagttactgcaagatggctctgcagtaaaggaagcttgccaccaaacggaaccacctgagtttgattcctagaacccacgaggtggaaggaattgagaactgcaagaaaacagggatccccaacaaaaaccttcccgtggatcttcacagcagccgaagggaaaagctgaacctcactcaacatttcatctaccaacatctgtattgtgtgtttgtttgttagctagtttgttttcttttttcttttttttttagatatatttattttttaatttttatttatttttttggtttttcgagacagggtttctctgtatagccctgactgtcctggagctcactttgtagaccaggctggcctcgaaatcagaaatccgcctgcctctgcctcgagagtgctgggattaaaggtgagtgccaccacgcccggcttatttattttaagatttatttatttattatatgtaagtacactgtagctgtcctcagacactccagaagagggagtcagatctcgttagggatggttgtgagccaccatgtggttgctgggatttgaactctggaccttcggaagagcagtcgggtgctcttacccactgagctatctcaccagccccctaatttgttttcttaaaagaccacagttcacataccagatttggggagtccaatcaacaggacaggatacctgtcagtgtggatatctacactgaagacatctgggggggggggagattctgatcctgctccccccttgcctcctcacagcctgcggtgaatttgagaggcccacctagccacccccactttggaactgtcttccccactggctcttggggctctgctctgttcttcccctgggcagtgtggatacttgagcttgaccaggctggatccataccatcgacattgaacagggtgaagcacagggtgtgccctggaagggtaaggtcttgtaataaatgacataagagactgcagctgtcacacagatgaagcaggcatagaagaaagccacggaagaacaagctagcagtctttggggaacacactgaaccctacctgtcttagggttttactgctgtgagcagacaccatgaccaaggcaactcttattttttcttttttaaagatttatttattattatatgtaagtacactgtagctgtcttcagacacaccagaagagggagtcagatcttgttacggatggttgtgagccaccatgtggttgctgggatttgaactctggaccttcggaagagcagtcgggtgctcttacccactgagccacctcaccagcccttttttttttttttttttttttttggtttttcaagacagggtttttctgtatagctctggctgtcctttgtacaccaggctggcctcaaactcagaaatctgcctgcctctgcctccccagtgctgggattaaaggcgtgagccaccacgcctggcccaaggcaactcttataaggacaacattcaattggggctggcttacaggttcagagattcagttcattatcatcaaggcaggaacatggcagcattcaggcaggcatggtgcaagaggagctgagagttctacgttttcatctgaaggctgctagtagaatactggattccaggcagctggaatgagggtcttaaagcccacacccacagtgacacacctactccaatagggccacaccttctaatagtgccactccctgggccgagcatatacaaatcatcacactacccaactgtccctagaacaccatctctcccccatctctcccttcctctcctcagtgcatgccagagtagtgacatcactcagagcagtgatgacatcagagcagtgatggcatcagagttagtgacatcactcagagtagtgatgacatcagagaagtggtggcatcagagtagtgacaccactcagcgatgacatcagagcagtgatggcatcagagttagtgacatcactcagcagtgatgacatcagagcagtgttgtagaaggtaaacaatcccaaatcgggatttctaccctgcctctgaccattcagttcctggataaaagacacacaactttcattacttaccataagttttaaacagcacaagagctaggtagatatctaccctctctgctgtttagaatctactctccaatccataaccctaagttatcacttactcttgtaagaccccaaagccttatgtctgggatatctcactcacagagacacagggacggagatcgatgcaaaacgctagaggtttattgatccagcatcctggggtcatcctgaaattgggatagaagtgaccccaagtagctaaagcacacaccttttatacattttttagagcagttctcagtcacagtttagggctggcagtttatcattggttaacttttaaccgcattaagggggcagaattaaggaccagaggcattgtgtgagcctttctaaacactcagaggactatctcttagtgaggaaacttaaggaccagaggcattgtgtgagactttctaaacactcagaggtctgtctcttagtgaggaaacttaaggacaggaggccaattctgggaaaaggacatcttgacatttacttaactttttacaacagtggtcattttgagccaccacaaatcttataccatgtttcaactgggctgcttttaactccaactggccagccctcagggccatgttttcttggctcctaacccatggagacttctcctctgttggaccatgaaagtctgcgaaaccccgcagactggggtttcatggcttcccacagccagatgcccacccaggttgcatggagagctccaggcagtcccccatgtctgcctgcccagagccccggagctctggcgggacgcaggtcatctctcccactccctttatttcctcacatccagtgccccacactcatcctccttcaccttcttcctctccttgggggtctcctctgaccccaagcctgggaatcctaaaccccacctatgtctcttctgcccagctactgactcagcatctttatttaccaatcagaaataacttggggcaaaggtcacatagtatcacttctaggtctagtgtacactctttggggcaggggcacttagcattaccatacacagcaagaccaaacttcatcagagcagtggggacaggttggattcagtaactaacagcaggaggggaggggcctactcatgcgcagtgttagcattgaaatgagaggtggtctgggggaagttttattgggagagctttacaaagacaggttgaagagagaagactatagacacaggtgaagacagaacgagccagagaatgagaaggagccagatactagaatatatttccaaaattagtgtgaggccgagcagagcaattcaggagaagcagagagaagccagactgaatcagtcagcttagagagaagttggagccagaacagctgagttgaaccagccagccagagctcagaaagaactagaaagggtgatcttattcagcagcaagtctcagagtctgaaaacattctagaccttggtaagattgtacagaggctagaagcttccagtactaggcctaggttagcagtaagcctctgagacaaccatcaccaggagaataaaagtcggggttccaaggtggtttctgtgagacggtgcatgctagtttgatgtcgacttgacacaaaccagagtcatctgagagtggagggagacctcaatcgagaaaaaactcctttgtaaaatccaactctaaggtattttcttagttagtgagcagtgggggagggcccagcccattgtgggtggggctatccctgggctggtagtcctgggttctattaagaaagcaggctgagcaagccacgaggaacaagccgccagtaagcagcacccctccatgacctctgcatcagctcctgcttccaggttcctaccctgattgagttctttttttttttttttttttttattctggtttttctgagacagggtttctctgtatagccctggctgtcctggaactcactttgcagaccaggctggcctcgaactcatagatccacctgcctctgcctcccaagtgctggctgggattaaaggcgtgcgccaccactgcctggcatttgagttcttttatgtacatgggtgccttgcttgtgtgtgtgtgtgtgtgtgtatgcacaccacaaatgtgcctttttctggagggggtcagataccatggaactggagctgcagacagctccaagacgctatgtggttactggaaactgacccagaatcctctgcaagagcagtcagtgctcctaaccactgagtcacctctccaccccctcctgactgctttccatgatgaactgtgttctttggaactgtgagtgacataagccctctgctccccggatttcttttggtcatggtgtttcatcacagcatgaaactaagacaggagagtagctgtgatggacctgactgttaatttgaggcggattgtggaaggactttgggacgttgggctagaaaagccattgagcgagctgttctgtgggaacttggaaggtgacagtgtggagagcaaggcagagaacagaggcctagcttgtgacattccagaaggaagtgtgagcgtcatttaaagactacagaggagctagagaaatggctcagcagttaagagcactgactgctcttccagaggtcctgagttcaattccccgcaaccacatggtggctcacaaccatctgtaatgggatccaatgtcctcttctgatgtgtctgaagagatggacagtgtactcacatacataaaattaaaaaatctaaaaagaaagttttaaaaaaaagattatgggggctattgtatagtttgaaattaaaaaaaaaaaaaaaaaaagccgggcagtggtggcacacgcctttaatcccagcgctctggaggcagaagcaggcagatttctgagtttgaggtcagcctggtctacagagtgagttccaggacagccaggactacacagagaaaccctgtctcaaaaaaaaaaaaacaaaaacaaaaacaaaaaacaaaaaaaaaaaaaaacaaacaaaaaacaaaacaaaacaaaaaaatctgtggttctggctagctgattaacaagagattaactgtttggtttcagacccaaaaaaagggacaagggactaaggtgtatatttatatatcaaagcagacctggctccaggttctcccagtatcccttagtccctacctggcataccctgcccccaaccttgaactttccagtccacaggctggatccttccctcagaggctccctcttatataacccagttattttggtctcctcgatcgccttctccttctctcccactgccccttgtctctccccatggtgacttccctggcctcagtccttggggacagtgaacttgcctgagagcagtttctcaataaacttgcatttattatagtctaatctggcttgagttggctcattcctccagcggagagataatttatcaagaatgactaaaatgaagtctttgctctgctggaacaattatgctgatgctaccaaattattggtggttaagaagagaccagtactagccaggtgatgttggtgtgtacacctttaatctcagcactggagaggcagcagtggggcagatctctgagtctggggccagcctggtctacagagtaagttctaggtcagccagggccacagagagagagagagagaccctctctccccaacccccaataaaagagaactcagcatcattgaggcgaaatcctctgggaagtgttttttgagagcacagagctgtgttccagagacagccaaggttgcacctcatgcgggcagcttggttatgtgtaagagtcacccaggtggcactcgttttgaagacccaaaggggtcacagagagcagctgaggcttggcactgtgagagtccaggagaagttactggtgaaggtgaaaaagcctcagtagcagttgaagacccaggactgaaggggtcatgctgagatgttgaagcttgtcaccatgaagagagcctatgagagactattggtgaaaatgcggcccagttgcagcaggagagcctggatgactgccaagaacagctgcagtagaatggagctggcctgagcctgtgagacaagctgtgtgtgctatagagggcaaagtgggagatgcgacctctttaggggacatcagaagatggtgatcccaggccttgggcactgagttattacactgttgtatctctaatctatccaggacttttatcatgaaggggtgttggattttgccaaatgccctttctgcatctaatgagacaataatcttcttgtggtatttctcttagggggagctggctaccttcagagagagaagacacccaaggcagaggtcctgaccctgggaccgtctgagctctgggagcagccattagaaggtggggtgcatggagaaaaactacgctgcccaccacagccacgtccttggcaaacaatggtagaaacatcacaggaagaaagcttttgcacttcagggatctgtctctaccatcttgccctttcataaatgttggcaaacacctgctgatggctgggagttgaagacaagtctgaccagacacatggagattacttataattcaatagggaaggccagggaaggccagacagataccaaatcaatatgtaagttagaactggggaagaacgccatgagatgagaatagctggcttaatcaaaagtctggctcatcttcctgaa

SEQ ID NO: 793 - DNA, 1954 bp, Mus musculus
aacgctgcagtcgccctccgatcggcaaggcttctctcggctccgttcggctcggctcgcccatttcagttcagttcgggtcagttaagctccgctcagttcagcatgctgcgcgccgcactcaccactgtccgccgcggaccgcgcctgagccgcctgttgtccgccgccgccaccagcgcggtgccagcccccaaccatcagcctgaggtcttctgcaaccagatcttcattaacaatgagtggcacgacgccgtcagcaggaaaacatttcccaccgtcaacccttccacaggggaggtcatctgccaggtggccgaagggaacaaggaggacgtagacaaggcagtgaaggctgctcgtgcagccttccagctgggctcgccctggcgccgcatggatgcatctgaccggggccggctgttgtaccgattggcggatctcattgaacgggaccggacctacctagcggccttggagaccctggacaacggcaagccttatgtcatctcgtacctggtggatttggacatggtcctgaaatgtctccgctattacgctggctgggctgacaagtaccatgggaaaaccattcccatcgacggcgacttcttcagctatacccgccatgagcctgtgggcgtgtgtggacagatcattccgtggaacttcccgctcctgatgcaagcatggaaactgggcccagccctggcaaccgggaacgtggtggtgatgaaggtggccgagcagacaccgctcaccgcgctctacgtggccaacttgatcaaggaggcaggctttccccctggcgtggtcaatatcgttcccggattcggccctaccgccggggctgccatcgcatcccatgagggtgtggacaaagtggcgttcacaggctccacggaggttggtcacctaatccaggtggccgccgggagcagcaacctcaagagagtaaccctggagctggggggaaagagtcccaacatcatcatgtccgacgctgacatggactgggctgtggagcaggcccactttgccctgttcttcaaccagggccagtgctgctgcgcaggctcccggaccttcgtgcaggagaatgtgtatgacgaattcgtggaacgcagcgtggctcgggccaagtctcgggtggtggggaaccccttcgacagccggacggagcaggggcctcaggtggatgaaactcagtttaagaagatcctcggctacatcaaatcgggacaacaagaaggggcgaagctgctgtgtggtgggggcgctgccgcggaccgtggctactttatccagcccaccgtgttcggggacgtaaaagacggcatgaccattgccaaggaggagatctttggaccagtgatgcaaatcctcaaattcaagaccatcgaggaggttgtggggcgggccaatgattctaagtatgggctggcagccgccgtcttcacaaaggacctggataaagccaattacctgtcccaagctctgcaggctggcactgtgtggatcaactgctacgatgtgtttggggcccagtctccatttgggggctataagatgtcagggagtggcagggagctgggcgagtatggcctgcaggcgtacacagaagtgaagacggttactgtcaaagtgccacagaagaactcgtaaagcggcatgccagcttcctcagcccgcacctgaaaacccaacaagatatactgagaaaaaccgccacacacactgcgcctccaaagagaaaccccttcaccaaagtgtcttgggccaagaaagaattttataaacagggcggggctggtgggggggaaagctcctgataaactgggtaggggatgaagctcaatgcagaccgatcacgcgtccagatgtgcaggatgctgccttcaacctgcagtccctaagcagcaaatgagcaataaaaatcagcagatcaaagcca

SEQ ID NO: 794 - protein, 550 aa, Mus musculus
NAAVRSARLLSAPFGSARPFQFSSGQLSSAQFSMLRAALTTVRRGPRLSRLLSAAATSAVPAPNHQPEVFCNQIFINNEWHDAVSRKTFPTVNPSTGEVICQVAEGNKEDVDKAVKAARAAFQLGSPWRRMDASDRGRLLYRLADLIERDRTYLAALETLDNGKPYVISYLVDLDMVLKCLRYYAGWADKYHGKTIPIDGDFFSYTRHEPVGVCGQIIPWNFPLLMQAWKLGPATGNVVVMKVAEQTPLTALYVANLIKEAGFPPGVVNIVPGFGPTAGAAIASHEGVDKVAFTGSTEVGHLIQVAAGSSNLKRVTLELGGKSPNIIMSDADMDWAVEQAHFALFFNQGQCCCAGSRTFVQENVYDEFVERSVARAKSRVVGNPFDSRTEQGPQVDETQFKKILGYIKSGQQEGAKLLCGGGAAADRGYFIQPTVFGDVKDGMTIAKEEIFGPVMQILKFKTIEEVVGRANDSKYGLAAAVFTKDLDKANYLSQALQAGTVWINCYDVFGAQSPFGGYKMSGSGRELGEYGLQAYTEVKTVTVKVPQKNS

SEQ ID NO: 795 - DNA, 145991 bp, Homo sapiens
atttttaagaaacaggatcttgccatgttgcccaggctggtcttgaacccctggccttaagcaatactcctgtcttggcctcccaaggtgttgggattacagacatgagccaccacacctggcctcacaactctttcagctaaagctaaggccaacagaaattcaaaaattaccaaagataaagagaaggcttataagtccttatttaaaaatctgtggtgaggaaaagaataaaaacatagttaggtgcccaggctatggagtcaggctgcctaggtttgaaccctaactctgacacctactagctgtttggctgcaggcaagtgacttatctgtgcctgtttcctcaactgtaaaatacatggcatttttttttttgagacagagtctcgctctgttgcccaggctggagtacagtggtgtgatcttgactcactgcaacctccacatcccaggttcaatagtttctcctgcctcagcctttcaagtggctgagattacaggcgtgcgccaccacatccagctaagttttatatttttagtagacataagcttttaccatgttggccaggctggtctcaaaccactgccctcaagtgttccgcccaccttggtctctcccaaagtgctgggattaaaggcatgaggcactgcacctggccaacatggcatcgttgagaggattcaaggagacaatgcatggaaagcacttggcacagggtccggtctctagtaagtgcttcagagttggtagctactgagcctattattctcactacagccgatattagtttaacttccagtcttacaccaagagggtattattaggtattagaaaatccctgttaggatgatagggattagcccctaagacccagagttagcaataaataatacaactcatgataccaagataaagggttctagccccatggggaagagcatgcagcaacctgtttcgcagtctcagaaaaacatgtcaacttgagcaaccttcacttgatcaaaagacacaaggggaaggatagtgcagatgtacaaggaaaattcattcacagtaaatatccacagtactacctgcacattatgaagggcagtacttgttatagggaactgtgtgggtttattaaacaggtgactgtggtggatttatacgacttcagactatttcaaaagcctgagtgctcttcaacatttttttcccaatctatttctgggtcttttcctttgttacttgcttattgccctagttgttaagtagaaactgtaacaatactgctgtcatagaatgtctcacaaacaaccgcctcccttccccacaccttcatcccactcctactagaagaggaacgcgtccctggaattaaaagtgagggtgccacactcttgcttgtcatttatgtctagctatgtaaccttgggcaaaccatgtatctccctctgcagtcaccctcctcatctgtaaaacaaagataacaacacagtttccgcaagggattgtagtgaggattaaatgagacaaagtgtattgaacacttagcacagtgagtgatacagaagccatcgataaacgttggatattatcatcattatccttattacatgtgctaccagactgaaatggcttaaggcacgattttcccatggtttgcaaagctccttggcacccttggaaggctttctgatggacagtgaaaggagctattcaagtgcttttctgttcttaatgtcaacttgtaaactttaaatccaaaggataattgaaaccttttaaatgtctccctaaatgatggggtactttgtaaacagaaaacataataactgtgtactctcttgcagacagaactccacactaaagcttctctctggagatcacagaacaggtacactcttcccccactaaaaagagaatgaggccgggtgcagtcgctcacgcctgtaatcccagcactttgggaggctggggcgggcagatcacctgaggtccagagtttgagaccagcctgaccaacatggagaaactccgcctctactgaaaatacaaaattagccaggcatggtggtgcatgcctataatcccagctactccggaggctgaggcagaatggcttgaacccaggaggtggaggttgctgtgagctgagatcgtgccattgcactccagcctgggcaacaagagtgaaactccgtctcaaaaaaaaaaaaaaaaaaaatgaaagaagtgggggtaatggaaaaataataagatggtgttaacttcaaaaagtctgggaaccaccgcttttctggaatagttaccgcttgtttaaaaaaacaaacaggccgggcatgatggctcacgcctgtaatcctagcactttgggagactgaggcgggtggatcacaaggtcaggagttcgagaccagcctggccaacatagtgaaactctgtctgcactaaaaatacaaaaattagccaggcatggtggtgcatgcctgtagtcccagctactcaggaggttgaggcaggaaaatcgcttgaacccgggaggcggaggttgcagtgagccgataccacaccactgcactccagcctgggcgacagagcgagaattcgtctcaaaaagaaacaaacaaaaaaacacactagattttttttttttttttttttgagacggagtctcactcttgccacccaggctggagtgcagtggtgtgatgtcagctttctgcaacctctgcctccttgcaaaaccctaaacttcatactcaatctgatctataaaaaatcatgggcatgaggccaggtgcagtggctcagagcatctgtaatcctagcactttgggaggccaaggcaggaggattgcttgaggccaagagtagcctggaaaacacagcaagatctcatctctaccgaaaaaaaaaaaagtgtatacgttataattgtatttctgctaatgaatttagaaatacatctagaattacaattatatcttagaagacatctcaagaatcttaagtgcaaaatgttgtaaatcacacacagctatcatacagtttgaataccacagtttctgtggcaaagagatttttaataaatttaataacttttacctgtgcacgaaactttatcagcaccatatattggttgggagtagagtctctgataattttcatttgttcaattacttcgttaaatggggcaacaaacttcataaggtcatgactggtcattgcagcagggactgtgagaatacacagcatggcactgcgccgcacatcttcttttaaggaggtcatcttactaacaaaaaaaaaattagagtgtcttgaatagatgaggtatggttagtttaaacaatactagacaacttttatgtccaagaaaacaggaaaaaataaaaattgtaatatttcattaatgaactgttctatattataccccccattggactttttaatcttcagttcaacatttattacggttataaatctgcattcggtaaatttgcagtgttttactctcatcaatgtttgaataataatctgtcactggtggccaggcacagtagctcatgctcgtaatcccagcactttggcaggccgaggcgggtggatcacgaggtcaggagatcgagaccatcctggctaacacggtgaaaccccatctctactaaaaatacaaaaaaaattagccgggcatggtggcaggtgcttgtagtcccagctacttgggaggctgaggcaggagaatggtgtgaacctgggaggcagagcttgcagtgagccaatatcgcgccattgcactccagcctgggccacagagcaagactccatctcaaaaaaaaaaaaaaaaaaaaaaatctgtcactggttaacttaaaagcacaactctggctatggacctctcttaaaaggcctaaaaaaacagctctaaatatacgagagaattctgtctttttttttttcagagtcttgctgcatggtctcggctcactgcaacctctgactcctgggttcaagcaattctcctgctcagcctcccaagtagctgggattacagacgcgtgccaccacgccgggctaatttttgtatttttagtagagatggggtttcactatgttggccaggctggtttcgaactcctgacctcgtgatcccccgcctcggcctcccaaagtactgggattacaggcgtgagccaccacgcccggcaagagagaattctaaaccatgaggatgtaactgaggattacaggaagtgttaccaagttgagatggctggaatagagaggaaagaaaatcctcccacaatgcaatttgttttttgaaatgctgcaaactcacttgacagctgtgatccagaatggctacctgtgccgggtgcagtgactcacacctgtaatcccaacactttgggaggctgaggtgggctgatcacttgaggttaggagttcgagaccagcctagccaacatgatgaaaccccatctctgccaaaaaaaaaaaaaaattaactgggcgtggtggtgtgcacctgtggtcccagctactctgaggcaggagaattgcttgaacccgggaggggaggttgcagtgagccaggattgcaccactgcactccagcctgagttatggagtgagaccctgtctcaaaaaaaaacaaaacaaaaaacaaaacaaaaaacaaaatggctacctgaatagtcactgttttcccagcagagatctggcaaatgagttagcacaagaacagccttaaggtatcagctaccattacccaagaaggtagtggctgggcttgtggattatctagccaaatgcttcctttccttggggctctagcaagctttgtttgaaccacagaaaatggtaaaaaagaggtaataaaattgtaatgagttaactgacttcttagcagcctcttcagtaaagatttggtggggacatgagactacaaagatgctgtggatcattttctttgtcctttcaattccccatcaccttccatgcctatctgctaagaaaacattttcctggcagggcgcagtggctcacgcctgtaatcccagcactttgggaggctgaggcgggcggataacctgaggtcggagttcaagaccagcctggccaacagggtgaaaccccatctctactaaaaatacaaaaaattagctaggtgtggtggtgggcacctgtaatcccagctacttgggaggctgaggaaggagaatcacttgaactcaggaggcagaagatgcagtgatctgagatcgcgccattgcactccagcctgggcaacgagaccgaaactccatttcaaaaaaaaaaaaagaaaacatttttcccacatattctcttaagtgtatccacaagcatttcttttataaggaaaagctttgacccaatccacaagattaatcaaatgtaaaacatctgagaattctctaacatacaacagacaaaagtattattattttgaagcttaaaatacccactttccttcaggacaagagactatgctaaagcaaagcaaaaaaaaaaaaaaaaaaattgactaacccccaagaaaagagggttttcttactttgtcttatataggtgcataataccatgaactatttcaactgatggatttccactgaagaatgaaatctggtctggaagctgtttggacggagaatctggggcagcgtttatgcattccttactgtgatctttacttctttgcgcagtgggggaggcttctgaagacttcctttcttccactgtagtttttagttcatctttcaccagttaaaaaatagcagattataaatggataggacatatgctgaaggatttgaactagattaaaatttcaagtcagaggaataaactttgatagagtaattacaatgtaatgcattaacagctattatttgtagaatagctgagtttatgagggcatcatactttaaagctctctttgctccataaaaatctcattaacaccctcagaaacttaaggatggctattacatttggcaataccataatgcaagcaggtatcttctatcacgaaatcctaactgggacaaacattcagggctactaaggtggaaatccaaacctaccagttctgaccacctccatgttggagatgtagtactatctacacatccacttccgcagataaaatgagctggctggccgggtgcagtggctcatgcctgtaatcccagcactttgggaggtcaagaggttgagaccatcctggctcacatggtgaaaccctgtctctaccaaaaatacaaaaattagctgggtgtagtagcgtgcacctgtagtcccagctacttgggaggctgagagaggaaggagaattgcttgaaaccaggaggtggagttgcagtaagccgagatcatgccactgcactcccacctggggacaaagtgagactgtctcaaaaaaaaaaaaaaaaaaaagaaaagaaagaaagaaaaaatgagctggcagagcaggggaaggcacgacatgtttatttggacacattaatgatctgccactgaactaggtggtaagaaattctccctggtagccgggtgtggtggctcacacctgtaattccagcactttgggaggccgaggcaggtggatcacttgagaccaggagtatgagaccagcctggctaacatggagaaaccttgtctctactgaaaatacaaaaattacccaggcgtggtagagggcatctgtaatcccagctacttgggaggctgaggcaggaagactgcttcagcccaggaggctgaggttgtaatgacccgacattgcaccactgcactctagcctgggcaacagagaccctgcctcaaaaaaaaaagtcccccccgtcactgaactgaattgtcaactccaactgttaggattaatttggaagaaatatttggaaacactaacatgtggcttaacagtgtcatataaagcacacacgtagtgaaagacaaaagtatgctagatgttgaaattgtaggctcatcaaacaccgtgtataaaataggcaaccagtgttcacattacaaaagagagtccagggttttagaaagcatacctgggttggacttcatggtctcaatgatcacatctgtcatttctcgacggccgagatgctgatggataatcgctactttctctcctggtgacttgccttctaaacaggctacagctgaggctagtgtcgtcttttttatctcctcatcagacatttccccggctaaagaacacatgaatgattaatacaaggtaataaaacaagctcctctctgttctctattcctctatcattaggttttccttttctttctcctgccttccgccaagatgataagaagcctttgtagtatccatctcactcaactctgggaccactgcagtacacagcaaagagtcaataagcagccaggacaatatactcagaaatgcagggctgttctactgaaatcatgcactttatttttattttttgagacagagtctcactctgtcacccaggctggagtgcagtggtgtgatcttggctcactgcaacctccacctcccaggttcaagtgattctcctgccccagcctcccgagtagctgggattacaggcacgtgccaccacgcccagctaatttttgtactttcagtagagatggggcttcaccatgttggacaggctggtctcgaactcctggcctcaaagtgatccacccgccttgacctcccaaagcgctggaattacaggtttgagccactgcgcctggcccaaaatcatgcactttaaagcaaatcgccaaagagggagccttagagaagatgcaacagtgatcatgcccagatgagctaacattttagtaacacctgataaaatgaaattgtgttcagcccaaaatgaagctatcaagtccattaaaaaaacaaaatttcaaaaacttgtaggggtagtcttaaacatcctggcttatgctcatgccatgaaccaagccatgaacatctgtgattactgtcttaaatcaatgaaacacatgaaaagggaaacggaatttggagacttaactgaaatatccctaatacatgctctgtcagggcagggacaaggcctgttttgcccaccactgtattcccagcccttataccacagtgccgagcacacagaggaagccctctaaatgtttgatgaataaatgactacatgactgacccatgcagatgtctatatgcggctaatatcaatttagctgactctcagaactcagaagccacttttagcctttggaaaggtgctcataagctataaagtcatattcaatctttaatttgcagcttcaaaggtcacgtcctcaggaagttcccaatgacaccatccctacctgcccccatccctctctccaaaccaaacacatcttcttgtaatactttcccaaattgtttctcctttccttcacagcacttaccacagttgtaattctacacatattctgcacttatttaattcatctgtttcctccatgatactgctggtgccattaaaacagagacgctgtctgattcagcacacaaggaaggctccagcagatatgagcataagttttttttttgtttttttttttgaaatggactttatctcttgtcgcccaggctggagtgcagtgccacaatcttggctcaccgcaacctccacctcccgggttcaagcgattctcctgcctcagcctccccagtagctgggattacaggcacctgtcaccacgcccagctaatttttgtatttttagtacagacagggtttcaccatgttggccaggctggtcttgaactctcaacctcaggtgacccgcccgcctcggcctcccaaagtgtgaggattacaggcgtgagccaccgcgcccggccaagtatttcttgaatgaatgttagttaattatctgaggaccaaggaacagagccagagctgcattccccactaaggagcttcctcacttgtgttaatggtgtaaaaagctcagactcaagtccagctcactgagttagaatcccagtttcacccattacagataaccttgggcaaatcaattaatcactaagcttcagtttcccaatgtgtaagaggtacatgtcacatccatctgcctcttagggctgttgcaaagataattaaagaatacaatacacaaaaggtgcttagtacagtgctgggatataggaagtgtccaaattttagttatgactatggttagggggcacttcaatggatatcgttccaaaagggaacaatttaattaacccagggaccgtccagcgttgctggggacccagtccctgcctttacgaagcccatagggaagcaagtgagacaaacacaccactcgactatctcgagagggagacgcgccaggtataaactaaatgccctcagacggcacagggagggaggttcggggcagggcttccctgagataacaaacgggaaggcctctcaaaggcggatgggaaagagagggatcccgattacctctccgtgtcttcctgggcaacagccctcgccgcgggcttttcccgggccagtgctttgggaagggaagccctccgggcccagacccggctacagggaatgcggcgaggccgcgggactcacccgcggcgctgaagccgaagccggcggggacaggcgagtgttccgcgagctccaatcggataacaaccagtgacacactcatagggcaggcgctggccggcgcgggccccggcgggctcaggcgaggctggaaggcgagccgagaggccgagcggcccggggccggcagcgccgccaccacctcaatgcagttgccgccgcctcagcagcagcagctcctcgaacagccctcggagccacaacaacctccacttccgcctcccggccgccgtcgctgacctgcggtttacgcatgcgcgcaggaccgcgcacagcgattgggcggcgtggcaggggtcacccactgctcttccggacgcaattttgaggaggtcggagcggaaggacgtcgtggagattgcttgcgctggggtgccacacttaggctgagctgcaggttttcgcacagtcgcgagttaacctctgcttgctccagaggcctcgtcctaatccacctcggctgacggcgcgggatccctggctccgcgaggtctccgaattgtccgagctatctgctatgcagaactttgccccttttgttgtgtttgactcctgtctctaaccctagtctggatggttttgtttctgtcccactttacagataggtacaacgaggctcagagaggtgaagttccttctaaggggccgtagagagtggagagtcgatcgctgttcagatagcgatctggctgggcgcggtggctcacgcctgtaatcccagcccagaggcttaggcgggcgaatcacctcaggtcagcagttcgagaccaacctggccaacatggtgaaacctcgtctctactgaacatacaaaaaattagccgggcttggtggcgcgcgtctgtagtccaagctacttgggaggctgagacaggagaatcgcttgaacccgggaggcggaggttgcagtgagtcgagatagtgctagtgcactcccgcctgggcaacaagagcgaaactccgtctcaaaaaaaagagagaaaagatggtgatctgctggttacgagcatagtgctgcagttagaccggggtcctcctccccaccctgtcacttcacaaatgtttactgagagtctagacacccttgggatgcttgagatacgttggcgtataagataaacacagttcctgtccgtactatgaggttgacctacatcagcagttgtgcagtcttgaactagtatagtcattgcataaagttggcatgatatcatgtcctcatgcagttgtgaggatgaaatggaattatgtatatggagataacattagcttttctgaggctcagcattctttccagtatgtcagagtggcttttgtatgtagatactgacacaatcaatgcatatgggacacatacatgacaggatgctactctaggtacattgtataatgatacatatgtaagtacatagtacattctagatgtgtgtgtgtgtggacatagtgcgttctagatgtgtgtgtatctggactatgacatgaccacaagatacatgcgtatatagatcttgtgactacatcctatgaaatacgtttccatatgccctgtttaaatcagggtttctcaactctgcactattaacattttgggtcctgattattcttttttgtttttggcaagggggcggggtgtcctgagcattgtagagtgtttagaaacatccctggcctgacccactagatgtcagtagcacctctccccaggtggtgacaaccaataatgtctctggacctttccagatgtctccttggggttagaaaacataaccctgttgaagaatcacagggttatgtgaaagtgcataaaccatacacacatactgtatgcataaaacctatgagacctcttgtgaacttttttagtatattactatagtagataacatttcaacatgtgccaggtactaatttgagtgtttcatataccttgtgtcatgcaatggtcacaacaactttatgaaactggtactatgtccctgttctacagaggagtaacctgaggcttggaggaagagtaactggctcaggatttcacaggtagtagtggcagagctggaactgaaattcaggcaatctgaatccagaacgaacattctttatctctttaccaaacaaacctttttttttttttgtattttgagacggagtctcactctgtcgcccaggctggagtgcagtggtgccatctcggctcactgcaacctcggcttcctgggttcaagcttcctgcctcagtctcccaagtagctgggactacaggcacacagcactgcacccagctgatttttgtatttttttttagagataggtttcaccatgttggtcagacttgtctcgaactcctgaccttgtgatccgcccacttcggcctcccaaagtgctgggatgacaggcgtgagccaccgcgcccggcccccccaaaggcatttttcgtctctactaagccctcacacaaaatatacaagtgtgtaagtaaatttctctttctatcataaacattggccttggcataggaacgttaagtaaaactgaaaatgcaaatgaaccttgacatttttagtttcaaatattgcccccaaattcagcaaatttccaattactgtcgttgcatggtggtatcctcagcagatgggtgcaggaccccctgcagatgccaaaatctgtggatgctcaagttcctgatatacaatggtgtagcatttgtttataacctatgtacaccctcctatatgctttaacccatttcccatttagaaaaaaaaagtacttgacttggtgtggtggctcacgcctgcaatcccagcactttgggaggccgaggccggtggatcacttgaggtcaggagttcgagaccagcctggccaacatggttaacacccgtctccactataaaaatacaaaaaattagctggatgtggtggcgagcgcctgtagtctcagctactcgggaggctgaggcaagagaatagcttgaacctgggaggcggttgcagtgagccgagatcacaccattgcactccagcctgggcgacagagcaagactccgtctcaaaacaaaacaaaaaaaagaaagcaaaaaaagtgcagctcgctgccagcacagtattctcagggcaagcaagatatgagttaagtaatccctagattgcttataatactggctgggcacgatggctcacgcctgtaatcccagcacttagggaggccaaggtgggtggataatgaggtcaagagatcgagaccattctggccaacatggtgaaatcctgtctccagtaaaaacacaaaaattagccaggcgtggtggcacgcacctgtaatcccagctactcgggaggctgaggcaggagaatcgcttgaacccaggaggtggaggttgcagtgagctctgatcatgccaccgcattccagcctggtgacagagggagactccatatcaaaaaatatatatatttaatatatatatcaaatcatatccatatcaaaatatataaatatatatacatgcatatatatgtatgtatacctaaaacagtgtaagtactgtgtaaataaatagttgttaacctgtattttttgtttgcattttttattgttgtgttgttatttttgttggtttttgtttgtttttgagatggagtctcactctataaccccggctggaatgtggagtgcagtggtgcaatcttggttcactgcaacctccacttccctggttcaagtgattctcatgtcccagcctcccgagtatctgggattacaggtgtgcgccaccacgcctggctaattttttttctgtgtttttagtagagacggggcttcacaatgttgaccaggttggtctcgaactctcgacctcaggtgatccgcctacattagcatcccaaagttctgggattacaggcgtcagttactgtgcccttactgtgtgtgtttgttttgttttgttttacttcaaatattttcttctttttttttttttgagatggagtctcactctgttgcccaggctggagtccagtggcaccatctcggctcactgcaagctccgcctccccagttcacaccattctcctgcctcagcctcttgagtagctgggactacaggtgcccaccaccacgcccggctaattttttgtatttttagtagagatggggtttcaccgtgttagccaggatggtctcaatctcctgactttgtgatccgcccgcctcggcctcccagagtgctgggattacaggcgtgagccactgcacccggccttacttcgaatattttctattgtagttggctgaatctgcagatgtggaactcacaaatacagagggctgactatagatgagaaacacattatattcaagatttaccacttaagagtcctttctctaggtgcttatagaggttgagtatcccttgtcccaaatgtttggaaccagaagtagttcagattttggattttgatatatctgcgtatatataatgagatatcttggggttgggacccaaggctaaacatgaaattcacttatatatatatgtttcatatatatcttatacacctagcctgatggtaattttatacaatattttaaataattttgtgcatgaaacaaagtttgtgttaagtacttacgtgtggaatttttcattgtggcatcgtgtgggggctcaaaaagttttggattttggatcatttcaggtatcggatatttggattagggatgctcaacctctacagttttttagtcctagctgggcgccgtgactcacacctgtaattccagcactttgggaggctgaggtaggtgaatcacctgaggtcaggagtttgataccaacctgaccaacatggcgaaaccccatctctactaaaaatacaaaaattagccaggtatggtggtgcgtacctgtagtacctgctactcgggaggctgaggcaggagaatcacttgaacctgggaggcagaggtagcagtgagccaaattcgtgccactacactccagcctgggcaacagagtgagactctcaaaaaaaaaaaaaaaaaaagagtttctgattttggagcatttcagatgtcagatatttggattggggatgctcaaagtatatagttttggagtccttttggccccactgaatgactcctgtaaactcagatgctgtcttaccaacctgttttgcactctcctgatttttagtaagctttttaactgtagaaatcacataaaaagcttaaagattttcatgaagaaaatagaatttgccttcattattttggtttttttccccatctttttatttcaagcttatagaaaagtcaaaagaagttacagtgatctcccgttatacctttcatctagactcactattaatgtctggccatgtttggttttctctatacacgagtgtatataggtatgcatctgtatacgtgtacatgtatgtatgtgtgttgtgtgtgtctttttttttcctgaaccttttgaaagtaagtttgaggaacagttaccaggctgctgcagtgatctgtaagtggaaatgatggtgttttgtggtgtgagggtgtcatcgtaagtgctaggaggaggcgagtacaggacatcttaggtgcatacaggagagactcctaatgagtcttttctggtatccccaagaggcttcatgaagacagtgactggtaaactgcaacccaaaggactgtttggaattagccaggcaacaggtggaacagagcattgcagaggagaacatgcgtttgaggaaactgcatgtagatgtgtatgtccagatcatcccaggttgagatgaaaaaatggggagctgctgcagaaaggaatgagatttttttttttttttttttgagatggactctggctttctcacccaggctggagtgcagtggcacaatcttggctcactgcaacctctgcctcccaagttcaagcaattctcctacctcagcctcccaagtagctggattacaggcacccaacaccatgcccaggttatttttgtgtttttgagtagagatggggtttcgccatgttggccaggctggtttcccaactcctgacctcaggtgttctgcccatctcagcctccctaagtgttgagattacaggcgtgtgccactgcgcctgacgggagtagatcttttaagccaggcttaggaattgagattttattttaagggcaatggggagccattgaaggtgttgtttgtttgttttttgagatggagttttgctcttgttgcccaggctggagtgcaatggcacgatcttggctcactgcaacctctgcctcccgggttcaagcgattctcctgcctcagcctcctgagtagctgggattacaggcatgcgccaccatgcccggctaattttgtatttttagtagaggtggggtttctccatgttggtcaggctggtctcgaactcgcaacctcaggtgatccacccgccttggcctcccatagtggtgggattacaggagtgagccaccacacctggcccagatttacaatttttaaagaatactctgactggagggtgaagaaagaattggagagaggtctgagaagaggcaagggggccagttaggatccatgggcaagatggtggcagtgagaatgcaaagaggtagatgagattttcaggagaaagacttgacagcacagaactagatagggcgaggtgaggtagagattgcagaaagtcagaggcgagtcccagctttctagcttgggcagccgagtgggcgatggagcccttgactaagtagccagggagggaggagacactgaggtcagttgtgggtgtgattcgaagtgcctgttggagatgggttagagatgtctggctggcccctctgagctccaggatggaggcctggttgggaggcagtgcaggcaagtaacgccctgtgccttcttcccacacagcctcagcctcaccatgtgtgtcaggagctgtttccagtccccccgtctccagtgggtgtggagaacagccttcctgaaacacacccagcgcaggcaccaggggtcccaccgatggacacaccttggaggcagcacctacagagcggtgattttcgacatgggcggagttctcattccttctccagggagagtcgctgcaggtgagctattgattctgtttcactttgtgggactagagtggtggtgggagaatggagggtgatcgggaaggcagaggggaacacttgggcagcagtgtgtcccagcaggccatgctctggctctcgagtcgaattccaagcaccactagggggctgagtgtcttgggcgcatgattcagcttctccaaatcttactttcctcatcattaaatgagctaatggtagtgccttcctccttgggatttggcggagagttatccgtgggaagcacttgcttagcacagtgattgctcagtgcatcctaaattctcaatcaatgatgagctgccatgaatgctgtgattagaatttaaccaccaaggcagggcacagtggctgaagcctgtaatcccagcacttttggaggccgaggtgagagggtcgtttgagcccaggagttcaagaccagcctgagcaacatagtgagaccccgtatctgcagaaatttaaaaattatctgggcatgatgacaggcacctgtagttctagctactcaggaggctgaggtcggaggatcacatgaatccaggtggttgaggctgtagtcagccgtgatcatgccactgcactccagcctgggtaacagagcaagacccttactcaaaaacaaacaaccaaaaatcccaaagaatttaaccacttcttcttgggaactgttctacttctgaaatctagaatgctgaaattccccttttgattacagccttcctcccttctaccccactccctctaaacctgcttctggactgacagggtaagggtcagccctctggtctctggtcttctctttaccagccccttcctggttttacttcttttctactcagttcagtttttattagttaaagtcgttttggcttcaagcagtagaaaacctaacaaaacagtgactgaaacaagctagaagtttctttctcttgcacataaaagcccaggtatgtggtctggggcactgtgtgatgcgactctgtggtatcagggactccgactctttatagcatgttgctctgctgtgacttttcatttccactcttacattgtggtctgtcttggctgtgtcgcctcctgctatcatattctcatgccagccagcaggaaggacaaagggccaggcagccatccctctccttttgaccttctgtggtggctggttggccagttctccatcctaaatcaacccaggcacaggttttctatgcctgcgtgtctaggctttccagcactgctgaccaaattactcagccgtgctaactggctgcacaagctggtttctgagctccagcctcagttgggccattggtgctacgcctgagcctctctgttccttcactcttatctctctgttccttcactcgtatctctgtcatgtttacctcaggggctgttccagactgtccactccccctgctccttaccacccccaaatattcttgctctgcagatagctgaatctgttcttctacaaagaacataaagactaaacctgagcaacacagtgagaccctatggtgagctaggattgcaccactgcaccccagactggcacaacagtcttttttagagaacctgtctctaaaaaaaaaggcagcagggaagaacataaagatcactggacagaaagtttcttgactttctctagaatatcttaagaaccaattcacttctctccattgccactgcctccacccttgccttctctcacccaaatgatgtcatcagcctcctaacttcctctgcctctggctctctggattttacaaaatctcctcccagctccagaattaacctttctaaaacatggatcgtgcttctgcgcttagcagctcacacctgtaatctcagcaatttaggaggccgaggtgggcagatcgcttgagcacaggagttcaagaccagcctggccaacctggtgaaaccttgtctctacgaaaaatacaaaaagcgtacctgggcatggtggtgcatggatgtagtcccagctacttgaggggctgcggtgggaggaactctttagcctgggcgattgaggctgcagtgagctgagattgcaccactgcactccagcctgggtgacaaagtgagaccctgtcacaaaataataaataaaataaaaataaagcatagatcttgttcctttcatccctggcttgaaaatcttgaatgcctgcatgtggtcccctagattaagtctagaagctttcacctgggattcagggctcctctcagttttagctttcctgctatggactacctgatgctccccaggcatgccaggcacatttgcatgtttgtgcctttgcaagctgtgtttcctccctgcctcctctgcctgttcaaatcctactgatgcttttaatggcaaatttaaggggatattattcagcaatgactggaatcttttgaacactcagtaaatctcatggttgttactaacttcaagagtcctcttctgtcaagacttctccaacctcatttgcaacctgggcagaatgttcctggatagccaattcccattaagtttcaccttcaccgagatatttttgtttgcagtgggatatgttcatgtctcctctatggggctcttggattccaggaccccaggtctgggatttcttcacttcactgttgcagtgttagctctgcaggctggctcagtcattcaggaaatgtttgatgggtaaatgtgaacaaaatagtgatgccttctactttgtcttttgcttgactggagcttctaatgttatttatttcaaatgaaccatatcaagggtcatttgataagaatatactagaattggccaggtgcggtggctcatgcctttaatctcagcactttgggaggacgagatgggcggatcacttgaggtcatgagtttgagaccagcctggccaacatggcaaaatccaatctctactaaaaattcaaaaataagcggggcatggtgatgggcacctgaaattgcagctactctggaggctgagcagggagaaccacttgaacccgggaaacagaggttgcagtgagctgagatcataccattgcgctgcagcttgggagacagagcaagactctgtctcaaaaaaaaaaaagtatatatatatatacactagaattactgtactatactatttttttttttcttgagatgggatcgcgctctgtttcttaggctggagtgcagtggtacaatcatggctcactgcagcctgaaactcctgggctcaagcaatcctgcctcaggctcccaagtagctgggactacaggtgtttgccactatgcctaatttttgttttttatagagatggggtcttgctatgtttctcaagctagtgtcgaactcccgggctcaagtgatcctcctgccttggcctcttgagtcattggaattacaggtgtgagttaccatgcctcacctgctgtctgtttttgtatggcctgtcagccaagaatgacttttatgttttgaaatacgtaattgaaaaatatcaaaacaagaataatattttgtgacatgtgaaaattatgtgaagttcatatttcaatgtccataaaaatgaaattttttagaaaaccatcttgcccatttgtttacatattgtccatgactgcttttaccctgtactggcagagttgagtaatttcaacagggtccgtaatgctttcaaagcctaaaatatttaccatctggcccttttcagaaaagcttgatttaagctgttagtttactataaaattagtacgcacaacaaagaattcaaagtatagcccaaacattttagtttttttattttttattttactttatttttctccaagaatgcattttcagaccaaagctcaaacactttaagattgaatttaggccgggcacagtagctcacgcctgtaatcccagcagtttgggaggccaaggcaggtggatcacgaggtcaggagattgaaaccatcttggctaacgtggtgaaaccccgtctctactaaaaatacaaaaaattagccaggcgtggtggcaggtgcctgtggtcccagctacttgggaggctgaggcaggagaatggcgtgcacccaggaggcagagcttgcagtgagcctagatggcaccactgcactccaacctgggcgatacagcgagactccgtctcaaaaaaaaaaaaaaattgggcatggtagtccatgcctgtaatcccagatactcgggagactgaggcaggagaattgctggaactcgggaggcagaggttgcagtgagccaagatagcaccactgcactccagcctgggtgacagatcaagactccgtcttgggagaaaaaaaaaattgaattcagagggtataatgatttcgaaacttcaaaatgtttgactttaaaatttttgttagtgtgatagatgaaaattccatctttgtggtttcttttcttttccttttttttttttttttgagacagagcatcattccattgcccaggctaaagtgcagtggcgtgatcttggctcactgcaacctccatctcccgggttcaagcaattctcgtgcctcagcctcccaagtagctggtattacaggtgtgtgccaccatgcttggctaatttttgtattttcagtagagacagggtttcgccatgttgaccaggttggtctctctcttttttttttttttttttgagacagagtcttgctctgtcgcccaggttggagtacagtgatgctatctcagctcactgcaaacttcgcctcccgggttcacaccattctcctgcctcagcctcccgaagtagctgggactgcaggcatccaccaccacgccctgctaattttttgtatttttattagagacaggtttcactgtgttagccaggatgatctcaatctcctgatctggtggtccgcccgccttggcctcccaaagtgctgggattataggtgtaagccactgggcctggccttttttttcctgttattttaatgttcatttgcctgattgcaactgaggttgcgccttttttttttttttttgagtcggagtctcacatttgcctgattgcaactgaggttgcgccctttttttttttttgagtcggagtctcactctgtcacccaggctagagtgcagtgctgtgatctcggctcactgtaacctctgtctccctggttcaagctattctccttcctcagcctctcgagtagctgggactacaggtgtgcaccaccacacctagctaattttttatatgtttttagtagagatggggtttcaccatgttggccaggctggtcttgaactcctgacctgaagtgacttgcctgcctcagggttccaaagtgctgggattataggcacaagccactgcatctggcctttttttttttttttttcagagagcatcttgctgtatggcccaggctgtcaggctggtctcgaactcctagtctaaagtgattctcccgcctcctgagtagtgagcctttttttttttttttaatattattggtcattcagtttttccgtgaattgctcacttttcttgttgattttcagtaaacctttttttttttgagacagacttttgctcttgttgcccaagctggaatgtaatggtgcaatcttggctcaccacaacttctgcctcccaggttcaagcgattctcctgcctcagcctcctgagtagctgggattacaggcatgcaccaccacccctggctaattttgtatttttagtagagacggagtttctccacgttggtcaggctgctctcgaactccctaccttaggtgattgcccgccttggcctcccaaaatgctgggattacaggcatgagccactgcgcccggccggtcataaccgtttatctgttacatgatttgcaaatattttctcccttttatgccttgtcttttgattttattgataatgcttttagctgtaccaaagttttctttttcttcctttctttttgaaacggaattttactctgccactcaggctaaagtgcagtggagtgacctcggctcactgcaacctctgcctcccaggctcaagctatcctcccacctcagcctcacaggtagctgcactataggctcgcaccaccacacctggctaatttttgtattttttgtagagatgggttttcaccatgttgcccaggctggccttgaacttgggagcataaacaatctgcccacctctgcctctgcctcccaaagtgctgggattttagccatgagtcaccacgcccagccttctatattattttctaagttttagaattttgtttttctgacttggatatttactgtattgggaatttgttttgtgatggcctgaaagatgatttaacttaatttctattccatattgaaacctagttatgccaaccccatttattgaatagtcactgctaaaagagcataaaatacagataaaatttcctgctgccacctcgaccctttcccagttggttccagacttaagtggttatcattgtgaaaagtttcttgtttatttttgaaaaattgcccgtgtgtgttgggggtgggtgtggggggcatatacaaattggatcatatgctgtagactgttccatagcttttttttgactcagtatgatattttgccatctttttcatatcagttggcatatgtctaggatctagtttggaggttagtaaactttttctataaagggctagacatggtggatgtgatggcttatggctacgatcccagcactttgggaggccgaggtgggagactgtttgaggccaggagtttgagactagcctgggcaacatagtgagatccccatttctacaaaaaataaaaaaattagctgggcatggtagcacgcacctgtaatcccagctactcaggaggctaaggcagaaggatcacttgatcctgggagcttgaggctgcagtgggccatgactgtgccacagctccccagcctgggcaacagcaagaccccatcttaaaaaacaaaaataaagaagggctagataggctttgtgagccatactctcagtcacaactattcacttctaccattgcagcaagaaagcaataatagacaatagtaaacaagtgtggttgtgttccaataagactttatttacgaaaataggtagagccaggcatgctggtgtgtgcctgtagttccagctactagggaggctgaggtgaaggttcatttgagcccaggagtttgaggccagcctgggcaacacagcaagaccccatctcttaaaaaaatagataggagacagatttggccccaagccatattttgctgacctttgggcaagtttatatgttttaacatctgtgtggtattccgttatatgaatatatcataattgatgtaataaacaccttattagtatacatttaacttttctagttctttttattatgagcaattctgcacaaacaaccttgtacataacctttgcttactttcataaatatatatggaagaaatttctgaaagtagaattactacgtcaaatgtatgtgcatttcagattttgacagaaattatcaaattgctgtctgcagaggttgtgcttgtttacgctcccgtcaacagcatatgatggtgccggtttcctcacatgcttgccaactccgagactgtgaaaaatgctatatgctttagctctaaaattaaagtattttttggattgagttttaaaagtcttgttattttcaaaggacatataccagattgttaacattagttatttctgaaagaagataggactgcttgtccttttactttccttccttccttccttcctcttctttttttttttttttttttttttttaagacatggggtcttgctctatgtccctaggctgcagtgcggtggcaccatcatagctcattgcagcctcaaactcctgggcttaagcgatccttccacctcagtttcccgagtagctagaattacaggtgcaacccatcacgccaagctaatttttaaattttttctagagacagggtttaatcatgtggcccaggctggtatcagactcctagcctcaagcgatcctcccattttggcctcccaaagtgccgggattataggtgtgagctactgcacccagcctactttcttttgcatagttttctatgaaatatattgtctgaaaaattttcaatgcacagacactactttatcagaaaaaaacaacaaaggtgttttaattccaaaacaaaagctatatgtaaagtgtattttgtcttagatatataattatgaatgttgtatgtatatatttgcccccagcatctgtattatagacagaaaaagcaactgtggatgaggagaaacagtccttgcacaaatgttcccagtattctacagatgctgatgctgatccatccactgccttagctctttgtggacagaaatttccttcttggccaggcacagtggctcacacctgtaatcacacacagtaccttgggaggcccgaggcaggcaggcagatcacctgaggtcaggagtttgagatcagcgtggccaacatggcaaaaccctgtctctactgaaaatacagaaattagccaggcttggtggtgcacgcctataatctcagctacctggggggctgaggcacgagaatcagttgtacctgtgaggtggaggttgcaatgagctgagattgtaccactgcactctagcctgggtgactgagtgaggctttttctgaaaaaaagaagaaatttgcttccttatccacaaagacagcatttcaggcgaacatttcagtgtactcactccatgctgtgaagaattactatagcctatagaaggaagggcatgttctaggggccaccaggatctggcttcttccttcatgtgcttccatagtctctgccaggtccaggtaagtgacctaacatatggtccagtgaatatgagatcaaggaataaaattcatcatgcagtgcccggagtcctctcaagcaaccactgaggatctgatgcttcacagcagtgtgctctctgttgtacacattagcattgctcttcctctgggggtctaaggttgagattttgcattttgtgaatgtctgcaaatttccaacagcatccaccctggcagtacagcgagtccgtaggaactggtatggtaattttcctgagctccctaaaccccagcatgtatcaatgtattccacttttgcatattttgcttcctatagaatgggaggtacagaatcgtatcccttctggaactatattaaaggccttgatggaaggtggtgaaaatgggccctggatgagatttatgagagcagaaataacagcagagggttttttacgagaatttgggagactttgctctgaaatggtgagtggtaaacatacctacatttccatatttttctttttgccttgagtagtggttgcaacattcatgtataagttagttaaactgaaaataaagtgaaacctaataacccattacatgttttaaagttatttcttaggccaggcgcagtggctcatgcctataatcccagcactttgggaggcccagggggtggatcacctgaggtcaggagttcgagaccagcctggctaacatggtgaaaccccgtttctactaaaaatacaaaaaattagctggctgtggtggcgcacatctgtaatcccagctatttgggaggctgaggcaggagaattgcttgaacctcaggggtggaggttgcagtgagctgagatcatgccattgcactccaacttgagcaacaagagcgaaactgtctcaaaaaaaataataataaagttatttctttcacccctaggtgttcaatgttcaattcatatatgaataactaaaaatattcttagccaggcgtggtggctaacacctgtaacttcagcactttgggaggctgagacaggagaagtgtttgaactctggagtttgagaccagcttaggcaacatagccagaccttgtctctactaaaaatcaaaaaaattagccaggcatggtggtgcacacctgtggtcccagctattcaggaggctgaggcttgagccctagggattgaaacttcagtgaaccatgaccgtgccactgcactccagcttgggcaacgtaacaagactctgtctcaaaaaaaaaaaaaaaaaaattctttactaagttcctccagcatatatttttttaatgttttctggtgtattataaaggatgttatgaaggatacgaatgaacagccagatgacaagatacctgggggcaaaggttttagagccactgtgccctttccaggcctgccaccctcctcccagcacctccatgcattcagcaacctgaaagctcccctctaatagatactaaaacaggagctgtctacataatggctttgataaaaaagcttttttaaagcaataataatattgaacattttttctgtactgtgcactgttctaagctctttatataactcatgtaaccgcaatagctctactaaaatataatttaaaatatagtaagaaaagttctgtaggtagatggtgatgatggtgatggttgcacgacaacacgactgtacttaatgccactgcactgtgtacttaaaaatggtcgagtgcagtggctcacacctgtaatcccagcattttgggaggccaaggagggcggatcacctgaggtcaggagttcaagacaagcccggccaacatggtgaaaccccatctctactaaaaatacaaaatttagccaggcgtggtggtgggcatctgtaatcccagctacttgggaggctgaggcaggagaattgcttgaatctgggaggcagaggttacagtgagccaggatcaagatcacaccactgcactccagcctgggtgacagagtgagactccatctcaaaaacaaaaacaaaaaaaggttaaaatggtaaattttgtgttacatatattttccacaatttatatatatatatatatataaacatatatgtgtatatgtaatagtaaactttgaaaacattatgcaaagtgaaagaagccagtcaaaaaagactgcatggtgtatgattccatctgtgtgaaatgtccagaataggcaaacccatagagatagaaagtagattggtggttttctagtacaaggagactttgggggaaatgaggagtgactgttaatgggtacggtttactttttttttttttaattttttttttgagacacagtctcactctgttgcccaggctggagtgcagtggagcaatctcggctcactgcaacctctgcctcccgggttcaagcgattctcctgcctcagcctcccgagtagctgggactacaggcgtgtgccaccagctccagccaatttttgtatttttagtagagacggggtttcaccatgttggccaggatggtctcgatctcttgaccttgtgatccgcccaccttggcctcccaaagtgctgggattacaggcgtgagccaccacgcctggctggtttgctctttagagtaatgaaaatgtcctaaaattgatggcagtgatggttgcacaactttgtaaatatattaaaaaccattgaattgtactctttaaataggtgacttgcatggcatgtgaattagagttcagtaaagctgttctaaaatctgtgtgtgtatatgtatatataaaacagcagacttgcctttgcagattttgaaatgtgataatataagagttttctttctttctttctttctttctttttttttttttttttgagacggagtcttgctctgttgcccaggctggagtgcagtggcatgatcttggctcactgcaacctccgtctcctgggttcaagcaattctcctgcctcagcctccccagtagctgggactacaggtgcgtgccaccacgcctggctaattttttgcatttttagtagataaggggtttcaccatgttagccaggatggtctcgatctcctgacctcgtgatctgcctgcctcagcctcccaaagtgctgggattacaggtgtgagccactgcgcccagccttataagagttttcaaaacccacacagattgaatttaaaaacaagaaaaaaattgatcagaaactaaagttcataatggtgatactgaggcaatataaaaagcattaaatgacttctcaatcattaaaaattaaattacatatacttcatatacttttagatttcactgtatcctcttatgatatgctgttttttttttcaactagcaatccatgagcagaataaagaactcatttaattgtaatattgatataaatagctccattccctactgtgttgctcaggctagagtgcaatggcttgatcatagctcactgcagctccaatctcccaggctcaagccatcctcccacctcagcctcctgagtagctgggaccacaggtatgtgccaccaagcctagctaagttaaaaaaaaattttttttagatctcactttgttgcccaggctggtgtcaaaatcctgagctcaagcagtcttcccacctcagcctcccacagtgctgggattacaggtgtgagccactgtgcccagcctataactctagtcctggataacttttaaaaaccttatatgagagttcagcacaggggctgaggaacacagttcctgcaggcagcaagctatgagcctgggctcttgtagcagagagcagaaggacgccaggaataagcattttttttttctgttggccatgagtgtttgtcactcttaatgattgctgttctcctgtgccctctcctgttcttagttaaagacctccgtgcctgtggactcatttttctctctgttgaccagtgagcgagtggcaaagcagttcccagtgatgactgaggccataactcaaattcgggcaaaaggtcttcagactgcagtcttgagcaataatttttatcttcccaaccagaaaagctttttgcccctggaccggaaacagtttgatgtggtaagcttgagctaattgaaaaccattggaacagaatctgtgccctcgcttcagggtgcaatgttaaatgctatcttccagcaggtcttgagtgagggagtttttccttcagccacttgactaagttaggtttaaatgcaatatgttgaaaacagaccctttaagatatcactgtgttcttagcaaggtcagacatttatggcatttgattactggttgacacttcagctttacattctaaattcgaaccttagtcttcatataacacaagcatctctgtcagccctcatatcgtaatggatcctttggccttttctaagaccaactatgttgccttctatttctgtgacgttagttcctagaccagtgctgtccaataaaattttactgccttcctcggcctgatttacttccatactaaatccatctgctccatgtgtgtatcccaacctgtcatgtgataaacctatcgttttgacatgcttggctatatttgggtactttacctatttatttatttttatttttttattttgagatggagtctcgctctgtaacccaggctggagtgcagtggcacaatctcagctcactgcaacctctgcttcccaggttcaagtgattctcatgcctcagcctcctgagtagctggaattacagatgtgtgccaccatgcctggctaatttttatatttttagtagagacgggggtttcaccatgttggccaggctggtctcgaactcccaacctcaagtgatccacccacctcagcctctcaaagtgctgggattacaagtatgagccaccgtgcctggcctatttatttttttatatatatatatatatatatttttttttttgagaccatctcactctgttgcccaggctaaagtacagtggcaccatctcggctcactgcagcctccaccttccaggctcaagcagttctcctgcctcagcctcctgagtagctgtgattacaggcatgcaccaccacccctggcaccaccacccctgaatttttagtagagacagggtttcaccatgttggccaggctagtctcgaactcctgacctcaagtgatctgcccacctcagcctcccaaagtgctgggattacaggcatgagccatcgtgcctggcccctatttgggtactctctttttttttccttgagagaaggtctctctctgtcgcccaggttggagttcagtggcgcaatctcagctcattgcatcctccacctcctgggctcaagcaattctcgtgcctcagcctcctagtagctgagactacaggtgcatgccaccacgcctggctagtttttgtgttttttatgaatattagagactgggtttcaccctgttggccagggtggtctcaaacttcagacctcaagtgaccaacccacctcagcctcccaaagtgctgagattacaggcatgagccactgtgcctggccctatttggatactttaaaaatgtttgtttttgtcttataaccaacagcagtgataattccctttagaaactccaaagcccagattggcagttgatcttccagcaccttttagagttgtgatggatcagaaggacccttcccctggcccattcctccaaggatattctgagtcagtgcaaaagggaacagctcatgaaatatagtgagagtcatggtagcctctagaacacatcagattaaatttctctgataactcaagtattggacattttgctaccagagcccctttctgattctttccatctttggaagagctacttttgctggactccaggaagtggcatattaccttagccctacatctgcctatgcctgggtgtatttgtacccttcgttgggccagtgagattaaagattttcaactctgcctacacatcacatgacctgggagtttgtaaagatgctgggtctgtttccctggaggctttcattgagtatgtctagttgggatccaggcatgtgtatttcgaaaaagctccacaggtgattctgccttgcagctggggtgagataccccaagacgcagtgagggacttcagattctgtccatgcttttctcttatcagacagcctctgtcatgcttaccttgagaaggaggcttcccctccatcttcctgggatagagccttgataaataaaatcatttttatctgatctacatttggaaaaacactgaccttgttcccacagttcctgctttgccaagaaagtaatagaagccctgaataagttcatgccatcatgtgcaaaataagaaagagaaggctagagatcttatcaaataaatcttaagaatttattttacttcccccagatgtaattcacctagtgagaggagccgaatgcttcctggaactttgccccatcccccccaattccctccactctcctagctcttgtctcagccagtacagctctgccacttccatctggtacgttacatcgactggtgtctgaaacaccctgcttctgtacttctcactattgacgttttctttagggtagcctcttagactttttttttttagctcattcaggtccttaggagacaagagaaagtagaaaggtccagtttattccagacatttatttacctgaaagggcagttctcacccaacccagaatgcaagtgtagggtagagagaggggccactgggtttgtccttggccttggagagcttgggtcattccaagtggcaagtcagagatttagttctgttcttagggcagatcagagggtattggttataggctatgtggctataggagattgggcccactctataggagattacgccctggggacactgtaaaaggactttcggggaatcagtggatcagagacagcctgacactgagaaggctttcccgtgttctcctgaactctcaccagcaccctccacccattacggatcagatatgtggctgaagcaaggtcgtcagagtacaggagcctcttagcatgtcaggaacagtgtcagccctcccatggaatttctgtctaaatggagtatggatgggtttttaacctctgaaataaacactaagttcgtatttattttatacctgtaatagtgtcttctttctgcaaaaaaaaaaaaaaatggcgaaatgctttccgtcaaactgacatgtacagcttttcttctgctctgtttagccccaagatgtgacattagccaaatgctttgtcattttggaacccacttaagtttcatttaagtttcacaacttactgagctaagataggtacgatgactattaatattattcccattttattgatgatggcactgaggcccattatggctttgctcgtttgcacagggtcacagtgtctgaaacagacactttggtttctcgagtttgcccccacgttgtaacccagtattgtcaaattactcaatgtaagaaggcaacatcattttatatcataacactcttaaattacttgttataataaatctcaactgtccttcttatgcttttcctctcaaaaagtttaccagcatgcatgtgggagctccacctttcgggacattcatctctcattcctgtccctccatcagattgtggagtcctgcatggaagggatctgtaagccagaccctaggatctacaagctgtgcttggagcagctcggcctgcagccctctgagtccatctttcttgatgaccttggaacaaatctaaaagaagctgccagacttggtattcacaccattaaggtaatagtcactaatttttgaactccctcccatgcaccagccactaatgcaatgtttctctgtaatctttttacatttgtagctctagctttccttagggtttccccctgtgtttccatagtcatcttattttgtgttaattatgaaatctatgtgactagctgcttgtattttcaatgggaagcaagacaaacaggtactgcgaaggcaggttgagaaaagagatgggaaaggaggtgaatggcaggcttaagacctttgtgggggtgttcacactgtcctcatgatccagtgatgctgccttaagtggggagccagtggccaccagccatgcaggccatgcagctcactgctgtaaagcacgagaagccatgtgagggggtctcatgccaacttttttctattctttttttttttttttctcatacagggtcttgttatgtcacccaggctggagtgcagtggtgcaatcatagctcactgtagcctcaacctcctgggcttaagtgatcctcctacctcagtctcctgagtagctgaccagaggcatacaccaccacacccgactaatttttgtattttttgtagagacagggttttgccgtgttgcccaagctggtgtcgaactcctgggctcaagcgatctacccaccttaccctcccaaagtggtgagattacaggtgtgagccaccatgcctggcttctattcttctatgtttgggttttcatcgtcgagctgatgggcctgtagggtaagagcaaacgttgtaacataatcttctttcttcttggcacaagagggtattgtgaaatttttttttttttttgaaacagagtttcactttgtcacccaggctggaatacagtggcatgatcttggctcactgtaacctctgcctccctggttcaagcaattctcgtgtgtcagccccctgagtagctgggactataggcgcacgccaccatgcccggttaattttttgtattttagtaaagacagggtttcaccatgttgcccaagctggtctcaaactcctaagctcaggaaatctgcccgcctcgcctcccaaagattcacggcctcaccacgcccggccgtgaatcttttttgagatgaggtcttgctaggttgccgagggctttgaactcctggactccagcagtcctcccacctcaggcttcccaagtggctggaactgtgggtgcacaccatcatgcctagctgttttgtgaaccgttgaccagtgcttctctctgcaggatagaaagttcagtgtggttaggagttaaatgggaagaggaaatgcattctactgctccctcattagctaaatatcctgggttcgaaggccttcctcagagtactgacttctttgataatttccctctaaaggactaccctttgtaaaaagtaaagtagaggttcttctttaaagactttccttattatttaattaggaataaatagtaacttcttttagaagcaaaatttatttaaagacctgtgctaaattttttgttgttgttgttgttgagacggagtctcattctgtcgcccaggctggagtgcagtggtgcagtcttggctcactgcaagctccacctcctgggttcacgccattctcctgcctcagcctcccaagtagctgggactacaggcatccactaccacgcccagctaatttttttgtatttttagtagagacagggtttcactgtgttagctaggatggtctcgatctctcgatctcctgacctcgtgatacgcctgcctcggcctcccaaagtactgggattacaggcgtgagccaccacacccagctgacctgtgctaaaattttttttttttttttttttgagatggagtcttgctctttcgtccagtccagactgcagtggtcctatcttggctcactgcaagctccatctcctgggttcgcaccattctcctgcctcagcctcccaagtagctgggactacaggcgcctggctaattttttgtatttttagtagagacggggtttcactgtgttagccaggatgatctcgatctcctggcctcgtgatccacccgccttggcttcccaaagtgctgggattacaggcgtgagccaccgcgcccagctatgctaacatttttaaatatttgctagctgcaataaagaaattaatgtattttatgtttttagttcctgcaatttagtctaaatatttgccttggcctgctaatactggtccaagcaagtattgggtcatagcttgttcctcttctttatttgaaggtgtttttatttttctcagcattttacaagttacttccttcttcctttgttttcctctacctttgcctcttttaaaaagttttaagttgctagccaattaggacaaatacagaatgtaaagtctcgttccagccaatggaaactggacacagcagtaggatggatgcgtcagcttataaatgaccctgtctcctttgtttggtgtactgttgtggcaaaactgctggtgagtgtaccctttctgcaggaagtaaaaatggccttgctgagtaaattaaatttatgttcaagtgctatgtctttgtggcaccggggaacaaacatttcagacacctcctaggaaacagataggagcccctgaggccaggattgactgctggcacctgttcaatatatattctctgcacctgtactaccatgaattgtaaaattaaaaatatatacgtgtatatattctcaacatcctgtgaaaggaagggaaaaataacaacaacaaaaaatatacatctacatattctctctgaaaccaggttaatgacccagagactgcagtaaaggaattagaagctctcttgggttttacattgagagtaggtgttccaaacactcggcctgtgaaaaagacgatggaaattccgaaagattccttgcagaagtacctcaaagacttactgggtatccagaccacaggtatgtgggcttctttcatgttttggtagctctctccaaggcgaaggttttggtctgtttctcacttttcaaccctaatggaatgggctggagacaaagaagctttacagtgaggaaaatagccattgggcctggtgcatcggagcactgctttcagttttgcttgggaaaaagcattaacttccctatttatgcatctccaaaagtgtacctatcccactcttacacctgagagtgtggtatggcagtggttgcctgctttcaacagggagaggaacttggggactgcagtgtgtgctcagaggattttacagtttctaatgctttgagacgacagcccattttgtgaagacgacttagaagttacatcggcaggcgggtgcggtggctcacgcttgtaatcccagcactttaggaggccaaggcaggtggatcgcgaggtcaggagtttgagaccagcctggctaacttggtgaaaccctgtctctactaaaaatacaaaaattagctgggtgtggtggtgggtgcctgtaatcccagatactcgggaggctgaggcaggagaattgcttgaacccaggaggtggaggttgcagtcagccgagatcgtgctactgcactccagcctgggtgacagagcaagactccatctcggggggaaaaaaaaaaagaatttgcattgctgaccggggcgtagtggctcacttctgtaattccagcattttgggaggccaaggcaggtggataacttgaggccaggagttcgagaccaggctgaccaacatggtgaaaccttgactctactaaaaatacaaaaattagctgggtgtggtggtgcacaactatagtcccagctgctctggagactgaggcacaacaattgcttgaacctgggaggcagaggttgcagtgagccaagattgtgccactgcactccagcctgggtaacagagtgagactccatctcaaaaaaaaaaaggaaaagaaaaaaaaaaagggctgggcgcagtggctcatgcctgtaatcccagcactttgggaggctgaggcaggcggatcacctgaagtcaggagttcgaggtcagcctggccaacatggcaaaaccccatctctactaaaaatataaaaattagctaggtgttttggcgggcgcctgtaatcccagctacttgggaggctgaagcaggagaattgcttgaacctgggagactgaggttacggtgagctaagatagtgccactgcaggcctgggtgacagagcaagactccgtccccccccaaaaaaaaaaaggaaaaataatgttgctgggtgtggtagctcacccctgtaatccccagtactttgggaggccgagatgggcggatcatctgaggtcaggagtttgagagcagcctggccaatatggcgaaaccccatctctactaaaaatacaaaaattagccgggcatggtggcacatgcctgtagccccagctacttgggaggctaagacaggagaatcacttgaacctggaaggtggaggttgcagtgagctgagatcatgccactgcactgcagcctgggcagcagagcaaggctctgtctccaaaaaaaaaaaaaaaagttgcatgattttaaaacgcaacaaattgtctccatttcttggagacaagttttctctttcctccttcacattcccccctcagaaaaccaggtgccttgtgtgctttagaggacacttttgggccaggggtggtggctcatgcctgtaatcctaccactttgtgaggctgaggtgggcagatcacttgaggccaggagtttgagaccagcctggtcaacatggcgaaactccatctctactaaaaatacaaaaattagccgagtgtggtggcgcatgcctgtagtcccagctactggggaggctaaggcagaatcgcttgatcccaggaagcagaggttgcagtgagctgagatcacgccactgcactccagcctggacgacagagggagagtccatctcaaaaacaaaagaaaacaaaaaagaagacttacaaaattttttaaattaaattaaattaaattttttttgagatggagttttgcccttgttgcccaggctggagtgcaatggcatgatctcagctcactgcaacctccgcctcttgggttctagtgattctcctgcctcagcctcccgagtagctgggattacaggcacccactaccatgcctggctaatttttgtatttttagtagtagagacggggtttcaccacgttggtcaggctggtctcaaactcctaatctcaggtgatctacccgccttggcctcccaaagtgctgggattacatgagcctccgcacctggccaaagaagacatttttcccaggtaataaaggcttcacccacttgctccgtgaaaaaggcttttattgatggagtttcatgttaggatgttttccagcaattggattattggtagtggcctctgcacagctgaggcgcccactctggccagccagaagaactcaggccgagttctgttgcttgcctactcttctaaccaagtgaaatcagtctatacccagggttcagtcttcttatggagctgagaatgaattagtttcacctcagccaggatcctgcaagggagccacagaattcagcctagtgcagtgggaaattacatctcatgaaagcagctttgggtcaggccgaaggcctctgtgtcactcctttcagctgtcccagcagtgtcaggcagagggacgtgcaagggcacctttcatcctcaggcttaaagcattccatttggcaagatgggttgccatggctgcgtttgtgcttgataaacagaatgaacatgtttttattcatggagcaggagctggcaggaaggacaaaattggacacctgcacaaactgagaaaattactgtggtataaaatgaatggcctttgacaaactgtagtggcatgtgatcctggacctgagttggcggagtgtagacctgggactcagtcactcctagtaggcagagaagaggtacttttcttgcactgcatggcagatgaggatattttgaagcccaaatgcagaactcattagaaagaaagaatgtctgctcagatctgtcctccagggctggtttgagttttctttgttttcaaacttgcaggcccattggaactacttcagtttgatcacgggcagtcaaatccaacttactacatcaggctggctaatcgtgatctagttctgaggaagaagcccccagggacactccttccatctgcccatgccatagagagggagttcaggtaagttttcagggccaggggagcacttgcccactagcctccactgtgcacaagctcagccctaaactgaaaagtcagcactccataaaaataccccaagacatttaaaactacaattatgggccaggcttggtgggtcacacctataatcccagtgccttgggagaccgaggcaagaggatcattgagcccaagaggtcaagaccagcctaggcaatgcagcaagaccctgtttctaccccccatccccccccaaaaaaaagcctgggtgtgctggcatgaacctgtagtcacacctactcaggaggctgaggtgggaggattgcttgagctgggaggttaaggctacagtgagttactgtggcatcattgcactcccacctgggagacattgtgaaaccctgctccaatcccccaaaaagccaaatgtaaattagaactattctggaaaacaatatgatacaatttattaaaagcctcagcgttttcatactttcagacctaataattccaattctggggctctgtcttaaagaaataattctaagtagggggaaacagctgtatgtattaatatgctcaccataaagttgtttaataataagaatttggaaggccaggagcagtagctaccatagtcccagcactttgggaggctgaggcaggtggatgacttgaactcaggaattgaagaccagcctggacaacatagtgaaaacctgtctctaccaaaaatacgaaaaattagttgggtgtggtggcacatacctgtagttccatctactcaggaggctgaggtgggaggatctcttgaacctgggaggtggaagctgcactgagccgaggtgggcaccactgcactccagcctgggtgacagagcgagactgtgtctcaagaaacaaacaaaagagtttggaaactacttaaatatactataatctgtaccataatcaggaaataattaagtaaaccttggtatatatactgtcgcaatgacagtaatagtaatagctaacatttatcgaatggttaatatgtgccaggcactaaaataaatgcttcgaatgtctgttactgcagagcatcctcacaactctatgatatgttacaattatagtcctcatttacaactgggaaaagtaagccttaaagaaaccaaggcaggcagatttgctttgagctcaggcgttcgagcccagcctgggcaacatggtgaaaccctgactctacaaaaaatacaaaaattagccgggtgttggtgacttggacctgtagtcccagttacatgggaggctgaggctggagaatcacttgaacccaggaagcagaggttgtagtgagctgagatcgtaccgctgcactcacaaagtgagaccctgtctcaaaaaaaaaaaaaaaaaaaaattaaccagcatacccagggtcataaaactagtaagcaagtgctagagtctggctttatagccagtctgtgagatttcatagctcacctttaatgattatgctgttattgcagctaataaaagtatgcctataataacaaatgtgtatgataaaattttaagatagtaaaggcagatacaaactgcatatatagtattagctgattttttttttttttttaggcagagtgtcactattgtccaggctggagtacagtggtgtgatgatacctcactataatctcgaactcctgggctcaagtgattctccgcctcagcctcccaaatactacaggcacatgccatcatgcctggctagttttaaaaatttttttgtagagatggggcctcactatattgcctgaactcttggcctcaagcaatcctcccaccttggcctcccaaagtattggggattacaggcatgagccagcgtgcctggccaaggtttttgattattaattcaatttaacaaaaatgttgttactcagatattttatttcatcttgttttagatttggtaagttgtaatttctaaggagtctgttcatatcacctaagctgttgaatttatgatttataatattcccttactatccttttaatatacgtaggatctatagtgatatcctttttttttttttttttttttttttttttttgaaatggagtcttgctttgtcatccaggctggagtgcagtggcatgatcttggcttattgccacctccatctcccaggtccaagtgattctcctgccttagcctcccaagtaacagggattatagtcacacgccaccatgtccagctaatttactatttttagtagagatggggtttccccatgttgaccaggctggtctacaacccctgatctcaagtgattcacctgcctcggcctcccaaagtgctgggattacaggcgtgagccactatgcccaccctagtgatatcctttctttatcactgctggtattaactgataatttgtattctctctctcttgttagtctagctagggatttatcaattacattgatctgggaaccacagtttggttttgttacttttttctattgtttgttttgttttgaggcggagtttttgctctgtcacccaggctggagtgcagtggcgcaatctcggctcactgcaacctctgcctcccaggttcaagtgattctcctgtctcagcctcctgagtagctgggattacaggcatgcgccaccatacccaggtaatttttgtatttttagtagagatagggtttcaccatgttggtcaggctggtccgaactcttgacctcgggtgatccgcctgccttggcttcccaaagtgctgggactacaggtatgagcctctgcgcctggcctgtttttcttttctaatacaagcatttaaatatataacttttaaggctgggcgcagtggctcccacttgtaatcccagcactttgggaggccgagccaggtggatcacctgaggtcaggagttcaagaccagtcttgccaacatggtgaaaccctgtctctaataaaaatacaaaagtaagccaagtgtggtggtgcacacctatagtcccagccaatctcgaggctgaggcaggagaatctcttgaacccaggaggcagagattgcagtgagcggagattgcagtgagccaagattgtgccatggcactccagcctgggcaacataatgagactctgtctcaaaaaaaaaagaaaagaaaaaaagaagtgcattgtttaattttcaaatatttgggggtttttttcttgatattatatgtgaatgaattctagtttaattccattgaagtctgacaaataccctgcaagatttcaattttttggttttttttgagatggagtcttggtctgtcacccaggccgtagtgcagtggtgcgatcttggctcactgcagtctccacctcctgggttcaagcaattctcctgcctcagcctcctcagtagctcggactacaggcacataccaccatgcctggctaatttttgtatttttagtaggtatggggtttcaccactttggccaggatggtctcaatctcctgacctcatgatccacctgcctcggcctcccggagtgctgggattacaggcatgagtcactgcgcccggccttttgtttgttattttttgagatgcaggtttgctcttgtcgcccaggctgcactgcagtggcatgatcttggttcattgcaacctccgcctcctgggttcaagtgattctcctgcctcagcctcctaagtaggtacaattaaaggcatgaggcaccatgcccggctaatttttgtattatttttattattttttgagacagagtctcgctctgttgcccaggctggagcgcagtggcacgatctcggcccactgcaagctccgcctcccaggttcacgccattctcctgcctcagcctcccgagtagatgggactacaggtgcccaccaccactcctggctaattttttgtatttttagtagagacggagtttcaccatgttagctaggatggtctcgatctcctgacctcgtgatccacccgcctcagcctcccaaagtgctgagattgcaggcatgagccaccaagcctggccctaatttttgtatttttaatagaaatggggtttcgccgtattggccaggctggtgttgaactcctgacctcaggtgatccgcccgcctcggcctcccaaaatgctgggattataggcatgagctagtgtgctgggctagattttaatttttattgaaattttttgagatttattttatggaccagcacatgacttatcttggcgaacatattgtgtttacttgaaataatgtgtattttgcaatatctgagtgagtggtatacaaatgtccatcagatcaagttggtagtgggttcagatgtatgtctttagataaatctatttttgtctaattctatcattactgagaaaggagtgttaaaagctcaactaagacttgtggatttctccatttttttctctttaattttgatcatttttacttgatatatttcgaagctctgttgtttagcacatacatacttatgattgtaatatctttctgatgaacttgcagttgtatcattttcaaatgtccctctttatctctggtggtacactgtcgtaaaggctgctttatttgatattaaagtagcctcaccagctttcttatgcttagtgattgcataatgcttccatttccatccttgtttttgcagcctatctatgtttatatattcagcgcatatctcttgtagacatcatataattaggtcatgtttttctgtccaggctgaaaacatctgtcttttatttttattttatttcttttatttattttattttatttttttttgagatggagtctcgctctgtcacccaggccggagcacagtggagcgatcttggctcattgcaacctccgcctcctgggttcaagtgattctcatgcttcagccacccaagtagctgggattacaggcacgcgccaccatgcctggctaatttttgtatttttagttgagaaagggttttaccatgttggccagggtggtcttgaactcttaggctcaagcagtcctccccctcagcctcccaaagtgctgggattacaggcaggagccaccatgcatggccaacttctgtcttttaattggaatctattcatcttttgagtttaatgtaattattgatatgtttgatttaggtctacaatttcaccattggttttttgtttgtcccatcatttttttgttcttacctacttttgggtcaattgaatattttttagaatttcattttaatttatgtaccatttttaattcagaaaagtaatttcaggccaggcacaatggcttatgcctgtaatcccaggactttgggaggccggggcaggtggatcacctgaggtcaggaatttgagaacagcctggccaacatggtgaaaccgcgtctctactacaaatataaaaattagctggttgtggtggtgcacatctgtaatcccagctactcaggaggctgaggcctgagaatggcttgaacctaggaagtagaggttgcagtgagccaagatcgtgccactgcactccagcctgggtaacagagcgagactgtgtctcaaaaaacaaaacaaacaaacaaacaaaaaacaaagaaaagtaacttcaagaaaatctcatcaattcagccagcaattttgtttattttcatttgtccttgcaggattatgaaagcccttgcaaatgctggagtacctgtccctaacgttcttgatctctgtgaagattcaaggtaaagttcagatgtttttgctattgcactttcaagctacaggagagaaaagcccatatgctaacacaaattccaatttgttaaagacaaataaaatttgggtaggagggaaaagaaactttatcacaacctctcccagaagttctcagatatttaagttatcctgcaagataagtatatgcctgctttagggataattggtagaaaacatcttttttaacattcaaaaaatacatattaatctagtttcatgttgcttgtctttatttatttttttaatcagagtctttctaaactgttttgttttgtttttttgagacggagtctcattctgtcacccagactggagtctcattctgtcacccagactggagtccagtggcctaatctcggttcactgcaacctctgcctcctgggttcaagtgattctgctgcctcagtctcctgagtagctgggattacaggtgccccctactatgcccagctagtttttgtaatttttgagtagagacagggtttcgccatgttggccatgctggtctccaactcctgacctcacgtgatccacccactttggcctcccatgatgctgggattacaagtgtaagccaccgtgcccggccctaaactatttatttatttatttatttatttatttattttttattgataattcttgggtgtttctcacagagggggatttggctgggtcataggacaatagtggagggaaggtcagcagataaacaagtgaacaaaggtctctggttttcctagcagaggaccctgcggccttccgcagtgtttgtgtccctgggtacttgagattagggagtggtgatgactcttaacgagcatgctgccttcaagcttctgtttaacaaagcacatcttgcaccgcccttaatccatttaaccctgagtggacacagcacatgtttcagagagcacagggttgggggcaaggtcacagatcaacaggatcccaaggcagaagaagttttcttagtacagaacaaaatgaaaagtctcccatgtctacttctttctacacagacacggcaaccatccgatttctcaatcttttccccacctttcctgcctttctattccacaaagccgccattgtcatcctggcccgttctcaatgagctgttgggcacacctcccagacggggtggtggccgggcagaggggctcctcacttcccagtaggggtggccgggcagaggcgcccctcacctcccggacggggcgggtggccgggcggggggctgacccccccccacctccctcctggacggggcggctggccgggcagaggggctcctcacttcccagtaggggcggccgggcagaggcgcccctcacctcccagacggggcggctagccgggcggggggctgacccccccacctccctcccggacggggcggctggccgggtggggggctgaccccccctcctccctcccggatggggcggctggccgggcagaggggctcctcacttcccagtaggggcggccgggcagaggcgcccctcacctcccagacggggcggctggccaggcgggggggctgacccccccacctccctcccagacggggcggctgtccaggcggggggctgacccccccacctccctcccggacggggcggctggccgggcggggggctgacccccccgcctccctcctggacggggcagctggccgggcggggggctgacccccccgcctccctcccggacggggcggctggccgggcagaggggctcctcacttcccagtaggggcggccaggcagaggcgcccctcacctcccggacggggtggctggccgggtggggggctgacccccccacctccctcccggacggggcggctggccgggcggggggctgaccccccgacctccctcccggacggggcggggggctgacccccccccccacctccctcccggacggggtggctgcccggcggagacgctcctcacttcccagatggggtggctgccgggcagagaggctcctcacttctcagatggggcggctgccgggcggagggcctcctcacttctcagacggggcggttgccaggcagagggtctcctcacttctcagacagggcggccgggcagggacgctcctcacctcccagacggggtctcggccgggcagaggcgctcctcacatcccagacggggcggcggggcagaggcgctccccacatctcagatgatgggcggccaggcagagacgctcctcacttcctagatgtgatggcggccgggaagaggtgctcctcacttcctagatgtgatggcggccgggaagaggtgctcctcacttcctagatgggatggcgtctgggcggatacgctcctcactttccagactgggcagccaggcagaggggctcctcacatctcagacgatgggtggccgggcagagacgctcctcacttcctagatgtgatggcgtcacttcctagatgtgatggcggccgggaagaggtgctcctcacttcctagatgggatggcggcggggcggagacgctcctcactttccagactgggcagccaggcagaggggctcctcacatcccagacgatgggcagccaggcagagacactcctcacttcccagacggggtggcggccgggcagaggctgcaatctcagcactttgggaggccaaggcaggcggctgggaggtggaggttgtagcgagccaagatcacgccactgcactccagcctgggcaccattgagcactgagtgaacgagactccatctgcaatcccggcacctcgggaggctgaggctggcggatcactcgcggttaggggctggagaccggcctggccaacacagcgaaaccccgtctccaccaaaaccagtcaggcgtggcggcgcgtgcctgcaattgcaggcactcggcaggctgaggcaggagaatcaggcagggaggttgcagtgagctgagatggcagcagtacagtccagcttcggctcggcatgagagggagaccgtggaaagagagggaggggagaccgtggaaagagagggagagggagaccgtggaaagagagggagagggagaccgtggaaagagagggagagggagaccgtggaaagagagggagagggagaccgtggggagagggagagggagaagactattttaaacagctttgtaacatgctttttgagtgtctcttctttcctaatgttttaattatgtaacatttgaaaccttcagaaaaggtgaaagaagaaaaactaatacaatgaatacctgtttacacttcatctagatcaaaaattaaaacattgttaacattttgccacatttattttctgtatatgtgtgtgtgtatacatgtatacttttaacatgtagataatgattttttttggctgaaccttttgaaataagtttcagacagcatgcatctctcaagaataaagacattgaccgggcatagtggctcactcctgtaatcccagcacttaaggaggctgaggcaggtagatcacttgagcccaggagtttgagaccagccagggcaacatggcaaaaccccatctctacaaaaacaaacaaaaaattagccaggcgtggaggtgcacacctgtagtcctacctacttacccggaagattgtggtgggaggatcacctgagcctgggaggtggaggctgcagtgagctgtgatcacatcactgcactccaggctggatgatagagtgagaccctgtctttttttttttcctttcttttcttcttcttcttttttttttgagatggagtctcactctgttgcccaggctggagcgaaatggcgcggtctgggcacactgcaacctctgcctcctggattcaagcagttctcctgccttagcctcccaagtagctgggattataggcatgtgccaccacacccggctaatttttgtatttttaatggagacggggtttcgccttgttggccaggctggtctcaaactcttgacctcaagtgatccatccgcctcggcctcccaaagtgctggattacaggtatgagccactgcacccggccgacattgtttttcataaccacaacaccagtatacctaactaacaattatttaataataatactgaatatctaacccatgttcaaatttccccaatccaaaacatcttttgtaataatttttcaacttgaaacatttgtaatggtaggattttcaaaacaattttttagagtagtaaactggaggctgaggcagatggatcacttgaagccaggagtttgagaccagcctggccaacgtggtgaaaccccgtctctactgaaaatacagaaattagctgggcatggtggcgctcacctggagtcccagctactttggaggctgaagcaggagaatcatttgaacctgagaggcagagtttgcagtaggccaagatcgcaccactgcactccagcctaggtgatagagtgagactccatctcaaaaataaataaataaataaatagagtagtaaactgtttgctagtaatgaccaaaagatggattagtgacatgtcattgggtcaccttagtactgctgggtggtatatacaccactcataccaccaaaaaatgataaaaataacctcaataacaagaagggatacttattgaacccttattggaaccagagaccatgtcaggcactctgtatgtttgttccctaattcatttctttttttaagtaacaaataccctggaagctcccttaattcttgcaattaccctttgaagtatgtatgttttacagattaaaaaacaacaacatggctgggtgcagtggctcacgcctgtaatcccagcactttgggaggctgaggcggatggattacgaggtcaggagattgagaccatcctggctaacagagtgaaacaccgtctctactaaaaatacaaaaaattagctggttgtggtggcacatacctgtagtttcagctattcgggatgctgaggcaggagaatcacttgaacccgggaggcggaggttgcagtgagccaagatcgtaccactgcacttcagcctaggcaacagagcgagactccatctcaacaacaaagctcagagaggtttaataagtctctcagggtcactcttcaactaagagcagagttgggatttaaacctggttccaaccaggtgcagtggctcacacacgtaatcccaacactttgggaggctgaggcagtcagattacctgaggtcaggagtttgagaccagcctggccaatatggtgaaaccccatctctactaaaaatacaaaaattagtcaggcgtggtggcatgcacctggagtcccaactatttgggaggctgaggcaggataatcgcttgaacccaggagaaggaggttgcagtaagccaagatcgcgccactgcactccagcctgggcgacagagcaagactccatctcaaaaaaataaataaataggccgggagcagtggctcacgcctataatcccaccactttgggaggccaaggcgggtggatcacgaggtcaggagatcaagaccatcctggctaacacggtgaaatcctgtctctactcaaaatacaaaaaattagccgggcgtggtggcgggtgcctgtagtcccagctactcaggaggctgaggcaggagaatggtatgaacctgggaggcggagcttgcagtgagccgagatcgcgccactgcactccagcctgggtgacagagcgagactccgtctcaaaaaattaaaaaataaataaataaataaacaaaaaataaaaacctggttcggtgtgactccagaggtccttctctgagccttgctgcttgctacattattacactttgaatccattcctgtggcttacacaaatgaaccagggagaagagaaaagcatgctgtccaagaagcatagatgggtgtgcatgtgtgtgtgtgcacgtgtgtatgtatatgtgtgtgtgcatgtatgtggatcgatccattgcaagagaggatacttctaatgcactgtgcttatgtgaaaggaaaaaggaagtatccagtgctctgggtctgaactcttcaccagctctcaacctgtatacccagggaaagtgacaaagaatagggtcatgactaacagcctgccacattatgactctgatccctgaaaccccttctgtgttcctcccagtgtcattggcacccccttctatgtgatggagtactgcccaggtctcatctacaaagacccttccctgccaggcttggagcccagccacagacgagccatatacactgccatgaacacagtcctgtgcaaaattcacagtgtggatctgcaggctgtgggacttgaagactatgggaagcaaggtgagcaggaggccacgtctcccatgctggttgtttcatcactagtgcttctgcttttaggatctgaatcgttttgggtcgttttgagtattagcacaccaagcgtaaggcagacttagcttcttccttggaaatccagtttagttttaatggaggtgttgctgacttaggcatttgggccttcaataaatccctttatgaactacacagtctttcttccctgcaacttttttttttcattttttctttttttcccttaaatattctgctatccaattccctgcaacttttatctcactagaccatttaaattttttttctgatactgaccataggtatttaaaatgtatttttctccgttttttaccctttcccctaaatattcttttcaacaggaatatatgtattttttgagatgggggtctcactgtgttgcccaggctggtctcaaacttctgggctcaagccatcctcctgtctcagcctcccaagtagttgggactctgggcatgtgccaccgtgtccagtttcaacagggatagtttttttgtttgtttgttttttgagacagggtctctctctgtcgcccacactggagtgtagtggtgtgatctcggctcactgcagcctcaacctcttgggctcaagcaatcctcctgcctctccctcttgagtagctgggactacaggtacgcaccaccatgcccagctaatttttgtatttttagcagagacaggtttttgccacattgcccaggctctacccaaactcctgcgctcaagtgatttggcctcccaaagtgttgggattacaggcatgagcctctgcagccagccctcatgtagttcttaccacatgccaagaatagttctaagggctttacatattttattctcccaacagctctatgaggaccatctcaagatgaggaaactaaagcatagagatgttaagtaacctgcctgagatcacagagctagagaacaacagagctgggtttcatagcctggcagtctggctccagggttcatgtgctcagctaaccactgttgtttagccaaaaagtgatttatgaaaggctattaggaagcacagaagatctttttttttgagatggagttttgctcttgtcacccaggctggagtgcaatggcgcaatctcggctcacttcaacctccgcctcctgggttcaagcgattttcctgcctcagcctcccaagtagctgggatgacaggcacccaccaccacacctggctaatttttgtatttttcagtagagatgcgctttcgccatgttggacaggccagtctcgaactcctgacctcctgcctgcgttggcctcccaaagtgctgggattacaggtgtgagccaccatggccggccacaaggtctttaagaggaccagagatcatacttggagaccatatagctaggaacagcacccagaccacactaatccagccaaagagctggtgacttccaccttggggcagcaggagcatcatgtgggaaattctccagtcataggaacgtgttcaaagacactgcaccacccagtgcagagcatgacaaagggtttcactgcactggtttttttttccgctactttcagaggttgctgaaattgcacaccaagttctaatcctatttcccgcaggggactatattccacgccaggtacgaacctgggttaagcagtatcgagcttccgaaactagcaccatcccagccatggagaggctgatcgaatggctgcccctccatcttccccgtcagcagaggaccacagtggtgcacggggacttcaggtagatgtggtggcagggagagctgaaaaatgacagcaaggatgctccaagggggaattgagcaattggtcttggtgcaatttacagctgggaattattcctattacaaagcacctgtctgtgtgtggccttttcaggcagggtttctcagctctggcactgtgacatgttgaattggataagtttttgtggtgggagctactgtgcattgcaggatgtcaggcatcatccctggcctcaacccactcgatgacagtagcacccctccccacagagtgtgacaaccaaaaatcttcgcagacctggtccagtgttcccagggagggcagcattcctctgttgagacccactgtttgaaagtaaggcagagtctatggccataccaccctgaacaggcccgatctcatctgaaagtaaggcagagtgagggtgccactcacctcccaagaggcctggggatggacattctcactgggtgtaatgaaaggattgaaagagagtgacagggtctctgggggtatgtgatgagtctgtagcacggctaaaatgggaacttcagtatgcctggcgtctggcggcagtgtctagctttatcttatcatctcttgctgtgaaaactgcccgttaggtacttttatagggtagtgtttatagtgttttctgcttcgcagcacctggagacctgcttttgatgcaagcatgccttatttggcttgtcttcttgcccatctggggactcaggccttttattaaacaagactagacagtgaaggctaattttaaagacatttccgtttcttttttttttttttttagacatcgtctcactcagtcgcccaggctggagtgcagtggcgtgatctcagctcactgcctaccccacctcctgggttcaagcaattctcccgccccagcctcccgagcagctgggattacaggtgtgcaccaccatgtgtggctaacttttgtatttttggtaatccaaaaatacaatacatttttagtaatacaaaaatgtgagatggggtttcatcatattgatcaggctggtctcaaactcctgccctcaagtgatctgcccactttggcctcccagagtgctgggattataggcatgagccaccatgcccagccttaaagacatttctttgccttccaaatttgattggcctctcttcattggcttgaccggtgtccctcgctcccggcttcttccgttagccagccacctttggggatccccctgggtctgagagtggacagctgagctttctttgtcatgtggtcatcacgggagcttgaggaacctgcttctgcatcagagactgatggggccaagtgcttcccccacactgccttgaacgtggcatgcagttgggctgcatttgaccccctcctccatcttctttctccacttgggattctagagcacttgcctgacaacactttccttgccagccattgccatgtatttcctttggcggggaagacctcaggtggcctttgtgtcaccagcccacaacagctgctccgtggaccttgtctttgcttctcttggcacctcaacaatccacgaatgtgatcaagtatacagcaggcaggagatatccagtgcagtctgagcaccccctcccctagctatagtgaagtatgatgatcatttaggatgttgcctccaggaaaggcatcctctgattttagagagcgtgctgctgcttattgatcaacacagtcagagatagttctgtcttttgatggatagaagaacatttcttgctagtggagtgaatcagcggtggtgggagcataaactgctgcagctactttgaaaagtagtaggcagtggccaggcacggtgactcaagcgtgtaatcccagcactttgggaggcgaaagcgggcagatcacttgaggtcaggagttcgagaccagcctggccaacatgccaaaatcccatgtctattaaaaatataaaaattacctgagtgtggtggtgcccctgtaatcccagctactcgggagggtgaggcaggagaatcacttgaacccgggaggcagaggttgcagtgagccaagaccgcaccactgcactccagcctgggtgacagagtgagactccatctcaaaaaacaacaaaaaaagaaaagtaatgggcagtaacatggaagatgggaatatgctacaacccatcgtttcttgtaaagaagcatctgctgcagctttgcaccaagagactcaggtgaagatgtttgttttggtcatgcttgtaattataatacatgataaataaagtgtagtttggccatatgttggaattctatttagtgagtaaaataaaccaatttgctgtacataagtcataagtctcaaaaaagataatcgaagtagaaaaaagtttcaaaagggtaatatatcatttatgaaaatttaaaaataattgaaagaacactatatgtggtatataggtacaggtatagataagagaaatatagaaatgtctgagactgatatataccaacttcagggtagcagtaaatctcatttttaaaaaatctgaagcaaatgtaacaaaaaagcacgtacaatatctgttaaatctggaaggtggacacatgagttctgtcattatgtcattctctgtatttttctgcatgcttgatgtttactttttcttttaaataaagcatgcattacagacagccctggcaggaaacagaaagcatgaaagaggctatctggggagagttcaatatagggttatttagttcaatatagcgtggtttagaggaaccgctgaagaacagcgtggagtcccggggccagtaacagtgaggggtcagtctgacagggcaagcatgtgctgtggttattgctactctacaacaaactttgtcagaactgagtggctgtcaacaacgacagcagtcattttgcttatgaatctttgcagtctggggacaggacagcttatttcaaagtagggcggctgtcgggtggggctggatcttctgaagacttgctagcatgctggccctgggcagagaagatattaacagccgggctccttgggcctctctttctgtctctttgtggttcccacatggtctctccagcatggcaacttctgggtaactggactttttttttttgagacaggatcttgcactgtcacccaggctggagtgtagtggcaattcataggctggaacataactcactgcagccaccaactcctgggctcagtgatgctcccaccttagcctcctgagtagctgggactacaggcgtgcactaccacgctcagctaatttttaaatttttttttgtagagataggatcttgttatgttgcccgggctggtcttgaactcctgagcttaagcagtcctccgaaaatgtggggattacaggcatgaaccattgctctcagccctggacttcttacctgggggctcagggctccaaaatagtgtgtttcaagagacagagggctgggcagaagctgtatcacgttttctgacctagtctagtttcaggaatccctcagcatcacttccacgtgtcttatatctgttagaagcaagatgcttcactgggccaagcattagactctaccttttgtgggaggagtgtcaaaggatttacagatctgttttaaaaccatcacagggagggagtaattcccggaacccagagaggctagctctctggggaaggctgcagagaaggagctggggaaataaataaccaggccctttcccatctcctgcttttgattggctgagtccagctggaagccagagggcaagggagcctttggagcacacagcccagggagctcaggcacccgggcacagaggggatgggagggtggggagccaagcctaaagggcaaacagaccacgcagaatccaccctagccggcagttttcttagtgctgtctctattcctcctgcgacttttcaggctcgacaacctggtgtttcatccagaagagccagaggtgcttgctgtccttgactgggaactttctaccttgggcgacccccttgctgatgtggcctacagctgcctggctcattacctgccatccagttttcccgtgctgagaggtaggaactgctgctggaggatagtgggggagcaagccagttctccaagcatttgggagcaaactcagctgaagtagtccgtgattgggcgggggaagtgaaagtgaggtcctggtggttctggtgggaaacataactagaatgcagtcctgtcacatttacgggaaagtggatataggatgtgttttaagtgaaaagtatgcctgtataggtaccgcttatgcttttacacagctaacttctatttagggttttaaattaaaaacacattcattgtggctgggtgtggtgtctcatgcctgtaatcccagcacgttgggaggccaaggcgggtggatcacaaggtcaggagttccagaccagcctggccaacatggtgaaccctgtctctactaaaaatacaaaattagctggacgtggtggcgtgtgcctgtaaccccagctactcgggaggctgaggcaggagaattgtttgaacctgggaggcagaggttgcagtcagctgagatcatgccattgcactccagcctgggcaacagggcgagactccatctcaaaaaaaacaaaaacaaaccacatttattgtgaaaatactagagccaacagatagcaacaacaacaaaacagttaaaatcattagtagtcccagagataaccatttgctgacatttcagtatctatccatgtcatcttttcttctgtgtgtatatgtacatttcctaaaacaaaacaaaaatgtaacatgatctaatggcatgctttttttcacttcattgtatactgtagacatgttttcatgacattaagtatttcttctatagcataatttttaatgagagcatataattttattgtatagaattaagggaagacggccgggcgcggtggcccacgcctgtaatcccagcactttgggaggccgagacgggtggatcacgaggtcaggagatcgagaccatcctggctaacatggtgaaaccccgtctctactaaaaatacaaaaaaattagctgggcgtggtggtgggcacctgtagtcccagctactcaggaggctgaggcaggagaatggtgtgaacccgggaggcggagcttgcaatgagctgagatggcgccactgcactcgagcctaggcaacagagcaagactccatctcaaaaaaaaaaaaagaattaagggaagacatttgggttaattcctatttagatatttaatttgtttccaattttttagtattacttcccctacttccatgaaaaaaaggcagtgaacatccttgtagtaatatatttgcctatatataaggtatactcctaagattaatacctaggaatggaatatattacatgcttctaaatcatgaaaatgtcacaactggaggaaataagtgaattttttttttttttgagacggagtctcgctctgttgcccaggctagagtgcagtggcgcgatctcagctcactgcaagctccacctcccaggttcacaccattctcctgcctcagcctcctaagtagctgggactacaggcacccaccaccacgcccggctaaatttttgtttttgtagtagacatggggtttcaccgtgttagccaggatggtctcgatctcctgacctcatgatccgcccgccttggcctcccaaagtgctaggattacaggcgtgagccactgcgcctggcccgtgaaattattttatttgctataattatcattttcataatttggtgagatctttttatttttatatttatttatttatttgtttatttgtttatttatttttgagatggagtctccctctgtcactcgttttatttatttttgagatggagtctcactctgtcgcccaggctggaccacagtggcgcaatctcggctcactgcaacctctgcctcccgggttcaagcgattctccggcctcggcctcctgagtagctgggattacaggcgtgtgccacaatgtctggctaatttttgtattttcagtagagacagggtcttcaccatgttggccaggctggtgtcgacctcctgacctcaaatgatctgccctcctcggcctcctaaagtgctgggattagaggcatgagccactgcacccagccaattgtttttttttttttttttttgagatggagtcttgctctgtcacccaggctggagtgcagtggcgtgatctcagctcactgcaacctctgcctcctggattcatgcaattctcctgtctcagcctccctcccaggtagctgggattacaggtgcacgccaccatgcctggctaatttttgtatttttagtagagacagggtttcaccatattggtcaggccggtcttgaactcctgacctcaggtgatccacctaactcggcctcccaaagtgctgggattacaggcatgagccactgtgctcgacctgagatcgctctttccatatcatttttgatcaaatgactggttgaagataatatgcatccacccttaactgtggccagatggaattggaagctcccattccttcctttactgccagttgagtctgaaacctgtaagagccaatttgtgaataatgacttcatgcctggatccccagccatctaagggagcaagagccaatgcaggaataagctaacccatggaactggtcgtgaaactaatttgcaagggacatggcgattttcagaatttaaatatttgccagccacaggggcgtgtcacgtcagtgactacccatgaatggctctgtctttctcgcaggtattaatgactgtgacttgacacagctgggaatccctgctgcagaggagtatttcaggatgtactgtctccaaatggggctccctcccactgagaactggaacttctatatggctttttcctttttccgtgtggctgcaatcctacagggagtctacaagcgatcactcacaggtaatgggatggctgccctgaagagccactgcggggtgagtcacagcaaggaccgtgcctccacctggaaaccctctcagggccacagaggctttggagagaccgatttggccaggattctctgaggttcagttaatctaaccatttgtccataaatattttctttacaatatttatttatttattatttgtttttgagacagggtcttgctttgtcaccctggctggagtccagtggtttgatcctggctcactgtaatctctaccttctgggttcaagcgattctcctgcctcagcctccagggtagctgggactacaggcctgcgccaccacgcctggctaatttttttttgtatttttagtagagatgaagtttcaccatgttggccaagctggtctcgaactccgggcctcaagtgatccgtctgccttggcctcccaaagtgctgggattacaggtgtgagccaccatgcccagcctctttacaatatttaaacttgttttttaattattaaagtaatgcacaaagaaatttttccagttaaagcattcatgcacatgatcaaaatttggtcatatagaattatgtaaaattgtatctcacccttttcaacaccattcctcaaagataaatgttactgttaagagtttcctgggccctccagtttttctgtttatctgtcttctctctctcctcctacttttacacaaatgtgatcatcctatgtgtatttttcggtactttgattttaaaattttgtaagcttaagaatttctgtgaaatatgtgtgtgaccatttgcatatttaacaactatatgaggcaaatttcttggtgtgtgtgtgtgtgtgtgtgtgtgtgttgagacagtttctcactctgtcgcccaggctggagtgcagtggtgcgatcttggttcactgcaacctccacctcaccagctcaagcaattctcatgcctcagcctcccaagaagctgggattataggcacataccaccatacccgcgtcatttttttgtttgtttttagtagagatggggttttgccatgttggccaggctggtttcgaactcctgacctcagatgatccatccacctcggcctcccaaagtgctgggattacaggcatgagccactgagcccggccagtccccaagtctttaggtaaaacccctgtggtctttgacaacttccttgctcgctagtatgacaaaatgttccaggttcatcttgtctatccagcctacccaacatggtgaaactgtgtctctactaaaaatacaaaaattagccaggcatggtggcgggtgcctgtaatcccagctacttgggagactgaggcaggagactcacttgaacctgggacggggaggttgcagtgagccgagatcgtgccactacactccagcctgggcgacaagaatgagactctgtctcaaaaaaaaaaaaaaaaaaagacttgggagccaacctgaacaggctcccacttgctaacaataggaaactttgggcatcaccaaggatgatagctgaaatggatgaaacacatcaggtatgtttaaatccatgagtagtagccgggcatggtggctcaggcctgtaatcccagcactttgggaggccaaggtgagcagatcacttgaggttagggattcaagaccagcctggccaacatggtgaaaccacatctctactaaaaatacaaaaattagccaggtgtgatggcgggcgcctaaaatcccagctactcaggggactgaggcaggagagagaatcacttgaacccagggggcagaggttgcagtgagctgagatcgcgcctgtgcactgcagcctgggtgactgagcaagacactgtccccccaaaaataaaaattaaataaataagtccatgagtagtgatacaaaaacaaagagacaaagtctcattgatgacctcagaggttgccaggaaagcaacttattattctgaaaattggaaaatggggtgggggggtggggaatcaagcatttgtcctgtctttcctgtacaaatgatactgcaggctatccaaataatcaatgagggaatgtttctctctagagaagtatcctggacagaataatatagaatttgcatatcaccaatttgcaactcctaatgcattaatggatgtgggcaataagcttcaatgaaagccaacaccactgagagacagacagccagacattatatacctcctgatgcttccctcaaaagttacactgactctgcccaggtctccagtgctagctgccaactcatgggaaacacagggttcagagggacatgttcagcagcaccctgggcacagcactcacaaaatccagattctggaaaacatcacagggcaaacaactcagtttcttcaaacacttacatttcaaggggaggaaaagggtgaaaaaggaacctgtagattgagagagacttaaaagaaacatcaggctgggcgtggtggctcacgcctgtaatcccagcactgtgggaaaccgaggtgggtggatcacctgaggtcaggagtttgagaccagcctggccaacatggggaaaccctgtctctactaaaaaatataaaaattagccaggcctggtggcgggcacctgtaatcccagctactcgggaggctgagataggagaattgcttgaacccaggaggcggaggttgcggcgagccatgattgcatcaccgcagtctagcctgggcaacaaagtgagactgtctcagaaaaaaaaaaggtggggggagcggggagagacttaaaagatacgttagccagttacagtgttgggaccttatttggatcctttcttgaacaaattatttggaaaaaattttgatgatagtcactgaaacttgaattctgagtggatagtcgatgatatgaagaagttaacagttaacgattttttaagggtaataatagtattgtgggtttttaaaaaaacatttgtttttagagttttgaaagaatcctagatgagatatttgggatttactccaaaaaatccaggacagtgggagtggggatggcagggaatgaaaccagactgggctggcatcgatcattgcggaaggcgagcagtagaacccgtaggcttgttattctctcctctctactcctgtgtgtctttgaaattttccaaaaggaggccagtcatgatggctcacgccggtaatcctagcacactgggaggccgaagtaggtggatcacctgaggtcgggagtttgagacccctggccaacatggtgaaaccccgtctccactaaaaatacaaaaattgcctgggtgtggtgatgccgcctataatcccagctacatgggaggctgaggcaggagaatcacttgaacccgggaggcagaggttgcagtgagcagagatcgtgccactacactccagcctgggtgacagagcaagactccatctcaaaaaaaaaaaaaaaaaggccaggtgcggtggctcatgcctgtaatcccagcactttgagaggccgaggcggggggatcacgaggtcaggagatcaagaccatcctggccaacatgatgaaaccccgtctctactaaaaatacaaaaattagctgggcttggtggtgtgtgcctgtaatcccagctactaggtgtctgtaatcccagctaactagggaggctgaggcagatgaatagcttgaaccagggagtcagaggttgcagtgagccgagattgcttcactgttcactccagcctggtgacagagcgagactccatctcaaaaaaaaaaaaaaaaaaaagaaaagaaaaagaaattttccaaaagcaaaacttaaaaacaaaaggcaaggagaaagaaggagaaaggaattcatcatgggatttgctagtgctgatggagtgtttagctttgcagtcagtgacaccccaagcttgctggcagcctgtgttctcagccaggttgccagagtcttctgagagaagcagttgcagtaggggaattgatcattcattcccaagtatatgagcctctactaaaagccagcactgtgctaggtggtcctggagatacacagtcatgagaaaaactgtccggagaaaaaccagtacccagagaatttctagtttaactgtacctggtctgataagcaggggatgctggaagcaggaatttctggaaacaatattttccctcttttaggaaaatacagtatcagctgtaagccactatttcccattttttttatagttttccaataaacactaaccagaaatatttacttaaacagaatggctgctaagtccttatggtgatgaatagtcctggtcacctctgatatttcctagccggctgccaagttttctccctgctctgctccagtgacctgggaaaagcttaatagactgcccattttagagtctccacactgagtgtcctcagcctgtctctcaggaagccctttgacatgtttttaagatcctgtgagccatcgttgtggcttctggtttctctcggcccagagctaaaacaccccacctgtttgccaccagacagaaaaatgtctgtttgttcaggcctttattcctcttatcttactgtgcactcctttccctccctctgggaagccagccagacacactgaggaaatggcttagttttctcacgtaaaaacaacaaaatccattttttgaaagaataatataaaaacgtatgatgaatggggaaaaaaccaactatacaaacataaatattacttctgtacatttgtcttctacaattagctttaaaatcatttttgtttgaacagctgagatatttggtactggccaggaaaactggagcttagagaaggggtatctgtttccaagacattctctctatggtgtcatttacaaaagacttcaaatcagcattagattgggaaggggatgagagagaccagagcccagtgagcagaagattaacagtatgtacctgcccagcccatgtgtccttctccttccttaataagtgggtgcagaaattagatttctggtagatggccactgaaattctataaagtgcttatgactgcaagttaagtggacaccagtgatgtggtctcttctgctggaactacattttggaaaatataccagaagcaatagatctaaatcaatccaagcttatacaagtgacttttttcagggacaaagtagcagtctcagagtgggagccaaccaaatagaagaaaattaagaatacacctcttactctgttagaagaagaaaatccttatgaataataaggaacataagggagtatctttcccttcaatgtgctgtgtgcagtccgaggaataaggaataagcccccactgtgtgtctgcaaggaagaggctatctggtttctgactgacttccctgggttaggttcatacctagcacccagaaggtcctcagtagagacctattgaggtccagtaggctaactctctgcagggtagcaaagaatttgctctgagtttgttcctaactctgtaaggaatagtttaaactatctttaacaccaaagctgcatgaaaatggctgtctcagctgggcatggtggctcatgcctgtaatcccagcagtttggtagactgagacaggaggattgtttgaggccagaagttcgagaccagtttgggcaacgtagtaaggccccatctcttatttaaaaataaataaaatatttatttttttgagacggaattttgctcttgtcacccaggctggagtgcaatggcatgatctcggcccacggcaacctccacctcctgggttcaagcgattctcctgcctcagcctccccggtagctaagattacaggcgtgcatcaccacacctggctaaattttgtacttttagtagagacagggtttcaccatgttgcccaggctggtctcgaactgacctccagtaatccacccacctcagcctcccaaagtgctggggttacaggcgtgagccaaagcacccagcctaaaatgaaatcatttaaaaaaagaaaatggctgtctctttagaactatcaatttatccatttattgggtacagtctcttggggacatggaagtgctagaagtaatccaggagagctggctgtgaaaaagttcactgtgaggagacattgtacacatagcaatctggatgtgtctcagatgcagggctcagagtgatggaggccatactgaaaaggccacatgctgagtgacatatgtatttatgggacatcctggaagagacagactacagaaacagagatcagtgggtgctggggatcaggggggcaggggttgagtacaaaagtacactggggaaatttccagatgatggaaatattctgtttttttttttttttttgaaatggagtctcgctctgttgcccaggcaacctccgcctctcgggttcaagtgattctcctacctcaggctcccaagtagctgggactacaggcatgtgccaccatgcctggctaatttttgtatttttagtagagacaggtttcaccatgttgaccaggctggtctcaaactcctgacctccggtgatccacccgcctcagcctccaaagtgctgagattacaggtgtgagccattgcgcctggccgaagtattctgtatcttgatggcaatggtagttacccaactatggatttgttaagacttgcagagttctacattaaggaggtgtatgtacaccactcctcaatttttttatttttatttatttatttttttgagatgggtgcctcactctctcccaggctggagtgcaatggcacgatctcggctcactgcaacctctgcctcccaggttcaagcgattctcatgccttagcctcctgagtagctgagattacaggcacacaccaccatgcctggctaatttttgtatttttagtagagatgggggtttctccatgttggccagcctggtcttgaactcccgacctcaagtgatccgcccacctcagcctcccaaagtgctgagattacaggtgtgagccaccgcacctggccaccttaattttttttaatggggaaaaatatgtttgtaaaaaaagtcttgatgcacattttacaagaagaaagagacgctgtgagagccaaatagtgagctgagtgatgctggtgttgattccctccagagacagtggtgtctagaagttggctcttcctttagtcagttgtggcattgctgttatcaattttgtagcaagggtggtctaggatgcaggacttcttatagcccactggcaacggcagaggtgatctggggtgttactgattaaatgtagtcttttaggaaagcagagatcaagagcagggagcaggcagacctaagttggactctggcccccagccccctaacttccagctcgtccaagtcacctccttctctaagactcagttttcttgcgtgcaaagtgcaggtgaaagcagttgtattgctttggggattcagtgagctatagtggctcttagcacagtgtttggtacttagcaagtgctcagcaaatggcaatagctgctgaagtgacagtgtcatcacatgttaacatccctatgatgggtcgtgtgggagtaatcactgtttttctttgattctgcttagggcaagcaagctccacatatgcggaacaaactggaaagctgaccgaatttgtgtctaacctggcgtgggatttcgcagtcaaagaagggttccgggttttcaaagagatgcccttcacaaatccgttaacaaggtcctaccacacgtgggccaggccccagtcccagtggtgccccacaggcagcaggagttatagctccgttccagaagcttccccagctcatacctcaaggggaggtctggttatctctccagagagcctctctccacctgtcagagagctgtatcaccggctgaagcacttcatggagcaacgtgtgtaccctgcagagccagagctgcagagtcaccaggcctcagcagccaggtggagcccctccccactgatcgaagacctcaaggtaaagcagccatggtgaggtggtaagaccccaataccatggcataccctccccgaccccaccgggctcacctgaaccatcccaggcagtgaagatacaggagctccgagttgaatgatctttgcttccatcgtctcagaaagagccagctcttcatgactcagtttccatctcttgctcttgctgtgcctgtgtcacaggcagatggctcaggtgtgactgcacagcccaggcagtggaatgcttggccttagaaagccagggcaggttaggcctatctgatgggtatttgaattatgtaaatttgaaacagtgctgtatcagctaataaatctctctctagagaacccgtaatatcacagctagagggccagatccactgtgagctgagtttctgtgttgtctcccagtgctgtcacttcagctgataaacagaaacacccgctgttccttatcacgtgaaccttggattgtgttagttttgaaattacttgagatcttcaggagcataatgcaatcatcatctacttttctttttttctctttttttttgagacggagtcttgctctgtgcaacttccgcctcccaggttcaagcgattctcctgcctcagcctcccgagtaactgggattataggcacgtgccaccatgcccagctaatttttgtatttttaatggagatggagtttcaccatgttgttcaggctggtcttgaactcctgactttgtgatccgcccgcctcggcctcccaaagtgctgggattacaggcgtgagccaccatctctctcttttttttttttttttttttttttgagacagggtctcgctttgtcacccagggtggaatgcagtggtgtggtcatagctcactgcagtctcaacctcctgggctcatgtgatcctcccacttcagcctcctgtgtagctgggaccacaggcacagccaccatgcccagctcctcatatcatttttttgggcacacgtgcatgtttggttgtctgccttgtttcctccaatccctttcattgttttccacggttcaaaataaaatgaaatcttccactgtggtttcctgacttattttccccatgataggagaaagccaaagctgaaggactttggaaccttttcctacccttagaggctgatcccgagaaaaaatacggagcaggactgaccaatgtggaatatgcacatctgtgtgagctcatgggcacgtccctgtatgcccccgaggtaccttctttaaagttttcctcagtgtgtgggaacatcctgatcttcataagaactcaatcctaaacagataaaccagattcagaagcactggcatgaacttgaacttttttttttttttgagatggagtctcgctctgtcacccaggctggagtgtagtggcgaaatcttggcgcactgcaacccctgcctcctgggttcaagtggttctcctgcctcagcttcccaagtagctgggactacaggcatgtgccaccacacctggctaatttttgtatttttagtagatacagggttttaccatgttggccagactggtctcaaactcctgacctcaggtgatccacctaccctggccccacaaagtgctgggattacaggcgtgagccaccatgcccatccaatttgaagcttgaaatattaatgtgagaaggccaggcatggtggctcacacctgtaatcccggtacttttggaggccgaagtgtgggggatcacttgaggccaggagttcgacaccagcgtgtgcaacatagaactctgtatgtacaaaaaaataaaaaattaatcgggtgtgatggtgcatacctgtagtctcagctgcttgggaagctgaggcatgggaggatggcttgagctgaggaagtcgaggctgcagtgagccatgatcgtgccacgatactccagcctgggtgacagagcttgactctgttttttttagaagaggacatgacagtcatggtcacgctccttttccttctcaggtatgtaactgctctgcgcctgacacgggcaacatggagctgctggtgaggtatggcaccgaagcgcagaaggctcgctggctgattcctctgctggaggggaaagcccgctcctgttttgctatgaccgagccccaggtacgtcgcctgggctgccacccacttgcctggccctgttgttgtcggccccacagggaacacgggctgtctgctggcgtctctgactggaatatgctccccactcaggttgcctcttcagatgccaccaacattgaggcttccatcagagaggaggacagcttctatgtcataaacggtcacaaatggtggatcacaggtatttggcctaaaatgcactttccaaatgcacatcagggagtctgtgctgttaggcgcgtctctcaatgcctgggaggagcctctgctttttcaagttgacacaaaggagattctgtcacttagcgcccccagcagaggcagctgggagaataggagggtaatccgtggagcacactgttctcagaggtggcacttcacagggcagggacgtcccccggtgcccacacatggacggatgcctccctgcacatgtgaccccaggaatctctccacttcctgctgttcattctgctttgggcagctccccttccttggtggcttcctggctcctcgatcaggtgtgttacatcctaagggctaatgacaatcctgacttttagggattgtccagtgttacttttgcagggcccctacaagtagccgtggagcttacctcccggagcccatacctccctggacattaagaatgagcatccccattttgcaaaggaggaaaccgcactcagacttaggtcccttgcctggggtatgagcccccagccagcaagtagagaacccagagtcaaaggttcacctgattccaaggcccgggcccagagccgttatgtgtgcaccacctgtgggagccgagccagctggcagggatcaagtagcggttttcatcctcttgtctctaaattatattttctactctatgtgatgcttttaaaaacttgctcttatgatgttggattcattcctcactgggacaaaacccaatttgctcttatttctggtcagcagtctgcagatgctcatctgattacatggagccttaaagagctctgtctgcttccttactgtgcctttcttgggccaggaccacgtgtgtagagatttgatggccctggtgtcagatgatggggtctgtctctctcctttcctggcaggcatcctggatcctcgttgccaactctgtgtgtttatgggaaaaacagacccacatgcaccaagacaccggcagcagtctgtgctcttggttcccatggataccccagggataaaaatcatccggcctctgacggtgtatggactggaagatgcaccaggtgagacctccaggggcgggtcacccctgggtgtgggtctggtccccaggaaacaccactgaggggcccctgctcttgttcaggacttgccacatcccacgtctgagggtatgatgacatttggagtcacatgctcctgcatttcatttccatacatgaatatcaaccatgcaggcggatttcagacaggcatttatggatttttttccctcttctaaacttagaaagtaatcaggagtctgtgacacaggaagccatacagggcagacgcaggaagtggaccccaaacctactcttccaggccccagtgtgaacagctgacctctaggccacagccctggtttggtccgctcccagtttggttctctgctaatagtgttcacatttttactttcagtgttttcataggatcactacattgtcacaaaccactaggagcttcagcttaaggtggcattattatgtttttataaaaggaatcacagaatagtcatttgccattataaatcagtgattcattttctgtgtttaacaggctgtttcctgccgtccttttccctttaaccatgtcccagtaagaaggctaaataaagggcagggacattgccagcagataacccagactgaggtgaggaataaacacatccaaggaaaatgactatggctattgctcacagtgatcgtttgggtctttcaggtggccatggtgaagtccgatttgagcacgtgcgtgtgcccaaagagaacatggtcctgggccctggccgaggctttgagatcgcccagggcagactgggccccggcaggatccatcactgcatgaggctgatcgggttctcagagagggccctggcactcatgaaggcccgcgtgagtgctttcccccgcacccagcactgactcagaaccaccaccttctgctttgctgtcggacttcaattcctacctgttttctgagtgcagtcctagcaggtgaagcaaggtgatgtccttgccaagaagttgcattcctgtctgctttgcatctgctactttgctgcagtttggattcagagcagaatggaccccactctgtcgaggtgacctgaagggaaacgccaggctctgtagcagcagaggcaaggttccaaggtgtaaaggtcatgctgctagcacattattaaaaatcagtctgggtgcaatggctcacagctataatcccagtactttgggaggtctaggtaggagggttgcttgaagccaagcatttgagaccagcctaggcgaaaaagagagactcagtctctacaaaaaaaaaaaaaattttttttttttttttgagatggagtcttgctctgtcaccaggctggagttcagtggtgtgatctcggctcactgcaacctccacctcccgggttcaagcaattctcctgccttagcctcccaagtagttgggactacaggcacgtgccaccacgcccagctaatttttgtatttttagtagagacagggtttcaccatgttggccaggaaggtctcgatcccttgacctcgtgatctgcccgcctcgggctcccaaaatgctgggattacaggtgtgagccaccgtgcccggcaaaaaaaagaaaaagttttttttgttttttttttttttgagacggaatctcactctgttgcctaggctggagtgcagtggcgcgatcttggctcactgcaacctctgcctactgggttcacaccattctcttgcctcagcctcccgagtagctgggactacaggcacccgccaccatgcctggctaattttttgtatttttagtagagatggggtttcaccatgttagccaggatggtttcgatctcaccgtgttagccaggatggtctcgatctcctgacctcatgatccgcccacctcagcctcccaatgtgctgggattaccggcgtgagccaccgtgcctggccaaaaagaaaaagttttaagtgccaggcatggtagcatgtgtctctagtcccagctactcaggaggctgaggcagaaggatcgcttgagcccaggagtttagggctgcagtgagcagtgatcacaccactgcactccagcctgggtgacagagtgagaccctgtctctttaaaaataaataaataaataaaaatcagacaccagggagatcccatgttgcttgtttttgtccctaggcttccatcatctggcctgtaccaccctcctccacagcacatccagaaaactttattcggccataatcctaccacccccaaagtttggaaacctaggttaaaagacagctgcttccaggacaggaattcaaattggtgattatcaatttcagaaaggtgacgcaaaccctgagaccaaaaccagtgtctcacaagaactgctattgaaagaacagaggcagtctgaattttttattaccgagcaaacctgtgatttacacccttttgagttaagactgaccagttattttttctttctaagtaaaacgctcctgtctatggactcaggtatggtgcttcagccccacatggaattaaattcagccttctggcagaataattggactgaatgagtcagacagaagtctccagaaagtgcatagcatgaacatggcacctccactgaagacttggttggagtaattaggaatctacaaaagatttgctacaaggaggttcaccacagtgcttattgaaatagcaaaattctgaacaacctataaggctaacaatgactgttggccaaataaaacacaagatggcatacagtgagactttaaatgatgctgtggaaatctattccttaacatggagaaattgctcactatatacacttaaatttaaaaaaaaagactgtggccaggtgtggtgacactcccagcactctgagaggccgaggcaggcagattgcttgagcccaggaatttgaaactagcctgggcaatacggcaaaacctcatctctataaaaaataaggctgggcgcggtggctaacgcctgtaatctcagcactttgggaggctgaggtgggcggatcacttcaggttaggagtttaagaccagcctcgccaacatggtgataccccgtctctactaaaaatacagaagttagctgggcatggtggcacatgcctgtaatcccagctacttgggaggctgaggcaggaggatcacttgaatccaggaggcggaggttgcactgagctgagattgcaccactgcactctagccggagtgacaaagcaagactccatctcaaaaaaaaaaattaaaattaaaaaattaaaaatagtagccaggtggggctgggtgtggtggctcatacctgtaattccagcactttgggaggccgaggtgggcagatcacctgaggtcgggagttcgagtccagcctgaccaacatagagaaaccctgtctctactaaaaatataaaattagttggacgtggtggcgcatgcctgtaatcccagctacttgggaggctgaggcaggagaatcgcctgaacccgggaggtggaggttgcggtgagccgagatcgcaccattgcactccagcctgggcaacaagagcgatactctgtctcaaaaaaaaaaaaaaaaagtagccaggtgtggtggcacacatttatagtcctagctactcaggaggctgaggtgggaggatctcctgagcctgggaggtcgaggctgcagcgacctgtgagtgtgccattgcactgcagcctgggtaacagagcaacaccctgtctgggaaaaaaaaaaacaaacaaaaacaggctgttagctttgatgcaaaataatgttttgttgttgttgttgttgttgttgttattgttttaagcaggctggccgggtgctgtggttcatgcctgtaatcccagcactttgagaggccaaggcaggcagatcacctgaggtcaggagttcaagaccagtcaggccaaaattatgaaacaccccatctctattaaaaaaatacaaaaattagccaggtgtggtggcaggcacctgtaatctcagctacttgggaggctgaagcaggagaatcacttgaaccccgggaggcagaggttgcagtgagccgagatcgcgccactgcactccagcctgggcaacaaaagcgaaactctgtctcaaacaaacaaaaaggctacaaaaccatatatagagtgtggctcccgtttttggaaaaaataagtatatataaaaaaactatagaaggatagaggagaatatccaccaaatattaactagtggtgactagatggtgggattctaggtgctcttactgtcttctctttttttgttctgaaaacaggtagtttttctgccatgagataaattatttgtgtagattgtttttagtgaaaaaaaaaaaaaaaaactaggctgggtgtggtggttcatgcctgtaatcccaacacttggggagaccaaggcaggaggattgcctgagtctaagagtttgagaccagtctgggcaatgtagtgagaccctgtctctacaaaaaattggaaagttagctagatgtggtggttcttgcctgtggtcccagctactcaggtggctgaggtaggaagattgcttgagcccgggaggcggaggttgcagtgagccaagatcacgccactgcactccagcctgcgcaacaaagtgagaccccgtctccaaaaaaataataaaaaaaagaaggaaaaagaataaataaaacaagaaaaaaaaaggaatacttagaaccttttctgatgccttgtgactttcagaatttaaaatcccccttgcagataaggccacccacggcggaaggccgggagcgagacggggctgaggggaccttgctcccattggagctgcagggcaggaaggggtgctgcggtcagcagagggcacccttcgcctgcgccgtgtgcagtgcctgcagtcactccctcattcccaggagtagccttgggtcagatgctggctcagatctataactgctcctgtctggtagccaggcctgcccagatgtgcaatggctggaataaagggttcttggaagcaatttgttacaggcaccctgtgggctgtggctggctgtggcacacgtgaaggttgtgtgtcagacctactccctggacatggcgcatggctgcacacaggcaccttggctgagaagatgcacagtcctggtttcactctcctcccctgccctgtcctgtctgcttccacccagctctgcaggccaccagcccccgcctctcgtggccacccccagcccagcatgtcctcagccgcacatctcctgtgtcgacaggtgaagtcccgcttggcttttgggaagcccctggtggagcagggcacagtgctggcggacatcgcgcagtcgcgcgtggagattgagcaggcacggctgctggtgctgagagctgcccacctcatggacctggcaggaaacaaggtaggggcaggggcacgagggggcctcccagaggcagagattcttcctcctcactcagcaaagcatgagagcctggcttcttgacattagaaactttatttcacctctacttggagctgtttgggcagtttttcaaaaattggaaaggcacaagaagagaggactggcctttgtgttttactgacctggtgagctgcttagtccaaggcagtgggtctgatggggccacagggcccctgggtggccctggactcccagggccattggtggaggtgttgggcaacctaagagtaaggcagggaaaagggaccctctgctggccttcatctgaatattgaattaacaaaaatagaagcttattttcaagtgtgacattagtcattcactaaggctctttttaaccttttatttatttattttttgagacagggccttgctctgtagccaggctagaatgcagtggtacatcatggctcactgaagcctcagcctcccaagtagctgggactccaggcgcaaacctccatgcccagctaattctttattttttgtagagaccggctctcaccatgttgcccaggctaactaaggctctttctaagtgcctgtgatgaccaagcacaatgccatgttgaccttgctttgtccagctttctgtggggcagcctccaaccccacccaagaccctcaaccatcagggaccaacccatgctcatgctcacagttcctggttctttgacgctggcgtgctagatatggtggaggctgctgggtgtctcccttgaacaccctgccccagggcagatcactgtagctcggtttcccagagccctgagtggccttggtccactgctgcttggaggcagagctggccgtgaccctgagcaaagcacaggaccctccccttatcccttcagtgtgtgctggctgtgttccccgtcatctgggaagacagccacattctgccagcacttgcttcgcatcttgtgacataagataatagttgccaacatggcgcccttcatccctgggtgctgtcaagccgtacaccaggcaggggcagcctcacccagctcacatcagcgagaccttggggcctctgttttggacggtggtgtttgacttcttgctgggaatctgatcattcttccaggctttctgccttcgggtcttttttgtggtttagtttttcgttttgtttttgagagacagagtctcactcggtggcccaggctggagtagagtggcacaatcttggctcactgcaacctccgcctcccgggttcaagcagctctcttgcctcagtttcccaagtagctgggactacaggtgtgcaccatcacgcccagctaatttttgtattttttagtagagactgggtttcactatatgttggccaggttggtctcaaactcctgacctcaggtgatctgcccgcctcggcctcccaaagtgctggaatcacaggcctgaaccaccgcgcctggcctgttgtttgtttttgagagggggtctcactctgttgtccaggcttgagtgcagtgttgcaatctcagcttaccacagcccccaacttcccagactcaaacaatcctctcacctcagcctcctgagtagctgggactacaagcacatgctaccacaccctgctagtttttgtatttttagtagagatgggggacgggggggcctcactctgccacccaggctgccctcgggtcttttatgatcgcatctcctcctccttacaggctgcagccttggatatagccatgattaaaatggtcgccccgtccatggcctcccgagtgattgatcgtgcgattcaggtgagcacagaccagacagttggcttatttgaaccatcaatactagatgccaaactctcctatcttcagccgcccagcctcccatagaccctggcagatgccctgtgtcacccactcaccatgcatgcaactttccttttcctcttcagaatgacccagcaaggtgggaggtgccatcgtacccccattttgaatgtgaggaaacaggcacagaaaagtgaagtgacttgtccaggtcactgagcttgcaagtagctgacctcaaattcacatgaacttgggttttcataagcccagagcccaggctctttcccatgcaggggggccgcctccttagatcctaacccccggccccagcacagggcagaaggcacctgcagagtgggcctggggagtctggaggccgtgggatggcaggtgtggccccatggaagccctctggaatattagtgattgtatcacataggtgccacagggaagtccgggaagatggttgttatgggccatcaagagcaggctatcattcctggggctctcggagacaagggctgacccagggccgcctccctccactctgtgtctgccaggcctttggagcagcaggcctgagcagcgactacccactggctcagttcttcacctgggcccgagccctgcgctttgccgacggccctgacgaggtgcaccgggccacggtggccaagctagagctgaagcaccgcatttagagccttggggctgcagtggctcaatgtcctggctggtccagctgtgcccagatctgtcactgatgtgcctcgaaagatccggtgtttgtggctcctgcaccctgctcagcagctctgtcccgggacagtcagggtggactcaatctttctggttctccacagaagacgtctctgcaagaagcctggagtctgtttcaggccaggaggaggggatttgctgagggccaagggggttctgggacagagtctggaaagctggtcttcaggctctcagtcccaggctgggcaggcacggtcacttcacttcagcctttcagtccctctctctctgcctgtgggaatctggacacattttgggaggcctcccaaggctgtgggacgtgcttgctctggcagctgcagggttcctgtctggcctccctggtgagcagaggggcggccacggcgggcggtggcctagagacccaggacctgggcgcctgggaaaatggaatgcaacccacattgtaaagccactggcatctgattatctccatttgaacacacagcacagaacaatcatttaaatgttattttggaaaggggttttggggacacagaagaataagtaaacacatctcggaggctttgtggactttctgtgtcatacaaagagaatcgagtggagaggttcccttcagcgccttcatgcctcctcctgcctgtgtttcctcgaggtccaggccatcatctcagccccatacatgctgggagcacagaggccacgggtccgataagtcccgagttggctgccttccctcactatgtagcccggggctctgtgctcatacatactttacccaggagctggcatgtgaggcccctgcagcctccacctgctccatagtcagaatatctgggcgaaggggaggtggtggcccattcgccattacactttggagcacaatctctcttctctgaggagagtggaaatgcttactcacttgcagtctgagctccttgagaaacccagcgacatgcagaggtgagccaggggcagtgaggccccagcctgctcgtctcataactcgtggtggggtagccaaaactcgtctcaggttagaccagacgggcaggaaccatcccccccggctgccaccttgcagaggtgaccctgtgggaactgccttccctgagaatggccagccaggatcagcaccatgaggggcccgtgaatgggctcctcagacccacatgcccaggggtctggggaggcaggtcccccttcaccacacttgagaaactgcttgttgctcaaggaagttaaaccccaaacaaatgcctgtcacaatgacagccacactggccaggagcccactgctaagctggcaggagcgcagcagctgagtgctccctcaggctccgggaggagaggttttcttcaaaaaaaaggaagtggtcgtggcctggcctgtctcatgggcctaagaatgtctttcgtggcctctgaggttaaccttgcctgttcagtaacgcagctgctgagaggaaaatgggagtcaggctgtgggtacccccatatctccctcagatcctctgccttgagggctagagaccccgggggccccaggaatgctgcctgcagacaggcaggtcccccccaggccctccacctctgctagatcattctgcccaccactgtcgagggagcctcagctctgggcccagcaggagtccaggccttggggaatgtgcaagtaaacaaaacaggacaactgctggcctttgggggtttgcatctcaagtaggggatggcggttagtgccccagaggcctgggcgtgtgatggggcaagcactgctggggctggaggctgaggggaggactctttccagaagaggtgtctcagccaaacctgcctgacaagaagaaagggcaggctgggcgccgcgggtcacacacataatgccagcacttcgggaggccagatggtgtctggatgccaagacctgtgctcgccaaggcctgatttcagataccgtcagatcattccacaacaatcctacagaggctgcaaagagacacttccaggcaacttgtctgggcagggccccttcaagacggcagctgggagtgacaccgaaagaacaggctccagtgatctctgctgcttgtacccattgtcagtcccccagggttgtcggtcaccacccagggcttcagagttccccagggatgcctcgggcgtgccaaggctgtcactcagagacccctcttgttggtatttctgctgccctccctgctgcgacataggtacagatttctccccttcgtccattttaccaaaatggatgcgcgttgggacaggtgagtcccggactccagcggcctggggcccacacctgcaagtaacctgggacagggtttcttttaatcaagttgactgagtggagaaatggcccaggggattttctgtcctatcagtgttagacggatgacacagtggtgaagagctgtcagaggtaaaggcggacactaaagtggtagggacaggttttatttatttttctgagacagagtctcactctgttgcccaggctggagtgcattggtgccatcttggctcactgcaacctccacctcctgggtttaagcagttctcctacctcagccttccgagtagctgggattacaagcatgcaccaccatgcctggctaatttttgtatttttagtagagacagggttttgccatgttgaccaggctggtcttgaactcccgatttcaagtgatctgcctgcttcaacctcccaaagtgctgggattataggcgtgagccaccgtgcccagcagggacaggttttaatcagtcataagccattgctttagagagcagggcccagcgggaactgagctccacttggatttgtgcggaggtgatgggaggggtggtggttgggaggggggctcaagagtcaggaaggggaaccagagagagcaggaaggagtgtggttggcgtgacacctgtctgggtttgctaactggcgcttagggttaggctcctgccctcccttggaggctgggggacagggtccatcttctagtgttgctggaacaaacagtaatttctttcagcagctttgggctttctcaggcaggtacgggcatcccacagatgtggtcttgagatgttggacaccatgtaacttaagtcttttcatgggagtatgggggtgtggacttaagcatttgtgctgaaagtctgcagttttaatatgccaagtttgaggtctagtggagatgggagttcagaggaaggctggcgagagcgtgctcaaggagagaatttttgtcaggactgtggctctagattcaaatggcccaaattcaaatgggtttaaatcctgactctgtgacagagtagctgggcaacctttggaaatgttccttcatcttagagacttagatctctcgttttatttatttatttatttaaattttttttaagagacagaggtctcaccatgttggccaggctggtctcaaactcctgagctcaagcaatcctcctacctcagcatcccaaagtgctgggattataagcatgcgccaccacacccggccagatttctcatttgaaaaatgagtagaccagtccttgcttcccagaatcacctgaggattaaatgggatgatgtgtggcttaccataagccacagcacacaccagctgttcgtgtgtggctggagtcaggagcgggacccgctaaagaggaggcggctgtgctcacattggagtgcaagaatgtggggcctcatctgggctgaggactagcctggaccacataagatgccatgcttctcacactcaactagcaaaggaatgcccctgcgatcaggttaaaatgcagagcgtggtgcggtgggcctgccttcctaacacacttgcaggtcatgctccttgttttgggacccactttgagaagcgagggtgagaagggcttgacttccctaacctgatccccaggggaggcagaatgagcagacaccgcctggctagaatcataagagctactgggtatttagtacataccaggtgccaagaactatctgtatattattattattattgttttttgagacagagtctcactctgttgtgcaggctggagtgcagtggtacgatctcagctcactgcagcctctgcctcccgggttcaagtgattttccagtctcagcttcctgagtagctgggactacaggcacgcaccaccacacctggctaatttttgtaattttagtagagacggtttcaccatgttggccaggcttgtcttgaactcctgacaggtgattgacccacctcagcctcctaaagtgctgggattacaggcatggccactgcgcctggccagttattttgaaccctataacaattggcagatccttttattctgcccctgctagagatgaggagacagaggttcaaaggaattgtgcaacttgcttaagatcacacagcttgtcagtgaattcaaacctaaattcagaagatcccagagctctttctactccatggcatggatcgttaagatcacctctgtgaggtactggcctcctcacctaggaaaggaggaagatgatgaggctcatgtcaccaaggagagcgtgctgtgccctcaagaagtgcatgagcttctgatgcttccagaataatctccgggatgcccccccgactgcctcttagggggtcaggctccatgatgggggtgtctgccctgtggccctggctgcctgtggagtgtcaagccagctgtgtgtccgagagagagagagattgtgtgtgtgtgtgtgtgtgtgtgtgtgtatgtgtgtgtgtgtacatatgcaaacaaggagggcagagctggggctcagggctgaccatatttttcctcctacctgtgagggcagatgtcttactgtgttttgttttgttttgcttttgagacggagttttgctcttgttgcccaggctggagtgcaatggcattatctcagctcaccgcaacctccgcctctcgggttaaagcgattctccttcctcagcctcccaagtagctgagattacaggcatgcaccactacacctggctaattttgtatttttagtagagatggggtttctccatgttggtcaggctggtctagaactcccaacttcagatgatccgcccgcctcggcctcaaagtgttggattataggctgagccactgcccccagccagatgtcttcctgttaaaatggggctttaaattcctcacctaacatcattgtttgcaacaacagcaacaaagagcttccatagacagagtcagtgtcccagaacggggactaaacaaccaaacatctagaatctcaccagtcagtgaccctgaaggagacctcagtcacaacctttgttggagagcaagtggaactagggttttttaaagcctgaaagcacatcagttgtgccctaacaatgaaaggtttcagagtagttgaaagctaggaatttgaatatcttagaggaagttaagtggcttgaggtgcttccaccgaaggtctcagcaccatgagaatgcctgtgcttctgccggccccattcctgccagtgagcccacagacaaggggcgatgaagaaccaggaaacagatggaaagaaacgtggaagagaggaaagcctcagactgtcagggtgaaatctaggttgagagttaagttttagttcattctttggagagactgagccacaaggagccataattacaatagcgtttcagcacatccaggtgatcttggtctgcagtatttggttgaggactgtgtgaaagcagctgaggccaaatgtggtggctcacacctgtaatcccagcattttgggaggctgacttgggtggatcacttgaggccaggagtttgagaccagcctggctaatatggtgaaaccctgtctccactaaaaatacaaacattaaccaggcatggtagtgcatgcctgtaatcccagctacttgggaagcttgaggcaggagaatcgcttgaacccaggaggcagaggttgcagtgaactgagatggtaccactgcactgcagcttgggcaacagagagagactccgtctcaaaaaaaaaaaaaaaaaaaaaaaaagcagctaaggaaggctactatggtcacaaaagacttcccagaagatgggacttgggctggatcttgatagggaagatttccataaggagagagggcaggacatgggtggaacaggtgcaccaacagtagggcaccagggatgagagagctgctggttaggattatggtgagcaccacagaccacagacaaaccagaataaacgaacctgtggaccagcgtgtcctgcactgagacacacaccacgcacaccaacagggacgaagcacgttgcccacattgtatcgatgtatgcgaatgtggataagtcagctcattttctccttcccctccccacaaccaagtttactgctgctcctggctcccccatcctggggaatagcacatggtaagaacctcagcacccactccactcctctcgccctcatctccacacagctacctgtcaattccaccttcacactctttctgccaactgagccctcctcatctctctgcctctggcctgcctccccactacaactgagtttccatgcagttctcagaggaatccctcgaaggcacatgtgcaacctcatcacttccaggctgaaagatcttggttaagagaaatattagtacaagctattaagacttaggaggctgccgggcatggtggcacatgcctgtagtctcagcattttgggaggccaaggtgggctgactgcttgagcccaggagttcaagaccagcatgggcaacataaagagaccctatctctacaaaaaaaaaaaaaaaaaattagctggtgccttagtccgttttcatgctgctgataaagacatacctgagactgggcaatttacaaaagaggtttaggccaggtgcggtggctcatgcctgtaatcccagcactttgggaggccaaggcaggtggatcacctgaggtcaggagttcgagactagcctggccaacatgttgaaaccccatctctactaaaaaatacaaaaattagccagtcgtggtggcacgtctgtaatcctagctacttggaaggctgaggaaggagaatcgcttgaatctgggaggcggagtttgcagtgagccaagatagcaccactgcactgcagcctgagtgacagagctagactgtgtctcaaaaaaaaaaaaaaagaaaagaagtttaatggacttatagttccacatagctggggaggcctcacaatcacggcagaaggcaaggaggagcaagtcacgtcttacataaatggccgcaggcagaaaaagagcttgtgcagggaaactcccgtttttaaaaccatcagatctcgtgagactcattcactatcaaaagaacagtgcagtaaagacctgcccccataattcagtcacctcccaccaggttcttcccataacatgtgggaattgtgggagttacaattctagatgagatttgggtagggacgcagtgaaaccatatcagtcaggcatggtggcatgcacctgtaatcacaactactcaggaggctgaggtgggaggatcaattgagcctgggaggtcgaggctgcagcgagttgtgattgtgctactgcactccagcctgggtgacagcgagaccctggtcttggggaaaaaaaacaagaagacttagaaagctacagtgatgaaaacagtgtcatactggcacacgcatacagagatcaatgacacagaatatacagtagttcagaaatagctacttacagttacttagtagtaaaaagatgactggcaggatgtatttgtgccatatatgatagacaaaatgttaattgcctggatacatataaagcacctacaaatcaatttcagaaagaccaacaatccaatagaaaagtgagccagagacatgagcagctagttcatagcagaggaaacatgcatgacttcatctaggcagagatgctcaagctcactcgtaaaagagaagcaaattaatgtggtagtgaaatgccactttttcgtctctcagattagcaaagctaaaaaaaaaatcctgaaacttctactggtgagggtgtaaggaaactcagacatgacaggtagtggggcataaattaaacttctttggagggtaatatatctgtatttaaattgtaaatattctttgttccatttctactaatttctttcttttcttttctttcttttttttttctttttttttttcttttttttttttttttgagacgtagtctcactctatcacccaggctggagttcagtggcacgatctcagctcttggctcactgcaacctctgtctcccagattcaagcaatctcctgcctcaccttctggagtagctgggattacaggcactgcgaccattcctggctaattgtgtgtgtgtgtgtgtgtgtgtgtgtgtgtgtgtgtgtgtgtgtgtgtgtgtgtttagtagagatggggtttcaccatgttggccaggctggtctcgaactcctcacctcaagtgatctacccgcctcagcttcccccccagagtgctgagattacaggcacgagtcatggtgccagcctcatttctattaatttcttaagcaaatcaagagcatacattgtggcattgtttgtagtggcaaaagattggaaacaacctaaatgtccatcataggaaattcatgaaataaaactacctcatgtatccagaggaataccatgaaactgttgaagagaatggggacatagtccttgtgtgctgtgacaaaacgatctccacacacagtattaagggaaaaaaagtacctggcacggtggctcatgcctgtaatcccagaactttgggaggccgaggtgggcggatcacctaaggtcaggagttcgagaccagcttgaccaatatgatgaaaccccatctctactaaaaatacaaaaattaaccaagtgtggtggcatgcgcctgtaatcccagccacttgggaggctgagacaggagaatcgctagaacctgggaggtggaagttgcagtgagcccacatggtgccagcctgggcaacaagagtgaaaccccatctaaaaaaaaaaagcaaggcgccattgggaaggggaagtggggcctgcatggctgaattcagagaaggaagggagtcttggttatcagattatctctgcagctgatctccaaacctatttcccttcttcctggcacaggggccactcatttcccagactcttttgcatggaggcatggttgtgtgattgaaatccagccaggcgagcaggctcagcccacagaaacctcccatgggccacccccatgccttttcttcctctggtttgtgtggaatggtgctgagcccccagggcgactttggtggaatctggtgttgaaatcagagtcccaccgccgggcgcggtggctcacgcctgtaatcccagcactttgggaggccgaggcaggcggatcatgaggtgaggagatcgagaccatcctggctaacacggtgaaaccccgtctctactgaaaatacaaaaaattagccgggcgtggtggcaggcgcctgtggtcccagctactccggaggcggaggcaggagactggtgtgaacccgggaggcagagcttgcagtgagccgagatcgtgccactgcactccagcctaggcgacacagtgagactccgtctcaaaaaaaaaaaaaaaaaaaaagaataagcaaatcatgcaaatcatcctgttctaaactctgaaccgctgcttccaagaccgtccctgcccttgccctggccgcctctctccttgttaactgggctccattcattctttccatttctctaacacgtgccaggtggtctcatctcctggcctttgcccttgctgttccctgtcatcattcaggtctcacttgtcatttcctgaccatggtacttataaaagcagtgccgtctgccccatccatgtcacctcgttcatctccttcacctccgaaatgatctcgcttttgggtttacggccggtctcttcacctggagcatcagccggggaggtcagggtcgccctggctcgggcctgttcacattggggtcaaaggcacacattgggggctcaaccaaggcgagctgcgttcgcggggccgggtctttccgcacaggcggagggcggtggcgggcgcggaggcgtcgcgcgagccagggggcagccacgggccgggggtacctagcgccacccgcttcgcttgcatcagctgcgcgccccatcccgaggaatggtagaggcagccccgcccccggcccgcccccgcctttccattggctgccgcgcggggcggggagcggggtcggctcagtggccctgagaccctagctctgctctcggtccgctcgctgtccgctagcccgctgcgatgttgcgcgctgccgcccgcttcgggccccgcctgggccgccgcctcttgtcagccgccgccacccaggccgtgcctgcccccaaccagcagcccgaggtcttctgcaaccaggtgagcccaccggccgggctcgcgctttgttttccggcccgagtcccccgcaggcccctaggaaggccccgcgccgccgtgggccttagtgtactcatctggggctcgaggggtttgcagaggctgacctggaagcacatctgccccctcctctcctgcaagcattttagccccttcgccgcctctgacagtccccgtcccatttccccgtgacttgggccccctctccgtcttcgcccagcctcggtctgttttccagggccaactctcggggttccgttctccccatggtccttgctttcgggtctccgcagggtccccaccctcacccactcagaagacgcgaccaagtccctctttgcaggaactttcctgtcttttccttagtcatcccctttaccccctgactcatgccctcatccaaggagttcaaaaggaaaaaccaggaaagaggtgatttgcagccacgttctccagttcaccatgggcgaggccacgctcggctgcttccattgctgggagtagggaatcctggaggaccttcggccccagggggccgaccccaaggggtgtctgcggcttccaacgccggcttcgaccaaaccaaggaggagctttccaggataaaactgattcctgtggtccatttattgattgctcaatcagtaatactttggaatattttttgttttgatctttgagtttggttaaagttctagacttcacagaggctgaaattggttatgaaagagtttgttttgtttgtgccagtgcatgttggctgccttctctgacttaagctttttctcctataaatggaaaggcgctctgagggttaggttcacacaggccctcatcaaccagtcacttcatagttaatcacagctcctgtcctgtctgcacagcctttgtgcagcactgttctaagcgtctacctgttttgcaatttaaggtaatttttacaacagcctcagtaggaagggactgtaattctccattttacagatgaagagactgagtcacaaagaggtttagtgactcacctaaagaccaaagtcagtggcatagttggggttcacagctgaacttccaggagtaagcccctaaccagaacattccatggtatgttgtgactctgggtgggaacaaagggaccaccgatcctctgggactattgctgatttgggatgctgtagagctggctcctagccagctgctttcaacagcacacctgctggtctggccctgagtgtggctgcaaatctggatataggtgatgggtaaaggcacatgcgtgtgattttaggggatgttacaaaggtcatttgcaagggaatttttaaaaggataaaataaaatcttttgcataacacaagctaaaaaggcagcagctatggctcccttggcagcctgtgcaagttcatgcttggaagacttgagcatcaaaagatctagcagaggccaggtgcagtagctcatgcctgtaaatcccagcattttgggaggccgaggtgggatgatccgttgagcctaggatttcgagaccagcctgggcaacatagcaagaccctgtctctagtctctactaaaaaagtaaattagttaggtgcggtggcacatgcctgtagtcccagctatatgggaggctgaggtgggatgatcccttgagcctaggatttcgagaccagcctgggcaacatagcaagaccctgtgtctagtctctactaaaaaagtaaattagtcaggtgcggtggcacatgcctgtagtcccagctatatgggaggccgaggtgggaggatcacttgagcctaggagttcgaggctgcagtgagctatgattgggccactacacttagtctgagcaacagaacaagaccctgtctcagaaatgtcctcaaggaacagccatcgccctaggaacccttctggccacaggatctgattaaaatctttatcctttatcacatgcagatgaggcagctgggtccagatatgcacccaggcccataggtaacacatcctgttctccagatttactctgtgggtgtaggctggaggagccgagtcaattccctgtggctgcttttctttatcagactttttgagatcattaaagtaacacatgcccactgtataaaattgcagaggactgacttacaactctctggacatggtcagtcaaggtgattcatgcctgtaattccagcactttgggatgccaaggtgggaagatcgcttgagattagatgtaaggctgcagtgaactatgattgtgccactgcactccagcctgggcaatggagcaagaacccatctcttaaaaaataaataaataaataaacctctctggataccccattttactccctccaagagcactgtgaacaggtgggtgtgtctcttgtagacattttgtttgcatttacaagtgcctgcagcaagagagagagagagagaatgcaagcacaccagacttttttttttttttaacataaatgagatgcaaccacttatattctgaagctcgccgtctcactgaacaatgtacctgggttatcattctgagtacgttcagatctcatttaaccctttccaaggaccacagagcattctactctggtggcgccgtgctggaactggacctcttagagccccctgggctgtttgcagtgtggccttattgctgactcagcagggaagagggatggtgcatacagcagtggactctgcacctcagctgcctcatctgtaaaatggggtaaaatggctgggtgcagtggctcacacctgtaatcccagcattttgcaagactgaagcaggcggatcacgaggtcaggagttcgagactagcctggccaacatagtgaaaccctgtctctactgaaaatacaaaaattagctgggcatggtggcgcgcacctgtaatcccagctacttgggaggctgaggcaggagcatcacttgaacctgggaggcagaggttgcagtgagccgagatcacactactgcattccagcctgggtgacagagcgagactccatctcaaaaaaaaaaaaaaatgtggggggtaaaattccatctgcatcaccgaattgctgtgaggaccaaatggggtgaggcttctgcagccacaggcagtgctggcttcatggccactggtgcctccatattgactgcagccttaagcaggagctgggataacagtgacgctgtggacttgcagtgtcttggtgatcaaactccatttgatatggatgctgttgtatttgcagtttgtttcctgaaggggtgagctagattgtggtaaagtagaatgggagtttggggtgaattaaaacttgcatctttattcttaccctctctttctgtttttgtttttgttttgagacagggtctctcactgttgcccaggctggagtgtagtagtgctcactgcagcctcaacctcccaggctcagtcaacaagttatcctcctacttcagtcttccaagtagctgagactacaggcataccccaccacacctgactaatttttgtattttttattttattttatttatttgagacagactcttgctctgttgcccagggtggagtgcagtggtgtgatcttggctcactctaacctccacctcctgggttcaagcgattctcctgcttgagcctcctgagtagctaggattacaggtgcccaccaccacgcctggctaatttttttgtattcttagtagagatgaggtttcgccatgttggccaggctggctggtcttgaactcctggcctcaggtgatccacctgccctggcctcccaaagtgctgggattaaggcactgcagccagccaattttttataatttttatagagatggggttttgccatgttgcccaggctgggtcttgaacttctaggctcaagcaatcttccctccttggcctcccaaagtgctgggattacagtgtgaagcactgaactaaagagagaactgacaggcaattaaggatggatttcccaaggctaggtgtggtggctcacagctgtaatcccagcactttcagaggctaaggtgggaagattgcttaaccccaggagttcgagaccagcctgggcaacatagcaaaactccatctctacaaaagcttaaaaaaattagctggacatggtggtgagcacctgtagtcacagctacttgggcggctgaggcaggaggattgcttgagccaaggagtttgaggcttcagtgagctttgatcttgccactgcactccatcctgggcaacactgcaagtatacataggcaccatacagaaatgttcattgcaacttcttttatgtcagtaaaagcttaggaaataagccagctcgagctccattgggaaatagatgaacacctatgttacagttataggaggaaataatcctctgcatgtagcagttacaaatcattggctcaacctgtacaaataatgtatctcaaaaacaatatgtcaaggaggaaaaatgtccagcactctacaccatatgaaaccatgaaaactgtacaaaactttatgttgtatgtagatagacagatctccataaaaaatgtgtaagaatgtgctggaaggaaaattctccttggtgtgagggtggttactgcctgagtgggcaggacaggataagggtagtgatgaacgaggactctggcttcatttaaatgtttgatttctttaaaaattggccaggcacggtggctcacgcctgtaatctccgcactttgggaggctgaggcgggcagattgcttgagcacaggagttcgagaccagcctgaccaacatggtgaaaccctgactctgctaaaaatacaaaaattagctaggcctggtagcccacgcttgtaatcccagctactccggaggctgaggcatgagaatcactttaacccgggaggcagaggttgcagtgagccgagatcgcaccactgtactccagcctgggtgacagagtgacacttcgtctgaaaaaaaactccccaaaaaacaaaaaaaacttaataccccatgagcagatattaaaagaaaaaagaaaaaatataatggtcccctgatgtgccacccctgcagataatcactgttaacggtatatctgaagcagaaatttgctttttcttgtttgcctgggagattcttacagaatgagccaaaacctgtgttttggagtgactttgtgctgactgaatctccctattgattgtacaggttgatgacttctttaggagtgtcctttgtttttgtttttgtttttgagatgtagtctcactctgtcgcccgggctggagtgcagtggcacgatcacggctcactgcaacctctgcctcccgggttcaagcgattctcctgcctcagcctcctgagtagctgggattacgggtgccgccaccatgcccagctaattttgtatttttagtagagttggggtttcaccatgttggccaggctagtctcaaactcctgaccttgtgatccacccgccttggcctcccaaagtgctgggattacaggcgtgagccactgcacctggcctcttttttttttggtttttttttttttttttgagacagggtcttgctctgttgcccaggctggagtgcaatggcatgatcataactcactgcaacctcaaactcttgggctgaagcgatcctcctgcgtcagccactagaggcactgggattataggcatgggccacaacatccagctaggagttttaagagcctctatagaaatagatttaggtggccgggcatggcagctcatgccctggcataagagtgaggcctagtgacagagtgagactccgtctcaaaaaaaaaaaacaaaaagaaatagatttaggcaggctgggtgtggtggctcatgcctgtaatcccagcaccttgggaggccgaggcaggcggatcacctcaggtggagaccagcctgaccaatatgatgaaaccccgtctctactaaaaatacaaaaattggccggtgtggtggcatgtacctgtaatcccagctacctgggaggctgagacaggagaaacgcttgaacccaggaggcggaggttgtggtggggcccagtgacaccgcccgcctcagcctcccaaagtgctgggattacaggcatgagccaccgtggccggcccgtgtttttaatcagagaacacaaatgggcattcaatacttcctgcctgcccagaatctgtgggacacacttgagtttcaggtgacagggctataataatgtttgtgctcctgaggtcaagctgagttgagaatttacatgttgtggacatgtgtatgtattccctgctccagtaatcatgattattcatcacctattttccatcaggccctctactgaggacttctacctgcatttcacctttcatcctacccgcaactctataagcctggtagtattgctgtcccgtcttgcgggtgaggaaactgaggctcagggaggtcaagttcacattaagtataactaagggcatgtgtgtgaaggttgggcagggcagaatttgaagcccactttcaaacttataacttaatgtgaacttgacctccctgaataatgatcagaccataagaatgtattaataaacatttaagggacaattgaatagaattttaaaatcagagaggaggagccatgtttgtattgttcacttttgcattcctggcacctagcaccttagcataggatcactgttgggtaaatatttattgaataatgaatggttgccatttacgaaaccatgtttacagttttgtgctccagaagtgaggtaaagggttgcttaatgagaacccagtatttctactcaaaaggaccttattgcaaagtatttggaagtttaaaagagtgggaacatggggacgcatagggagtggtgaaactggctcagggaaagtccattgcagcaagatagaggttgccaaaccgtaagcagaacaagttgaaaccgcgcctgtctggcaaacagtccaaagtggaattgaaactcccatctttgaagtggtgaaaaaaggccctggggtgggggagtggggcagagggctggcgtctgtctgcctgggttagtcttggttcgggagtgtcccgagcaagcctggggagatgactgcccctcgccttgatccccaactaacctggggttctggattatgtgtggggaagagggaatgtgtgtggcattccgtgtttgtcttgaactttactccctggaatcttgtaatacaagcaatggcatctgctttccatcggacataatcacctaaccgcagattagcaagtgaaagagcacatgccgttgggatcatcccaggctgcaaaaccgcgccattagcttgctcactctttgggaaaatacggtgttccagggacggggatttcctaggtaacatgtccagttctctcatgcatcaaagcttgaactgaaatctttctagaatgtatcctgcctccttaaatcagaactactgaacacagtttagcctttcattggagaccctgggcagatgattactgaacacagtttagcctttcattggagaccctgggcagatgataaccacccattgtcatgaggtctgggggtggtggccagaatttcattctctcctggccttggtctgacctccgcccccaaggtccagttgtcctgctctgggcactgaccctgccccagctcctgagcccctcgaccaccacaatcaccactaagtctctgcctggcatggagaacaagatagccaaggtgaagagggatcctgttaccctctaactcagtagttctaatttctacacagtaatctgccccatgtttggaaaaacgcatgtgaaagggttcgccacagctgttgctggaatggcgatcacttgtcctaaaagtgcatttgtaggaaatcgttaaataaaccatggcctgaccgtgttgaggaacgctatgtggcttaacatgaggcagagctgcctgtggaataacgtccaagagaaactgagaaaagcgagttagcaaacagcaagtctattacccccacttagaaaggacacggcagtgtcccggttctctggtctcctgggtcctcccagcatcaagtgcagatcctggcacacagcaggtagaatcgcgagccccccgctctcccctcacctacaccctgcagccactcctcctgtccccaggctcttcctagcagtcacccttcagacccctcagctggccaagcctcctcctgcttctcacttgcttggttttgcttgtttcctgcgccctctcctcaccaggacttcagctcccacaagccaggacttggctcttggactccctgtgctggagtggccagggctgtcagtgaaagcttatggaatgcgtgggtgaatgaatccaatttttacaaaacaaagtgagatgtatttattaaaatatgtaggaattagagtattttgatagaaaatctttatgttttgcctacagtctagattgaaaatgtcaactccagacatcactgtgcttctggaaactataaagaggaagtgggagctaggacatccccccaccacgccccgcccaagagcgtttacgtgtgttatgtaagtcgagcttcgggtttctggtcaggaggttataaagcatttggcccagagtctggcctggtgtttattcaggaaaactgctcctcacttgaagcagaactttggcagaaactcagtgtgagaacagttcctacccagccccccaccggggagggaagccactgagtctggctctgggagaagggaaatgggaaatgtaaaccggaggaggtttccagcgtcctacagcagacccaggtttatcttatcagtggagaagggaggatgggttgttgaaaatgcagcctggttcaacagtgaagggtgattgagaacattctgggctttgaaaggcaaacatgccagggagtggtctttccaggatcctaatctaaatcagaggggccagcccagcgaggaaggggtggggctggtggggttttagccagactggcccacctctccccttcctacttcctgatctttgcaaaataaagtttaaaatccaggacaatttagtatgctttggtgcagggaacaacataaagagtatagacctggccctcgctcctaagaatctttaagctacgagagagctgcaggatctagaacactgcaggaccccctgcgggcaaggtcctagcttaggaactgtacactcgttcttgcatttaaccttcacatcagcccccagaagtactcgatgaggcatctgggaagtgaagggatttgcccagggtcaaatctgtgagggatggagtcagaattcaaacccaggccgggcatggtggcgcacagctgtaatcccagcactttaggagtccaaggcaggaggatcacttgagcacaggagtttgggaccagcctggccaacatggtgaaagcccatctctacaaaaaatacaaaaaaaatcccacctttatttaagaaaaaaaattcaaacccagatctgtttggctttgaggttggtgctttttacaacattcagaataaaattttttttttttttgagactctgttgcccaggctggagtacagtggtgcaatcttggttcactgcaacctccatctcctaggttcaagcaattctcctgcctcagcctgtcgagtagctgggattacaggcaagtgacaccatgcccagctaatttttgcatttttagtagagacagggtttcaccatgttgtccaggctggtctcgaactcctgacctcaaatgatccacctgccttggcctcccaaagtgctgggattacagggatgagccactgtgcctggctcagaatcaaaatgtgaaatcaacgtgtgttgagtcagtaagtaaaccataaagatggagatttgggaatcagaattccaacctccttgaaggcagacctgggctatggctggaggttggagttgggaaaaacacaggccttggagtcccaaagacctggcttcaaagcctggctctgcctttgctgctgtgtgacctagagccaagtggctggactcttctgtgcccagcatcctctgctgtgaagtggagaggatgaagttcacctcctaggtttgctatgaggtttaaatgggaacaatccaagtacacagaaccgctggtgtggggctggttcttgaggggtagctagtgaatgttagccatgtccatgacacgcagagggctgagtggacttcctccctgggtgggggaggaagaagcttggggatagtacaaggccaaccagacctacttccacccagcccagcctagtgcttctctgtactctcctaaccctgctgacccaagtgctttgctgtgaggcagttgtgtgtgaggcgtgaaccctgagcctgtgctacagggggaaggagagaaggatgcctactcaatggctgcaagctgcctgcccgccccccacgcccgtgagcccccatcttccagcaggcagacccgggaactcccttctcctccacgggcaccccgaggaggagctgactttcagagtcggggagtaaacacccaggacctgctgcccaggcacggcatagtccaacttgaacttaggtctggcagtttcctggctttgaacctgagctctttattgccacacctgtccccacactggaaatgacccagccctcccgtggaaagaaagaagggtgccatttccctaaaaattaacgattgactaactaatatgaaaccacacaagcacgcctccagaaccccagttaatgtttacccatgttcttctccggtgccaagagcctttcctgtgggtgcacaactgcgggttccaccatagagattatgcggaacaaatttcagcctgggaatatgattcctgctaggcccttacctgaacgactccttcctggggcactctgtttccaccctgccatcgtcatggcgttgggcattcactccatgcttggcgcagagactgcagaccctcacatggctttataaaaagggggctctagggtgattcccaccctacagatgaggaaacaaagacacaggggtgaggtgcttgtcccatgtgacaaaatcaggagcaaaagagcccatattcggccaggcgcggtggctcacgcctgtaatcccagcactttgggaggccgaggtgagtggatcacctgaggtcaggagttggagaccagcctggccaacatggtgaaaccccgtctctactagaaatacaaaaattagccgggcatggtggcaggcatctgtaatcccagctactcaggaggctgaggcaggagaatcgcttgaacctgaaaggcggaggttgcagtgagccgggatcgctccattgcactccagcctggggaacaagagccagactttgtctaaaaaaaaagaaaaaaaaaaccctcacacctgtaatcccagcactttgggaggcccagacgggcggatcacgaggtcaggagattgagaccatcttggctaactcggtgaaaccccgtctctactaaaaacacagaaaaattagccgggcatggtggcaggcgcctatagtcccagctacttgggaggctgaggcaggagaatggtgtgaacctgggaggttggagtgcagtgagctgagattgcgccactgcactccagcctgggcaacagaatgagactctgtctcaggaaaaaaaaaaaagcccatattcgtccagattctttttttttttttaagagtctttttctgtcacccaggctggagtgcagtgatgcaatcacggcttactgcagcctcaacctcccaggctcaaatggtcctcccacctcagcctcctgagtagctgagactataggcacgcaaccacacctggctaatttttcactttttgtggagagagggtctcactatgttacccatgttggtttcaaactcctgagctcaagcaatcctcccaccttggcctcccaaattgttaggattacaggcgtgagccactgtgcctggccacccagattcttgtcttgaacctctgctcctttttgtgttttcttttttgagagagggtcttgctctgtcacccatgctggaggcagtggtgtgatcatggctcactgcagcctcaacctcccagactcaagcaagtgatccgtccatctcagcctcctaagtagctgggattacaggcgcatgcgaccacacttggctaatttttcattttttgtggagatggaggtctcactatgttactcaggttggtctcaaattcctgagctcaagcaattctcatgccttggcctccaaaagtgctgggactacaggtgtgagccactgtgccaggccaaatgtctgcttttgaccagtgagcctggccacccctccccagccctgttgtgagcctcactccaggctttgcttggcagctcggtattctttatggtccgagactctggcccagagtgaccatggatgtctcactggagttctaggccagggccaggacatgcagggatgctggggccaaagggacccccaaggaaggcaggcagagaggcagatgtctttgccttcacgtcacctgtagcctttgcctcagcactggtgaggtgaccatggaccctgccaggacactggtttaccaagcccgaagggaacagcttgctgggagatgtcttctctgcactccccaagaccatcgcccagtgcctggaaagcagagggcgaactctggcactttatgtatgtatttatttttattttttgagacggagtttcactctcgttgcccaggctggagtgcaatggcgtgatcttggctcactgcaacttctgcctcctgggttcaagcgattctcctgcctcagcctcccgagtagctgggactacaggcgcctgccaccacacctggctaattttttgtatttttagtagagatggggtttcaccgtgttggccagactggtctcaaactctggacctaaggtgatccgcccaccccagcctcccaaagtgctgggattacaggcatgaacaccgcacgcagcctcgcactttaataggtgactttaggtaataagtaaggacccttcctctgagcaaatggaggggctttggctctctgacattggcctcatgaggaaggaagtctttcccccagatgtggcttggttgggtgatggcctggtctgaattacattctagaggcggaaccgtcttgggacccgccctcctccctgaccccgttttttatcacttcctttctggttcaccagtaactctggccacctttgctttttctcaaatctaccagacttattcctgccctggggcctttgcacttgctattccacagcctggactgctggtcctccggctcttcctgtggacccctccttttcatcattccggactcggtcaaatgtccactcctcagggtgacctgcccctaccaccacggctggagttctctaccccccaccttagtcaccttctctggatcctcttcttcccttcgccttcatctgtacagtctgaggtggtcttctgtgtttgattgcctctttatttcctgggcaccatgagagcatggtctttgttggcttttggctgtactgtgtcctcagccctagaactgtgcctggcccatcgcaggtgttcattaagtgtttgctgagtgagtgaagtaataatctagggctgggcatggtgactcacacctgcaatcccaggaccttgggtggctgaggagggagtatcgcttgagtccagcctggggaacatagagggacctcatctctacaagaaatacaaaaattagccaggcgtagtggcgtgtgcctgtggtcccagctactcaggaggctaaggcaggaggatcacttgagcttaagaggaagaggctacagggagccatgatcacgccactgcactccagcctgggcagtggagtgagaccctgtctcaaaaaagaaaaaaaacaataaaaagaataatctaatttagttctcacaacaaatttgtgtgggagtggaatagaatgaaggtggttgcaaattgtttgccattccttctagggagaaggggaggctctctcctcaacctgggactctggactgagcctgtgactcactttgaccaacagaatttggtggcagaaatgaggccaagtgacttctgaagctagatcttaggaagcctttcagcttccacctgggtctctaggaacactgtctcaggggaagccagctgccatgtgggaagtcggactagcttgagccagccatgcagtcaggaagcccaagcagccatgtggtgccagacgagtaagtgcagaagccatcttgcacatccagcctcagaggtggatgactattggccccagctgtcctcacactgtagccacacaagggaactctgcccagatgagcccaaccaggggactctactgtgggagataagaaatcattttaagccaccaagttttagggtgctttgttacacagcaatggataactagaacaagtatgaacattctcttcattttttaaagaaaccaaggcactgagaagtcaagtgacttacccaaggtcacttggcagagtgagcattctggcctagattgtctgcaaggcctgtgcttttcatttgtaggctacaccactctgaaattaattcatatttgctttttcttgtttttttttttccttacaatactggtagtcagtattaggttgacagctggtcctgagaacttctttccttctcattgtagattttcataaacaatgaatggcacgatgccgtcagcaggaaaacattccccaccgtcaatccgtccactggagaggtcatctgtcaggtagctgaaggggacaaggtgagaactggtgacttaccttgggggagggatggattcgtcttctattttatacgtttttgtgtggtgaaagctttaccatatatgtgtattactttcacaagtaacagataccagtgaaaaattccgagtaaattaatcaatagaaacttgtctgcagacaacggtgttaattcacttagtgtagaactatagacttagaagtgaattcggcaaatatctaatacagtgtctcctttccagacctggaagttgaaggtcagagatggaaaccttgctgggtagaatttgggtctcctaagatctagctcctgtggaggtttgaattgtacagactgtaggaaccaatcgaaactgataatattctgtttaaaatttttaaattagactcttagtaaaaatattttgtgtttttggccgggcgcagtggcgcaggcctgtaatcccagcactttgggaggctgaggtgggaggatcacttgaacccaggaatttgagaccagcccggggaaacatagtgagataccatctctaaagtaaacaaagaaacaaataagtaatttaaaactaagaaaatacaggccaggcgcagtggctcaagcctgtaatcccagcactttgggaggccaaggtgggcagatcatgaggtcaggagtttgagaccagcctgaccaacatggtgaaaccccgtctctactaaaaatacagaaattagccaggtgtggtggcatctcttgagtaatcccagctactcaagaggctgaggtaggataattgcttgaacccgggaggcggaggttgcaatgagccgagattgcgccactatactccagcctgggcgacagagcgagatttcgtctcaaaaaaaaaacaaaaaaaaagaaaatacagaaattatccggattctcattcccaccaggacttcatgaaaggaggggaaggtcatgttattcaaccccattgctgaagtctggtgctcatcagggctctgccgggctaggagcattgtttacggggcaggttttctgtgcagcgatatgctgatgaccttctggatgtgtttgtattcggacctggttattactgagaagacctgagttttccaggaaggcttgagttttcctgtgttttctaggaagatgtggacaaggcagtgaaggccgcccgggccgccttccagctgggctcaccttggcgccgcatggacgcatcacacaggggccggctgctgaaccgcctggccgatctgatcgagcgggaccggacctacctggcggtgagtcctcagcccttctccccctcagatcccatgtggtgaataggctcgcagcatcctgtgaacagccaggaaccaagcatcctgtgaacagccagggaacacacatctgacacgggactgatgggaatggcataggatggacacctttagggggcacctctgtactaaccagaggagcctttcagtgtctcctttgtttttttgttttgttttgttttgcttttttgagatggagtctcactctgtcgcctaggctggagtgcagtggcgacatctcggctcactgcaacctccacctcctgggttcaagtgattctcctgcctcagcctcccaagtagctggaattacaggcacaagccaccacgcacagctaatttgtgtatttttagtagagacaaggtttcaccatgttggccaggctggtctccaacccttgggctcaagtaatccacctgcctcagcctcccaaagtgctgggattacaggcgtgagccaccgcacctggcctttgatgcggcgggtttggctaagcaagaaggatctgggggaggggagaggagctgtgtcagggaggccttcccaggagagagacccctgggaatggacacctctccctcggcccctccatggtgggccttctccctggctgcaagaggagaagaaaccaggaggcaatctcctcccagccacaattgattctgcacacagaagccagagcaaaccttccagaaggcagattatacatggcactctgctcttatccctgcatggcatgcggtgtccttaggataaaatcctcaacatggtctgtaagaccagcctgtaacatggcaagatcctgtctctacaaaaagttaaaaaactagctgagtatggtggcatatgcctgtagtcctagctacatggtaggctgaggcaggaggcttgcttgagcccaggagttcaaggctgcagtgagctgttgtggtgccactgcgctccagcctgggcaacagagtcagatcctgtctcaaaaaaaaaatgacccagcctgttctagttccatcatctgagtcatgctgcactgcagtcctcacattcacatgtgctcctgagcctgggctcccatgcttgatggccaagcctctttgagcatcagcgcttgcacctgcctgggatgctcttcgccctgctgccatctgtaccatcccctttgcccagttgccccctacatatcattcaggttctagcctaaagggctcatctctggctgatgtttctagacagggctgggcagcctggctccctgctttctattttttagcattcttttattattattattattttttgagatggagtctcactcttcacccaggctggagtgcaatggcacaatctcggctcactgcaacctctacctcccaagttcaagcaattctcctgcctcagcctccccactagctgggattacaggtgtgcaccaccatgcccagctaattttgtatttttgataaagtcaaggtttcactgttttggtcaggctggtctcgaacacctgcctcggcctcccaaagtgctgggattatagctgcaagtcactacatccggcctctagcactcttaacacatgtgactgaggacttgtgtcattatgcacagtctctttgctctgtaagctccacgctggtctctatcccagcacctggatatggtagagagcagaagctaaaagagtgtgtttatgaaatcactgagtgagaaattggtggctcatcctgcctggcccccttcctcctcctccctgcctttggagagaccatggcaatagtccagagatgctagtgacatttggggcacaaagcggactctcaccctgggcttgcaccagcccttctcagtcccagccttggcgccctctgtcagccctttgttttcctctcattcctgcacccatgtctctgctgaccttgttttcttctcaggccttggagaccctggacaatggcaagccctatgtcatctcctacctggtggatttggacatggtcctcaaatgtctccggtatgggctcagctttcctgttctttgttctggcaggggaaaaggggaggcaacgttgttaggaggtaaaaattaaattacaaaaattcaaaaggggcagagcgcggtatctcatgcctataatcccagcactttgggaggctgagccaggtggattacgtgaggtcaagagtttgagaccagcctggtcaacatgatgaaaccccatctctactaaaaatacaaaaattagctgggcatggtggcgcacacctgtaataccagctactcaggaggctaaggtagaagaatctcttgatccctggaagtggaggtcacagtgagccaagatcacgccactgcactccagcctaggtgacagagtgagactctgtctcaaaaacaaaaacaaaaaatgaataaattacaaaaattcaaaaggatcacaggagtcagagaaggctactctatttagactccagctcatgggaaaatccttcaatatcacaaattgtgattagtcataaatgctttcttttgttcttgagtcacttttggtactttctgtgttatttggaacttgtccattttatcgaggttatctaatttgttggtgtacaattgttcacagtattctcttataatcctttttatctctgtaagatctgtagtgttgtcttcattttcagttttacttatttgggtcttctctctgtttcttagcctagctaaaggtttgtccattttgtaaatgttttcaaagaaccaaacttttggttttgttgattttattatttttctattcaagaaaatattgtcttttgtctatctccgtttcagtctttatttccttccttttactagctttgggtttggtttaatcaaaaatgtttgattgattgattgattgattattattattattttttgagatggagtctcgctctgttgcccaggctggagtgcagtggtgcgatctcagctcactgcaagctccgcctcccgggttcatgccattctcctgcctcagcctcctgagtagctgggactacaggcgcccgccaccatgcccggctgattttttgtatttttagtggagatggggtttcaccgtgttagccaggatggtctcaatctcctgaccttgtgatccaccctccttggcttcccaaagtgctgagattagaggcgtgagccaccacgcctggcgattgattgataattttaattttttttttttgaggcagggtctcactcttgcccaggctggagtgcagtggcacaatcatagttcactgcagtgttgaccttctgggctcaagcaatcttcccacttcagcctcctaagtagctgggaccacaggcgtgcatcaccatgcctggatactttttaaattttttgtagagacgggggtcttgctatgttgcccaggctagttttggactcctgggctcaagtgatcctcccacctcggcctcccaaagtgctgggattacaggcatgagttactatgcccagcaaacataaacatttcaatgaccaaggaacaagggctttgttaaagcccatgtgttggagctgccagaaattcactgaggccaggcacagtggctcacacctgtaatcctagcactttgggaggctgaggcgggtggatcatttgaggtcagaagtccaagaggagcctggccaacatggtgaaaccccatctctactaaatatacaaaaattaaccaggcagtagtggcgcatgcctgtaatctcagctactcaggaggctgaggcacgagaatcacttgaacccaggaggtggaggttacagtgagccgagatcgtgccattgcactccagtctgggtgacagactgaggctccatctcaacaaaaaaaaaaggaaagaaagaaattcactgagcccaacttaaacgatagagtcaagaggtctctaatgcaaaaggccattgagtctcactcacctccctgcttgcttcattctcctcagctacactggctttgagggccagtttttacattgggacctggtagcccacaccacctgttcttgtacctccatgcctgattccagccaggctaagctgtcatcttttagttgtaatgccatattcctgagggaggaccctgagtggctggccttggttctggccagctgtggccaagggtggacagatcatttgtgtacataatggctgcctccctatgacatgtaaacagaggtggtggggaggaagcagtgccagaagagtagaggttggacaagaaaacagttgggccgggcgcagtggctcactcccataatcccagcagtttgggaggccgagctgggtggatcacctgaggtcaggagttcgagaccagcctggccaacatgatgaaaccccgtctctactaaaaatacaaaacttaggctgtgcgcggtggctcatgcctgtaatcccagcactttgggaggtcgcggcggggggatcacgaggtcaggaaatcgagaccatcctggctaacacggtgaaaccccatctctactaaaaatatatatatataaaaaattagctgggcttggtggcaggcgcctatagtcccagctactcaggaggctgaggcaggagaatggtgtgaacctgggaggtggagcttgcagtgagctgagatcgcgccactgcactccagcctgggcaacagagcgagactctgtctcagaaaaaaaaataaaaaataaaaaaattaaaacttagatgggcgtcttggcaggcatgctacttgggagtctgaggcaggagaaccgcttgaacctgggaggcggaggttgcagtgagctgagatcgcgccactgcactccagcctgggagacaagagcgagacttcgtctcaaaaaaaagaaaaaaaaaaagaaaacagtcggtatccttcacaacaggtgcacacagccagggcaatcacgcctccccggggacactgggcaatgtccagagacatttttggcagcctcgactgcgaggggaagggtactactggcatctagtggatagaggtcagagatgctgctcaacatcgtacaatgcccaggacagtcccacaacaaagaattctccagccccagatgtcagcagtgccaaggctgaaaaactccctctgcaaggacaccccagagagagcagcctggtacatctcagttggggccacatgctttcctgaattttggcattctgcttttgtgctgatgaaataacttctggggcttgcaaaacacatgtcatgtagactgtgtttgtatagatctgggggagggaagctgcaatgcctgggcttgcatagattggcaaccccctagctagctttcttccagggtcacaaacccatgttcaaacccaggtcactagccaggtgctaatggctcgagcctgtaatcccagcactttgggaggccaaggcaggaggatcacttgagctcaggagtttgagagcagcctgggcaatatagggagacccacatctctacaaaaaatttaaaaacattagccaggcatggtgacatgtgcctgtagtctcagctactcaggaggctaaggtgggaggatcacttgagcccaggaggtcaaggctacagtgagttatgattgtgccactgtactccagcctgggcaactgagcaagaccctgtttctttctttcttttcttttttttttttttttttgagacagagtctcgctctgttgcccaggctggagtacagtggcgtgatctcggctcactgcaacctccgcctcccaggtttaagccattcttctgcctcagcctcccgaggtgctgggattacaggcacccgccaccacgcccagctaattttttgtatttttagtagagacggggtttcaccaccttggccaggctggtctcgaactcctgacctcgtgatctgctcacctaggcctcccaaagtgctgggattacaagtgtgagccaccacacccagcaagaccctgtttcttaaaaaaaacaaagaaggtcaggcatggtggcaggtgcctgtaatcccagctacttgggaggctgaggtagagaatcgcttgaacctggggggccgaggttgcagtgagcccagatcacaccactgcactccatcctgggagacagagcgagacgctgtctcaaaaaaaaaaaaagaaaagaaaagaaagaaaaaaaaaaaatctaattcctgggcatgagccccagagagtgggattgagtagattggaaatggactcctgggatctggtgttttttacaagaaccccaggcgattctgaggcttgggggttagctacctagagtagattttcgtgacctttgcagtcacttgtctctctctgaataagccaaaagcaaagacagttttcagaaagactcagctggaccagtttgagtcttctctttctgccagggtttgcaggggtccctgacaatcattgattcgagcttgaacgtttctttgtttaaaggtattatgccggctgggctgataagtaccacgggaaaaccatccccattgacggagacttcttcagctacacacgccatgaacctgtgggggtgtgcgggcagatcattccggtgagtccagcctccctggagtttcttcagggtgccctgagatttggcagtctgccagactcattgcagaggttctggggtggtgtcggaaggcagcctgggtggcaggtaagaagatgggctctgacaaagccaatccggtttgagtctcagcactgccactcgtgaattctgtaaccttgggcaagtcacttatcccccaagcctcagtttccccatctgaaaagtggaaatgaacatagtgcctgtcttagggaggtaattagggcttagcatggtgtcacggacataaaagcacggataaatgtgagtctgtcatcgttgtgcaccgcctgcctcatccattcatcttaaaaccacgatggatggagttaggggaggacacgcagggttcagagaactcggtgctgcttctgccctctggggttgccaccttctgctacccagtgtagttctctgaggaagcttggatttcgagggctgctgttgtttgttgcagtggaatttcccgctcctgatgcaagcatggaagctgggcccagccttggcaactggaaacgtggttgtgatgaaggtagctgagcagacacccctcaccgccctctatgtggccaacctgatcaaggaggtgcgtggcttatcctggtcttaacctctaaatgcccttgttgaggcttgttctaaaggagttctgagaagggtctcaggggtccctaaacagggaggtgtgtttgtggagcccccatcaccatgtgaaccagagtggctccctcttagcttttttccacattggacttcactgcaagatcccctttgaagaattaaaaatattgctctaggccaggcttggtggctcacgcctgcaatcccagcactttgggtggccaaagcaggagggttgcttgagttcaggagtttgagaccagcctgagcaacatagcaagaccccatctctacaaaaaattaaaaatcagctgggtggcatgcacctgtagtcccaactacttgggaggttaaggcaggaggatcacttgagcccaggagtttgaggctgcagtgagctgtgatcacaccactgcactccagcctgggtgccagagagagactcggtctcaaaaaacaaacaaaaacccactgttgttctaagtgaatgctgtcaggggaggggcaaagacacagggaaccccagcgaacagactccttctccgtcccatttagaattcccatgtagtgccccatacaattagcttctgaccacatgtgtccttggcagactgtcccaccctctctgagaaaggatgtgtcttcccctggttgagcccttcagaataggagggtgactcccaatgtcccctggctgtttgctcacaggctggctttccccctggtgtggtcaacattgtgcctggatttggccccacggctggggccgccattgcctcccatgaggatgtggacaaagtggcattcacaggctccactgaggtaaggtgaccctggcctcaagcttgcagcctccttggcccaagctccccctgtcctcagtggacgacatgctcaaggtgagctcccgggtgtcaagcggaggccttttcctccaggacgaccctgtaggtaccaggaggggtggggcagggttgagcccttcgtggtctggttgccacactagctgcccttgggaggggccagtgtcccatgtggactaaggaggccaggcctggccagactccacatagcccagagctgaccgcttgccccaaatcaaagcatcttggccaggtcagactccttgaccaggactgccattgtggttaaaaattagccttgtgtggtggtgtgtgcgtgtggccccagctacttggaaggccgaggcaggagggttgccagagcctgagaggtcaaggctgcagtgagctgagatcacgccactgcactccagcctaggtgacagagcgagaccctgtccaaaagaaaaaaaaagtgaacgtctatttggtgaaattctctaggtctctcgtggtccagttgctcactcaagctgtgggggactctgttctgtgtctatagagtgctggactcttttctcccggcactgagagcttgttcctgtctttctgtccccacagattggccgcgtaatccaggttgctgctgggagcagcaacctcaagagagtgaccttggagctgggggggaagagccccaacatcatcatgtcagatgccgatagtgagtttccagctggagaaggcctggccttgaaggtagccctggccacctgtgttgtggctccagccgatcctgtcgcccccccagtgcccaatggcgttggttgctgtccctcgggcctcaggataagacgccagcgcagggcctgcatggcctggccttggcctgtccccagcctctccctggctgctctctgcatcatcaggctaggccacgcccctgctatctgactcatccacttgccgccatcacgccctttgtcctggttggcagtgggctccgagagcacccctcatctccctgtatctgtctctggcacccagcaggcatcaacccttacagtggtgggaacaggctccattgggcaggcggccaccagggccagggtcctcctcctcactgtcacctttctgtctcctgcccacttcccgcagtggattgggccgtggaacaggcccacttcgccctgttcttcaaccagggccagtgctgctgtgccggctcccggaccttcgtgcaggaggacatctatgatgagtttgtggagcggagcgttgcccgggccaagtctcgggtggtcgggaacccctttgatagcaagaccgagcaggggccgcaggtgagccaggcagtgccgcagggtctgggtgtctagagccagcatgagaagcagagagggcatcgggctcagatcagttgggactgggttcaggtctcagctctaccacacagcagctgtgtgcctttgggaagctatgttccctccctcagccttcatttccccatcccgagccgtgccctgcctcattcacagggtggctgtgatgtagaaattaatcctgggaagcactttgtaaattgcatatatgtaacaaataccaggagtgtctgcaaaagggagtgtgtgtttccaagaccttggtcatcagtagaagtgtatccaccagaagatacacagctctgtgaaccttcgtgtctgagagccatggtatggctagtatagggactttatttcacttcatgttttgagctgtttgattttatttatttatttatttacctatttatattttagagacaaggtctctctttgttgcccaggctggagtgtagtggtgcaatcatacctcacctcagccttgaattcctgggctcaaggagtcctcctgctttggcctctcaaagtgctgggattacagacatgaaccaccacacctggcctggattttacttttgagcagttgtaggtttatagaaaaatagagctgaacgtacagagggtgcccatatattccttcgcacctccctgttccaccagtttcccctttattcacatcctgcatgagtgtggttcatctgttagtattgatgagccaatactggtaccttattattcacttaggtctgtagtgtatattcgggtttttttttttaatttttattttttttggagacagagttttgttctgtcacccaggctgcagtgcagtggcacgatctcgactcatgcctcccgggttcaagcaattcttgtgcctcagcctcctgagtagctgggactacaggtgcgcaccaccacgcctggctaattttttgtgttttagtagagacagggtttcactctgttgcccaggctggtctcgaactcctgagctcgggcaatctgctgtcaggcacccagcctcggggtcattttttgtgttgtacttactatgggcctagacaaatgtatcataatgtgtatgataccatcattctagtatcatataaatatatttgtgccctgaaacccccgtcctccacctattcttccctcttttcctcccctgagccctggcaggcaaccactgatttttttttttttttttttttttgagacagagtctcgctccgtcaccaggctggagtgcagtggcgtgatctcggctcactgcaacctgtacctcctgggttcaagtgattctcctgccccagcctcctgagtagctgggacttacaggtgcatgccaccatgcccagctaatttttgtatttttagtagagacagggtttcaccacgttggccaggatggtctcgatctcctgacctcgtgatccacccacctcagccttccaaagtgctgggattacaggcgtgagccattgtgcctggccgatctttttattgtctctatagttttgccttttccagattgtcttatacgaatcatacagtaggtagccttctcagactggcttctttcttttagcagtttgcatttctgattcctcagtggggagccacagccatgtctgaggatggactggccttgccatgggacagggttatgtgcccaacatccccctctttgattttttttagagacagggtcttgttctgttgcccaggctggaatgcagtggtgtgatcatggctcactgcaggcttaacctcctggcctcaagtgatcctcctgcttcagcctcccaagtaggtgggactacaggcacacgtcaccacacctggctaatattcatattttttatagagatgaggtcttgctatgttacccaggctggtcttgaattgctgggctcaagcaatcctcccacctcagcctcccaaagtcctgggattgcaggtgtgagccactgtgcctggcctccaacatctctatctttaatagctttattgagatataattcacgtagcataaaatgcaccattttagtgtacgattcagtgatttttagtatattcacaactttgtgcaaccatcaccactaattctataatattgtcattgcctcccctaaatatcctgtacccattagcagtcactccccattcctccccctaccaggcccaggcaaccaccaatctatgttctgcctatagatttatctattttggacattttatgcaaatggaatcctacatggttctttgtgtctggcttcttccaagtagccatgttttaaaggttcatccatgttgtaataagaatgtatcagaacataaaaggccaagtaatattccattgtgtgaatagaccacattttgatttttctattaatctgttgacagacttgattgtttccaccttttggttactgtgaatagtgcagctaggggcactaacatttctttctttcttttgagaccgtctcgctctgtcacccaggctggagtgcagtggcatcatctcagctcactgcaacctccacctcctaggttcaaacaattctcctgtctcagcctcctgagtaggtgggactacaagtgcacgccaccacgccctgctaatttttgtatttttagtagagacagggtttcaccaagatggtcaggctggtcttgaactcctgacctcaggtgatccacctgcctcagcctcccaaagtgctgagattacaggtgtgagccaccgcacctgtcctaacatttcttttcttttttttttttttgagacagagtcttgctctgtctccaggctggagtacagtggcacgatctcggctcactgcaacctccgtctcccaggtttgaatgattctcctgcctcagtctcccgagtagctgagattacaggcgcccaccaccatgcccagctaattttttgtatctttagtagagacagggtttcaccatgttggccaggctggtcttgaactcctgaccttgtgatccgcccacctcagcttcccaaagtgctgagattacaggcttgagccactgcacccgtcctaacatttctttttgtctcatttctctttgtggctaattattaagataatataaacttgcattaataaatttaatgagaaagtgtttaggctatgtgtggcagctcacatctgtaaccccaacactttgggaggctgaggcaggagaatctcttgagcccaggatttcgagatcagcctgggcactacagcaagacctcatctctactaaaaaaaaaaaaatgcaaatcatgaccagcctggccaacacggtgaaacctcatctctactaaaaatacaaaaactatttgggcgtggtggtgggcgcctataatcccagctactcgggaggctgaggcaggagaatcacttgaacccgggaggcgcaggttgtggtgagccaaaatcgtgccaccgcactccagcctgggtgacagagtgagactccacctcaaaaaataaataattttttttttaaaaaaaagcaaaaaaaaattagccagatgtagtgatgcgtgcctatactctcagctacttgggaggctgaggtgggagcccaggaggtcaaggctgcagtgagcagtgatcacaccactgcactgctgcctgagtggcagagtgaggccctgactctttttaaaaaaaggtatttaatgtaaaaaataagactttgttgcatttcttttattctccatcggtaaccactcatgcacacacagttatgctgttgtatgtttattttttaaaaaataggctgggtgtggtggctaacccctgtagtcctaacacttgggagggaggccaaggtgagtcaattacttgagcccaggagttagatactagcctgggcaacatagcaaaaccccatccctactaaaaatataaaaattacccaggtgtggtggcacacacctgtggtccagctactcgggagactgagatgagaagatacctgagctcagggagattgaagttgcagtgagccgtgattgtgccactgctcttcagactgggcaatagagtgagaccctgtcgcccttctcccctaccctataaaggagtatatagtgcatattgttctacaagctttacttctttttttttttttttttgagacgaagtctctgttgccagagctggagtgcaatagcgcgatcttggcttactgcaatctccacctccctggttcaagcgattctcctgcctcagcatgtgccaccatgcccagctaatttttgtatttttagtagagacggggtttcactatgttggccaggctagtcttgaactcctgacctcatgatctgcctgcctcgtcctcccaaagtgccgagattacaggcgtgagccactgcccctggcccaagctttccttctttttacagagtatcttgggccatctttctgtgtcagttagttcacagatctattagtgatgacaatatactggatgcaccgtaataattttaaccaacccctctactgatttatacttagaattgtttccatcttttgcctttacaaaatgctcccccagcctgggctacaaggcaaaaccctgtctctactaaaaatacaaaaattagcccagcgtaggggtgcatgcctatagtcccagctactcgggaggctgaggtgggaggatcatttgagcatgagaggcagaggttacagtgagtggagatcgcaccactgcactccagcctgggtgacagagtgagaccccatctcaaaaacaaaaatacaaaaaaaaaaaaatactccctagtgaatatccttgttcatttctctttgtgcatatgtagaataaattcctagaagttaaatagctgggccaaaggatctgagtatataatttttgagcaatattaataaaccacttgctctaaaggctgtaccagtctgtcatccttctaacagtatatgtaacggtctcttgctatcagtgtattttcttcctaaactttttggtaatcttatagttgaaaagtaaagattgatttgatgtccttttctccggtaggctgaggaagttgggccttttttgtgttttctgctattggccctgtgtgtttcctcttctgatcttgctttcttatgaccttggtccatttcccagttgtcttgttgcctgcataattctaagcctgaagcctaggagaggtctgaatccgatgtctccataactctgggttccttctcccacaggtggatgaaactcagtttaagaagatcctcggctacatcaacacggggaagcaagagggggcgaagctgctgtgtggtgggggcattgctgctgaccgtggttacttcatccagcccactgtgtttggagatgtgcaggatggcatgaccatcgccaaggaggaggtgagcacttggggccagtgctctggaaacattcttggcgggaggtgaggtaaacagttcagcctggcatcctgatgctgtcacccatctgctggcttggggccagatctcaagttatacccagaaccagtgcccataacacgctattcatagtatgtatctgatcttgtccctcctcttcagcttgtaccctctgtctgggagatcgtctgcattcctcagcatggcctgcaggccttggtgtcctggccctcagagccaggagtctaggaatgacattgtctgctccttcccatgaccttttttctttcagtcagattcttgctctgttgcccaggctggagtgcagtggcataatcatggctccttatagccttgaactcttgggctcaaatgatcctcccacctcagccttctgagtagctgggactacaggtgctcaccaccatgcctggctaattttaaaaaaattttttagtacaggctgggtgcagttgctcacgcctgtaatcccaacactttgggaggccgaagtgggtggatcacctgaggtcatgagttcgagaccagcctggccaacatggcaaaaccctgtctgtattaaaaataagaaaaaattagccctgcgtggtggcgcttgcttgaaatcccagctactctggaggctgaggcaggagaatcgcttgaacctgggaggcagaggtttcagtgagccgagatcgcgccactgcactccagcctaggcaacagagcgggactctgtctccagttttagccacgcctggctaatttttgtatttttagtaaagacagggtttcaccatgttgatcagactagtctcgaactcctgacttcgtgatctgcctgcctcggcctcccaaagtgctgggattacaggcatgagccaccacgcccggcttattttttctcttctcgttttgagatggagtctcactctgtcgccaggctggagtgcagtggtgcaatctcagctcactgcaacctctgcctcccgggttcaagcgattctcctgcctcagaccctactagtagctgggattacaggcgcacaccaccacgcccagctaatttttcttattttcagtagagatggggtttcaccatgttggccaggcttgtctccaactcctgacctcaggtgatccacctgcctcagcctcccaaaatgctgggattacaggtgtgagccatcgtgcctggccaaaaattttttttttttttttgagtaaagacagggtctctctgtgtttgccaggctggactcgaactcctagactcaagcagttctcccaccttggcctcccaaagtgctgggattacaggcatgagccacaatgcccagctgacttaaattctttgacactaaatctacgtgtcacgtgtgaataacatacctggcaggattgtttagaaatgggatactgtatgtaaagcccggggcgcacaggaggaagttggcccctgttagctccattccctctgtgttctgctgagcttgatggctgttgtcttcccctggaactgttagagcatggctgggggcttatcccccaatctggaatcatctgttctgctctgagagagctcgatggcaggtgcctccgtgttgccgaaccctcctacgctgctctctcactccagatcttcgggccagtgatgcagatcctgaagttcaagaccatagaggaggttgttgggagagccaacaattccacgtacgggctggccgcagctgtcttcacaaaggatttggacaaggccaattacctgtcccaggccctccaggcgggcactgtgtggtaagagcctcccagcagcccctcacaacccaacagagattcctcaaagccagggcctactggaatctggtggtcaccatcctggaatttggggagctgggctcagtttctcctgggtcagggtgtgatgtcgatttgagaggtcctgctacctcacctccgaaggatcaagcttctctgtggtgcaaaggccctgcacctgaacttggcaggcagcggagtggtggggctcctccccagctgcctcagggcaggagaccagagcagagggacccatgattgtgacactgatcctaaaagcttagcctctgcttcacacttagcccccactaggatggctatatttttattatttatttatttttagttttattttttcagacagaaaaaaatattctacccaggctgaagtgctgtggggtgcgattatagctcactgcagccttgaactcctgggctcaagcaatcctcccacctctgcctcctgagtagctgggaccacaggtgtgtaccaccacacctggacaattaaaaaacatttttattttttgtagagatgagatctcgccatgttgcccaggctgggctatatgtatatatattttaaagtattggtaaggatgtggagaaatcggaaccctcctatgttgctgatgggaatggaaaatggcacactcattgtggaaaataatttgggagctcctcaaaaagttaaacatgaagcccccatatgacccagcaattccactcctaggtatttatccaagagaaagaaaaacgtgctcccacataaaaacgtgtatatgaatcttcacagcagcattatttgtaacagccaaaaggtgaacacaacccaaatgtccgtctgtagatgaatggatacagaatgtgatctgtccatgcaatgaaatgtggctcagccacagaaaggaatgaagtagctgtatgagtctgttctcacactgctggtaaagacattgcagagaccgggtaatttataaaggaaagaggtttaatggactcacacagttccacgtggctggggaggcctcacaatcatggtgaaaggtgaaaagcatgtctcacgtggtggcagacaagagaagagaacttgtgcagggaaactcccctttataaaaccatcagatcttgtgagacttactcactgtcacaagaatagcatgggaaagacctggccccatgattcaattacctcccacaacacgtgggaattgtgggagctacaattcaagatgagatttgggtggggacaaagccaagccatatcagtagccatgcatgcaatagcatggattaatcttgaacataacattgagtgaaagaacccagactgtctgggtgcggtggctcatgcctgtaatcccagcactttgggaagccgaggtgggtaggtcacttgaggtcaagagtttgagaccagcctggccaacatggtgaaaccttatctctactaaaaacacaaaacttagctggctgtggtggcaggtgcctgtagtcccagctactcgggaggctgaggcaggagaatcgcttgaacctgggaggcggagattgcagtgagtggagatcatgccactgcgctccagcctgagcgatagagtgagactccaaaaaaaaaaaaaaagaacccaggcacaaaaggccacatgctgtgtgattccatttacagtattataaatatctagaataggcgaatccatagagatagaaagtatgttagtggttgccaggggctgggggagggaggaatggagagtgcctgcctcctgggcacagggcttctttcagtgtgatagaaatgttctgcaattagacagtggtgatggtcacacaacactgtgaatatgctgtcaaccagtgattgtacactttaaaatggtgaattttaggctgggtgcagtggctcacccctgtaatcccagcactttgggaggccaaggtagacggatcacgagatcaggagatggagaccatcttggccaatgtggtgaaaccccgtctctactaaaaatacaaaaattaggcctgggcctggtggctcacacctgtaaggccgtggtggttcacacctgtaatcccagcactttgggagtccgaagtaggtggaacatgatgtcaggagttcaagaccagcctgaccaacatggtgaaaccctgtttctactaaaaatacacaaattagacgggtgtggtggcatgcacctgtaatcccagctacttgggaggatgaggcaggagaatcgcttgaacccgggaggcagaggttacagtgagttgagatcgtgccattgcactccagcctgggtgacagagcaagactctgtctcaaaaaaaaaaaaaaaaaaaattagccgggcgcagtggtgggcacctgtaatcccagctactcaggaggctgaggcaggagaatcacttgaactttagaggcagaagttgcagtgagccgagatcgcaccactgcactccagcttggcaacagagtgagactctgtctcaaaaaaagaaaagaaaaagggcagggcgctgtggttcacacctgtaatcccagcactttgggaggccaaggcgggcggatcacgaggtcagaagatcaagaccatcctggctaacacagtgaaaccccgtttctactaaaaatacaaaaatttagccgggtgtggtggcgggcacctgtagtcccagctactcgggaggctgaggcaggagaatggcgtgaacctgggaggcggagcttgcggtgagccgagatcgcaccactgcactccagccagggcgacggagcgagactctgtctcaaaaaaaaaaaaaaaaagaaaattaaaaataggccaagcgtggtggctcacacctgtaatcccagcattttgggaggccaaggcaggcatatcacgaagtcaagagtttgagaccagcctgaccaacatggtgaaaccctgtctctactaaaaatagaaaaattagctgggcatggtagcatgcacctgtaatcccagctactcgggaggctggagattcgcttgaacctgggaggcggaggttgcagtaagctgagatctcaccactgcactccagcctgggcaacagagtgaaactccatctcaaaaaataatctcaaaaaataataataataaataaaaataaataaataaatggtaaatttcaaattcaaataaaatttaataatttttttaaattgcaaaaaaaaaaaatgaaagaaaagaaaagaaagccatccaggtgcagtggctcataccagtaatcccagtgctttgggagcctgaggcaggagaattacttgaggccaggagttcgagaccagcctgggcaacatagtgagaccccatctctacaaaaaataaaagataaaaaaattagccaggcatagtggcacatacttgttatcttaactacttgggaggctgaggcaggaggatcactgaagaccaggagttggagaccagcctgggtaacataatcagaccctgtctcttaaaaaaaaatttattgccaggcgtggttgcacgtgctggtagtccagctactcaggaagctgaggcaggagaatctcttgaaccccagatgtggaggttgcaacgagccaagatcatgccatggcaactccagcctgggcaacagagaaagattctatctcaaaaaaaaaaatttttttttaagttaaaaataaaataaagactttggggcaatacagggggtcctgggagtgtaacccataacccccaagagtgatttctgcaatctcgtttcaaattacagggtcaactgctatgatgtgtttggagcccagtcaccctttggtggctacaagatgtcggggagtggccgggagttgggcgagtacgggctgcaggcatacactgaagtgaaaactgtgagtgtgggacctgctgggggctcagggcctgttggggcttgagggtctgctggtggctcggagcctgctgggggattggggtctgttgggggctcggggcctgccagaggttcaggacctgccggggactcagggcctgctggaagttcaggacctgctggggatcagggcctgccagggatttagggtctgctgggcgggccaccttttggcctctccctcatgcttgaggccatcagtgtttcctactaatttcccattttaagcctgagaagtgacaagagagggtaaagacccagcctctgctctgtcccatgagaaatactgagggacgtgcccccatcaggcctatgcggtcatttgctgggcttcgttatacgccaaggcctgtaggcctgagaagagggagagacttcagggggcggagcggagaggaaaagcttctagtaagaatcttttcagattttcaccaggcgcggtggcttttcaccgggcacggtggctcacacctgtaatcccagcactttgggaggccaaggtgggtggatcacgaatgaggtcaggagtttgagaccagcctgaccaacatggtgaaaccttgtctctactaaaatacaaaaattagccaggtgtggtggcgtgcgcctgtaatcccagctactcaggaggctgaggcaggagaatcgcttgaacacgggaggcggaggttgcagtgagtcgagattgtgccattgcactccagcctgggcaacagagcgagactccgtctcaaaaaaaaaaaaaaaagaaaagaaaaaagaattagctattaggttggaatggagcaattcccacagtaataaaaatatttaaaaataaataatacaaacataagctattaggcatgagatatcaaggcccataaccatatgcatctcctttgatttgcaacttcaatgactggaatatagcctgaaggacccatcagaaatacaaagaaagcgttccttccataaatattcatcactgctttatctctaagaggggaaaatcagatgtaaacttaatgcccaataaattatggaacaccccaatcaaggagtaacaggtatctgttacaaatgtttttgtagaatatttgatatgaaaaatgcttagcctttaaagtaaaagcagtatacaaactaatatatcatcaatataagcccaatttttggaatttatgtacatagatagatactcagatacatttacttataaatataaaaaaagaaaggaaaaactggagcgtggtgttgcatgcctgtagtcccagctactcgggaggccaaggtgggaggatcgcttgagccacaagtttgaagctagcctggaaaatgggttgagcaggcctttccaggattggaatcaccaggctggagtgtactggtgccatcacagctcactgcagcctccacctcctgggctgaagtgatcctcgcatctcagtctcccgagtagctgggactacaggtgcacatcaccattcctgactaatttttgtatttcttgtagagatggggtctcactatgttacccaggctggtctcaatctcctgggctcaagtgattctcctgccttggtcccaaagtgctgggattataggcatgagctaccacacccagcctggctctcagttttgtaagtcgaaaaacttggacaggccaaattgaagagtcatgttcgccaatttcataagcgattaatttggcaatgtagcaagataccatcttattaaaaacaaaatggccgggcgcggtggctcacgcgtataatcccagcacttctggaggctgaggtgggtggatcacaaggtcaagagatcgagaccatcctggccaagatagtgaaaccctgtctctactaaaaatacaaaaattagctgggcgtggcggcacatgcctgtagtcccagctacttgggaggctgaggcaggagaattgcttgaacccgggaggtggaggttgcagtgagccaagattgcaccactgcactccagcctggcgacagagtgagactcaaaaaaaaaaaaaacaggccgggcgcagtggctcacacctgtaatcctagcacttttggaggttgaggtgggcagaccacgaggtcaggagatcgagaccatcctggctaacatggtgaaacctcgtctctactaaaaatacaaaaacaaaattagctaggtgtggtggcaggtgcctgtagtcccagctactcaggaggctgaggcggaagaatggcgtgaacccagtgggtggagcttgcagtgagccaagatcgcaccactgcactccagcctgggcgacagagcgagactccgtctcaggaaaaaaaaaaaaagaaaaaacaaacaaacagggaaatatacactgaagtgaaaatgatttactgtgaatactaattatagtttaaccagaaaacataaacacaagtgatgtttaaggaagaggcaaatgggttgagctagcctttccaggattggaaaagaggaggctcagggcaagcctgccagctgtggagcaggtgagaaaaggcaaacgggactcattcagggccacagtgccaagcctgagactggagaggccgaggacacaacctgtgttcctgaatagctcactggaatcaactaaacgtgtttacttgtttagtgtggaaactttccaatctatgcaaagaataggtataatggtagaatgaggccaggagtggtggctcatgcctgtaatcccagcattttgggaggccgagatgggcagatcacttgaggtcaggagttcgagaccagcctggtcaacatggtgaaaccccatctctactaaaaatgcaaaaattggccaggctggtggcatgtgtctgtggtcccagctgcttgggaggctgagacaagagttgcctgaacccgggaggtggaggttgcagtgagctgagatcgcgccactgtactccagcctgggcaacagagcaagactctgtctcaaaaaacaaacaaacagaccgggcatggtggctcacgcctgtaatcccagcactttgggaggccgaggtgggcgaatcacaaggtcagaagatccagaccatcctggctacggtgaaaccccatctctactaaaaatacaaaaaattagccaggcgtggtggcgagtgcctgtaatcccagctacttgggaggctgaggcaggagaatggtgtgaactcgggaggcggagcttgcagtgagccgagatggtgccactgcactccagcgtgggagacagagcgagactctgtctcaaaaacaaaacaaaacaaaacggaaaaaaaaaaacagtagaatgagcctctgtatccccaccataaagctatgacaaagatcagctcacagccagtcttgtttactgtataccccacccacttcccagtgggtacacttcatccactgcccgagcagagtccacaacagcaggaggtggccatgtgggtggacagcctgtgctgggctttgagttatgacatcggataaaaggtccaacttcagttggtgagtcttaaatcttggcacatgactagtgttaaggaggcgatgtccaggatggccacgtgacagggtggtatctaagctgatatacctgaaggatgagtggaagtagagatggtgaggggaggaagagaagaacgtactaaacaaagagcatagcttctggaaaagctgtgatggcgagaaatatggctcttccaggaactgcaggaaggttgctggtggtggaagatgtagtggttagtggggagagagcaaggccagaatgcacaggcccttgttggccatgatgtggggtttgatgtctttgataatggagtttgatctcagctatgggagcattttaagtagaagaattaggtggctcaatttttttttttttttttctgagccagagtcttgctctgttgctcaggctggagtgcagtgctgtgatcttggctcactgcaacctccgcctcccgggctcaagcgattctcatgcctcagccacttgactagctgggattacaggcgcctgccaccacacctggctaattttttgtatttgtagagatgaggtttcaccctgttggccaggctgatctcgaactcctggcctcaagtaatctgcctgcctcggcctcccaaagttctgggattacaggtgtgaaccactgtgcctggcccactcaatttgtatttttaaaagattgctctgcttaatctatagagacagaaacttattactggtcatctagggcatggggaatgggtagtggctgctcatgggtgcaagattgcttttggagatgatgcagatgttctaaaactggagtatggtgatgattgcacaacttaaaatattctaaaagcaattacacttgattgtgcataaatcatatctcaagaaagttgtttaaaaatttaagaaagcggccaggcgcggtggctcacgcctgtaatcccagcactttgggacactgaggcaggtgaatcacctgaggtcaggagttcgagaccagcctgaccaacaaggtgaaatcccttctctactaaaaacacaaaaattagcaaggcttggttgcaggtgcctgtagtcccacctactcgggaggctgagacaggagaattgcttgaacctgggaggcagaggttgcagtgagccgagattgcgccactgcactccagcctgggcaacagagtaagactccgtctcaaaaaaaaaaatttaagaaacctcactctgcttgccctagggagaatggaccatccagtatgaggagggatgagggagctgtcaggagactgctccaaggagaaagatggtggtttggattggagtggtgcagtgcaggtggagaaaagagggtatatgtgacaggaagccaggagtaggattggcgactctggatatagagaggaaaagcaaaactaggaatcaaagatggcacccaggtttccaaggaggggttgagtggtgacgccagtcctgtgatagggaacactgaatgaagtactgtggttctctttagggttgtgtttggggtacctgtccaaacccaagaggtgatgtggagaacacatctagggagatgggcttggagctccaggggcaagacccagatttgaaatagaaattctgacatcattggcctataactcttcatcaaaatcatagttacaggccacgtgccatggctcacgcctgtaatcttagcactttgggaggcccagacaggcggaacgcttgagcccaggagttcaagacaagcctgggcaacatagtgacaccccatctctaataaaaatacaaaaagttagctgggtgttatggtgcatgcctgtagtcccagctacttgggaggctgaggtgggaggatcgcttgagccaggaggtcaaggcagtagtgagctgtaattgcacccctgtactccagtctggggagaaaaaaagaaaagccctttctgctcacacttagtcagctcctagctgaggggacctacagatcacagggaagcaggaagatctaacggcttctctgtcccccttacaggtcacagtcaaagtgcctcagaagaactcataagaatcatgcaagcttcctccctcagccattgatggaaagttcagcaagatcagcaacaaaaccaagaaaaatgatccttgcgtgctgaatatctgaaaagagaaatttttcctacaaaatctcttgggtcaagaaagttctagaatttgaattgataaacatggtgggttggctgagggtaagagtatatgaggaaccttttaaacgacaacaatactgctagctttcaggatgatttttaaaaaatagattcaaatgtgttatcctctctctgaaacgcttcctataactcgagtttataggggaagaaaaagctattgtttacaattatatcaccattaaggcaactgctacaccctgctttgtattctgggctaagattcattaaaaactagctgctcttaacttactgggtaactctttgtccatctcaataaccaaaggaaggtgggcatggtggctcacgcctgtaatcccagcactttgggaagccgaggcgggtggatcactcgaggtcaggagtttgagaccagcctggccaacgtagtgaaaccctgtctctcactaaaaatacacaaattaggcagtcatggtggctggcacctgtaatcccagctacttgggaggctgaggcaggaaaattggttgaacctgggaggtggaggttgcagtgagtggagatcatgccactgcactccagcctgggagtcagagcgagactccatctcaaaaaaagtaaataaatgaaatagcctaaggaaatgctggcaggcagtaatgatatggcacactggatatgatttctgcccctcctctgctgtgggtaaacagcttctgtttcatgcatttacttttttattttaattacaccaataagaatgtgcttgaatgtttcatgcatttaatttgtttcatgcatttaacttctggcctgtttacctgtagcaggctctgagatgtgctctagagacagaacctaaacatgatgcccaagagaggggagagatactgaatgtccaatgttctcaaattttttttttttttttttttgagacagggtcttgctctgccatccaggctggagtgcagtggcacgatcatagctcactgctgcctcgacctcctgggctcaaatgatcctcctgcttcagcttcctgggctaatgtttgtattttttgtggagatgggactttgttatgttgcccaggctgttttcaaactcctggactcaagtgatcctcccgccttagcctcctaaggtgctgggattacaggtgtgagccactgtgcccaattcagttctcagtaaaaacttgatcaggccaaatgaaagtgacatgggccaatttcataatagattgatttggaaaccagatgtcaatttacttactttaagtgagatctgtatcttcagtaaccagacctcttgagtctcccacccagaacactatcttcctctagtcaagatacctggcaaaggccgggcacagtggctcacgcctataattccagcactttgggaggccaaggtgggtgggtcacctgaggttgggagttcgagaccagcctgaccaacagggagaaaccccatctctactgaaaatacaaaaaaaaaaaaaaaaactagccgggcatggtggctcatgcctgtaatcccagctactcaggaggctgaggcaggagaattgcttgaacctgggaggcagaggttgcagtgagccaagattgctccattgtactccagcctgggcaacaagagagaaactccgtctcaaaatataaataaataagaaaaagaagaaatggaagctgggttcaagagggcaatcagcagtctctaccatcatgtgaaacaccactctgtgatttgagtcttgacaatgtattttctttttttttttcttcttttttttttgagactgagtctcggtctgtcgcccaggctggagtgcagtgacgtgatcttggctcactgcaacctctgcctcctgggttggagcaattctcctgcctcagcctcctgagtagctgggattacaggtgtgcgccaccatgcctggctaatttttgtatttttagtagagacggggttttgccatgttggccaggctggtgttgaaggcctgacctcaggtaatccacccacctctgcctcccagagtactgggattacaagtgtgagccaccgtgcccggccaactgtagggaccagccccacagggtcggtgggtttttctccccatgtgcggagacgagagattgtagaaataaagacacaagacaaagaggtaaaagaaaagacagctgggcttgggggaccactaccaccaagaggcggagaccggtagaggccccgaatgtctggctgcactgttatttattggatacaaagcaaaaggggcagggtaaagagtgtgagtcatctccaatgacaggtaaggtcacgtgggtcacgtgtccactggacagggggcccttccctgcctggcagccaaggcagagatagacagggagagagagagacagcttacgccattatttctgcgtatcagagacttttagtactttcactaattttgctactgttatctaaaaggcagagccaggtgtacaggatggaacatgaaggcagactaggagcgtgaccactgaagcacagcaccacagggagacggttaggcctccggataactaatgattaatgatattcatatataatcatgtctgtgatctagatctagtataactcttgttgttttatatattttattatactggaacagctcgtgccctcggtctcttgcctcagcacctggatggcttgccgcccacagccaacaatgtgttttcaatatgctccccaaactacagcaaactcctcttaactcgggatttagggtgatgccctacttatgcctaactttatcaccagcttaaccctcatctcattatataggatgatattacttctaggaagattttctatgtatggagggtgcatcatttaagagtattttaggccaggcactgtggctcatgcctgtaatcccagcattttgggaagctgaggtgggtgatttgcttcagcccacgagttcaagatcagcctggccaatatggtgaaaccccatctctacaaaaaaatacaaaaattagctgagcgtggtgatgtgtgcctgtggtcccagttactctggaggctgatgtgggaggatcacttgagcccaggaggtcaaggctgcagtgagctgtgattgcaccacttcactccagcccagagtgagaccccatctctgaaaaaaacacaaaaaacaagaaaagaatactgcaaagaaccttggtaggggtgaattggaaaaagtagagaaatgtaatatttctttcctgctgtactcactgtaactgtgagaggatcggctcttttaaccaacagataagaaaggaaatattagctatgaagaaatgtctatcaagttgattttgacaacctagacacattaatctccttgcacttttagtgacaggaacccattagaaccttaagcagctgtctgaagtaaaaacaaagctctcaggtgatgaaccacctaatctccctgggtattcggatgtgggtcagtcacaggagtattaggtgtaaagccgctgcttctgggtagagcctccacttgtggctgcacagagggcacagagagcttttccttcagcccggagaagcttcctaagtgtgggcgccaccttgtgggacatacattgaactacgacgctatttctccaagaattaacaggacagcccctcccaccggtgtccttccaacgatgttgcatacaatttggctgtacatttggcaggcagtgtaatgagggaatcaaagaccaggatcacatactggaaagaattgaaaacagagactcccaacaaaaacttgtacacggacgttcacagcagcactattcacgacagctcagagatggaatcaacccaaatatcagtcaatagatgaatggacagacaaaatgtgacatatccatgcagtggaatattatttagccataaaaaggaaggaagtgctgatgcatgttgcgatgtggatgaaccttgaaaacatgatgctgagtgaaagaagccagacacaaaaggagaaggactgtatgatttcacttataggaaatatccagaacaggcaaatctatatagagagaaggtcgattgctgggggccctgggaagggaccaagggggagtgacttctaatggtggggtgcccttttggggtgatgaaaatgttttggaaccagatacaggtggtggttgtacaacattgtgaatttactaaatgcaaccaaattgctcacttaaaaacaacaaattcaggccaggtgcagtggctcacacccgtaatcccagcactttgggaggccgaggtgggcggatcacatgaggtcaagagttcgagactagcctggccaacatggtgaaatcccatctcggccgggcgcggtggctcacgcctgtaatcccagcactttgggaggctgaggcgggtggatcacgaggtcaggagatcgagaccatcctggctaacacggtgaaaccccgtctctactaaaaatacaaaaaattagccaggcgtggtggtgggcgcctgtagtcccagctgatcgggaggctaaggcaggagaatggtgtgaacccaggaggcggagcttgcagtgagccgagatcgcgccactgcactctatcctgggtgacagagtgagactctgtctccaaaaaaaaaaaaagaaaccccatctctacccaaaatacaaaaattagctgggcatggtggctggcacctgtaatcccagctactcaggaggctgaggcaggagaattggttgaacctgggaggcagaggttgcagtgagctaagatcgcaccactgcactccagcctgggtgacagaacgagactgtctcaaaaaaaaaaaaaaaaaaaagtggccaggtggtgccatggctcatgcctgtaatctcagcattttgggatactgaggcgggtggattacctgaggccaggagttcgagatcagcctggccaacatgatgaaaacccatctctgctaaaaatacaaaaaattggctgggcttggtagcatgtgcccagctacttgggaggctgagacaggagaatcgcttgaacctgggaggcagaggttgcggttagccaagattgtgccactgcactccatgggtgacacagagagactctgtctcaaaaaaaaaaaaaaaaaagtaaatgctatgttatgtgaatttcacctcaactgaaaaaaacagggtcccagagctggtcaggggaacttggacaaaccacacaacttctgagcttccatttcctcacaatctctgcagtcacttccaactctcatttggcttattctgtgaaggataaaacagagctgacatttgttcatttgtattgattttatttacatttttcaaaaggaaatagatgcagatggtatagaaagtttcagtgaaatgtaaatctgatgcccaatcctgtggccccaagaagtattaactgtgcacccactacatgccaggaactgtacttggagccttctcaagagcttcttaacaatattttcattttttatattttttaatgacagggtctaactccgtcgtccaggctggagtgcagtggtgcgatcatagctcactgcagcctctacctcctaggctcaggtgattcttctgcctcagcctcccaaatagctggtactacaagcatgtgccaccacagtcagctaattatttttggagagtcagggtttcactatgtagctcaggctggtcttcagctcctggcttgaagtgatcctcctgccttggcacatagaaggggttacaatatacatatattagagtgagagcatagatgtgatgcctggcgatatggcttacttatgagacagcacctgacctacagccatctatgactcctactgtatcttccatgccaggagtaagggtgaggatacctggcaataataaaaataataacctgagagtctaatggcttattttttgtagagatggggtctcactgtgttgtttaggctggtcttgaacttctgggctcaagtgatcctcccacctcagcctcctgagtagctgggattataggcgtgcactaccatgcatatatatatatatttttttttttttttgagagagagagagagagatggagtcttgctatgttgctcaggctggtctcgaactcctggcctcaagtcatcctgctggcttggcctctcaagtgctaggattacaggcatgagacactgggcacagccctaatagcttatttttaaagctatatcaaaatgtcatgcacctgaacatttgaagtaacctctctgatagtacggatatttatcccctcaaaatctcatgttaaaatgtaatcttcagtgttggaggtggggcaaggtgtgaggtgttaggatcatgggggtggatccctcatgaatggcttggtgtcctcccccatggtaatgagttcactcaagagctggttgtttaaaaggtgacgtggacctaatccctgttggactgaacaaaaggggacgaacacagcaataaagataaagaccaaagagtatatttggaagaaggggtcagggggctccttgcttctagtgaaaaagggccctgagctttagtgccctttgtatttattgggtaaaggagatagggagaagggggggtggttgtcggtcagcagcttgattcacagcaggctcacaagattgcattctttgaacagtaggctctagatgtctcagtagataacctcaaagagcatggcgccagggagtgattgccctcagcgaaccttctggcggctgaagcagaagtgagtttgcccacattctgcatttatgataaacagtttgctgtttgatcatatagcctcagtggaatgctgagttggtcacaacccatgggcattcagctctctacatttccccctttctgtttatgaattaattgaaagaatgtaaggccaggctgggcagctctcattttctgattggcagtccatccaattttacagactatgaacagaagacagagacaaaacaacattattccaaggactacatataagatgttaatgtggtgctttagacaggtccaagggttgaggctctccaggccttgctggaatttggtctagtcttctaaagaaggctgaaactcttgagtttgtttatttaaatcaagaattttgttttgtaattcaccgatatcaaaggtgatgttggatgtgcaagctccctgcaaatgggctttcacaaggtcccatggatactcactttggttatattctaagttggttacacaaatatgagtgtgattaaaatgatggtgcaattgctgttgcaattgcaagctttgtacttgttctcctaactgtagagccgtggatttcaacaatgccacttcagtttgtaactcagtgttaattttattctgaagtggccatgcttggttggctatacgcatccagttttccatgtactgagttgtttgaatagaactatgcaaagctacagaggacatcacaacggaagttattaatgtgaccaaggaaacaatagcaaaaattatcatgcctaaggctctatgggcacaatgagtaagttgagttagaagatgtttcatgaagtgcaaagcaggtgtggtagcccaaggctgggacagattaacaggaatccatagcccagggatgcgacccaaaattatcaaagtagagacattatgtgtttgcaatgtgctatgattaatgcagtgacataactggcaagatttacaggtcaattggatattgtttacctggagctggtccttcttagttgccaaaaaagacataaggattaaaaagacaaaccataaattgagtggtgatattctttacaaatgtaacattaagactgtgttgcttactattgctatcactggatagtatcccgccattcataaatgggagtgctgccttccataacatctcttggattggtcctttcctccctagataatgccactgaggaagaggcgggctaaagcctgctccatgtcaagcaatctgggtggcagactgggattagatcccggtgtggtataaagaagaagcattaaaatcttgccaccaatgccagcgaagtttgtgccatgatttctgattttcatgttttccatatagttgacctttaggtccccaatccacaatgtctccagttaacatagattgttttctagccagtgggtcaagacattgggtccatgtcttggggggtagtaactatcgaagggaatccattccatatagtcagcacgattagggtgattgggccgggaatggttggttagcacacctgttacattaatagaaccaagacttaataggcacatgacttttccataatgactcaaccattcttgagcttgaattataagacagctacagttaagcgatgtctttgtagtgatacacaaggggagtccttctagtggggtggtataattaatgacattgttctgagagtctaactgttctattttaaggggagttaggggtcctggagcccatacttgctgatcacgataaatctcaggaggagtgtcactccaaagcataggttgtactactaggggattgggaacatatgcccaaaatgtttttgcctctgcacagggaaaacataccacacaggacattatggctaacatggccaagaacatggaatcagggtgttttgcctggctctgatgctccagtagtttcccagcttcctgagtggtattcttgagttgcccccaggttatgggggttgatgtcgtcatgactccggtcggccttctctccatctttgcactctggctcagctggctcatggctcataccagagggaccaggcccatagttggccaccctgggttcctctagtctcccgttccatggtcacatgcaccttgagggcacccacacggcttgtccatctcccataaaaacacaagcataccctcatccccacgtcagtaaatccaacagacctttccattgtcttttttccgggggatttcaataacactttcggataaactttcctcttttcctctaacacttgccaatgtctttctgctggagtcttaccatctgtaccaggagtcaaaaaaatttaaagaaaataaggctaagtgtagttttgtttgaggtgtaactggtctcctatccctcttttctgtttttccctttttttttttttttttttttttttttttttgagacagagtcttgctctgtcaccaggctggagtgcaatggcacgatcttggctcactgcaacctccacctcctgggttcaagtgattttcctgcctcagcctcccaagtagctgggactataggtgcgcgtcaccacgcccagctaatttttgtgtttttagtagagacggggtttcaccatgttggctagatggtctcgatctcttgacttcatgatctgcccacctcggcctcccaaaatgctgggattacaggcatgagccaccgcacctggcccctttctgttttttcaacacgtgttgtaatgtttgatgtgccaactctataattccttgtcctctaggattataataattccttttttatgggttatagctcaaagctgtaagaattttgaaaagcatgactagtataagctggtccattgtcaggttttaattgtttagttatccccatatgagcaaatgatgacaaacaatgttgccgtacatgaccagctgtctcacctgtttggcatgtagcatgcagcatatgagaataagtgtctataattagtgaacatagctaagtttactaaaggctgctacatgtgtaacatccatttgccagatttcatttggagccaaacctcatgggttacaaccttctacaggtgtggctccagggacatgctggcaagtaggacaggcttgtattatagccctagcttggctgcgagagaaatggaacatgcgagtagggcagaagtactttggtgcagaggcttgagcttgctgaaacacagaactaatcagtttatctgctctatcattacctagagatagtggtccaggaagttgtgtgtgagagcgaatatgagaaatatgaaaaggagatgaaggagagccaatagttgtttgaagtcttagaaacaaattaagcagttctgggtctagtgtatttttaattgtagcagtttctatgcaactggctacatttacaacataagttgaattacagacaatgttgataggatctgcagctgtcagctgtaaaacctgaatgactgcaattaagtctgagcgctgagctgaaaccccagaggtcattattgtttgagtatgtttaggtccataaatagctgcatgagctttagaagagccatcagtaaaataagtctggccacctgaaataggcttgtgatgagtaatcacaggaagaatgaaagaatggactttataaaactgcaaaactttgtctgagggatagtggttgtctatggcacccacaaagtctgcaaaagtgatttgccaggcagttgacatttcccaagctgtggactgttgctgagagtctaaaggaacaataattttatctggatcatatcccataggcatctttgacctatgcctgcccatagtcacaatttgtgtaattaaagaaagatagacttgcaaagttttgactgattaggtagaaagagccattctattacggttacagatttgtctaagcattggcctaaaagtcctgttggagagtgagggataggaagaacaaacaaaagcaaaggtttttgtggctgtagccatgaggcatgtcattgctgtagcatctgctctacaagttgtaactccacttctgcctctttggtcaattgctgtggggaatttaaggaagaatctccttgcagggtttgataaagatgtgtaagttgataagttgcaatacctagcattggtcacagccaatttatatctcctaataattattgaaaatcatttaaagtctgtaacctgcctttatggagaactactttctgaggccgtacactattggggaacctgccccgatattcatgtaggttcttttctatttttcctaagcattggccagcttgagaaataaagggacagagtacaaaagagagaaattttaaagctgggcatccgggggagacatcacatgtcggtaggttccgtgatgccccacaagccgcagaaaccagcaagtttttattagggagtttcaaaaggggagggagtgtgcgaataggtgtgggtgacagacatcaagtacttaacagggtaatagaatatcacaaggtgagtggaggcagggtgagatcacatgaccacaggaccaaggcgaaattaaaattgctaatgaagtttcgggcaccattgtcattgataacatcttatcaggagacagggttttgagatcaaccttctgaccaaaatttattaggcgggaatttcctcttcctaagaagcctgggagcactatgggagactggaatctatttcatctctgcagcctcaaccataagagacaggtgcacctgggggggctgtttataagcctatacctccaggtgcgtattctctttctcagggatgttccatgctgagaaaaagaattcagtgatatttctcccatttgcttttgaaagaagagaaatatggctctgttctgcccagctcaccagcggtcagagtttaagattatctctcttgttccctgaacaattgctgttatcctgttcttttttcaaggtgcccacatttcatattgctcaaacacacatgctgtacaatttgtgcagttaatgcaattatcacatggtcctgaagtgacatacatcctcctcagtggacaggattaagagattaaagtaaagacaggcataggaaagcacaaaggtattgactggggaagtgataagtgtccatgaaatctttacaacttatgtttagagattgcagtaaagacaggcataagaaattacaaaagtattaatttggggaactaataaatgtccataaaatcttcacaatccacattcttctgccatggcttcagccagtccctctgtttggggtccctgacttcctgcaacagtacactcccctccataacaatagttcctaagtattagtatggggaagttgtttgcactttctctggagcaattttgagattccatttaattaaagcctgttttgtttctctgaataactgatgtaaaatttgatctgtaggagcggccaaaagaatatcatccataaaatgaatgatatacacagtgggaaacatatttcaaggctcctttaatgctcttcccacaaaatgctgacataatgtaggactgttaagcatg

SEQ ID NO: 796 - DNA, 2975 bp, Homo sapiens
attgtggagtcctgcatggaagggatctgtaagccagaccctaggatctacaagctgtgcttggagcagctcggcctgcagccctctgagtccatctttcttgatgaccttggaacaaatctaaaagaagctgccagacttggtattcacaccattaaggttaatgacccagagactgcagtaaaggaattagaagctctcttgggttttacattgagagtaggtgttccaaacactcggcctgtgaaaaagacgatggaaattccgaaagattccttgcagaagtacctcaaagacttactgggtatccagaccacaggcccattggaactacttcagtttgatcacgggcagtcaaatccaacttactacatcaggctggctaatcgtgatctagttctgaggaagaagcccccagggacactccttccatctgcccatgccatagagagggagttcaggattatgaaagcccttgcaaatgctggagtacctgtccctaacgttcttgatctctgtgaagattcaagtgtcattggcacccccttctatgtgatggagtactgcccaggtctcatctacaaagacccttccctgccaggcttggagcccagccacagacgagccatatacactgccatgaacacagtcctgtgcaaaattcacagtgtggatctgcaggctgtgggacttgaagactatgggaagcaaggggactatattccacgccaggtacgaacctgggttaagcagtatcgagcttccgaaactagcaccatcccagccatggagaggctgatcgaatggctgcccctccatcttccccgtcagcagaggaccacagtggtgcacggggacttcaggctcgacaacctggtgtttcatccagaagagccagaggtgcttgctgtccttgactgggaactttctaccttgggcgacccccttgctgatgtggcctacagctgcctggctcattacctgccatccagttttcccgtgctgagaggtattaatgactgtgacttgacacagctgggaatccctgctgcagaggagtatttcaggatgtactgtctccaaatggggctccctcccactgagaactggaacttctatatggctttttcctttttccgtgtggctgcaatcctacagggagtctacaagcgatcactcacagggcaagcaagctccacatatgcggaacaaactggaaagctgaccgaatttgtgtctaacctggcgtgggatttcgcagtcaaagaagggttccgggttttcaaagagatgcccttcacaaatccgttaacaaggtcctaccacacgtgggccaggccccagtcccagtggtgccccacaggcagcaggagttatagctccgttccagaagcttccccagctcatacctcaaggggaggtctggttatctctccagagagcctctctccacctgtcagagagctgtatcaccggctgaagcacttcatggagcaacgtgtgtaccctgcagagccagagctgcagagtcaccaggcctcagcagccaggtggagcccctccccactgatcgaagacctcaaggagaaagccaaagctgaaggactttggaaccttttcctacccttagaggctgatcccgagaaaaaatacggagcaggactgaccaatgtggaatatgcacatctgtgtgagctcatgggcacgtccctgtatgcccccgaggtatgtaactgctctgcgcctgacacgggcaacatggagctgctggtgaggtatggcaccgaagcgcagaaggctcgctggctgattcctctgctggaggggaaagcccgctcctgttttgctatgaccgagccccaggttgcctcttcagatgccaccaacattgaggcttccatcagagaggaggacagcttctatgtcataaacggtcacaaatggtggatcacaggcatcctggatcctcgttgccaactctgtgtgtttatgggaaaaacagacccacatgcaccaagacaccggcagcagtctgtgctcttggttcccatggataccccagggataaaaatcatccggcctctgacggtgtatggactggaagatgcaccaggtggccatggtgaagtccgatttgagcacgtgcgtgtgcccaaagagaacatggtcctgggccctggccgaggctttgagatcgcccagggcagactgggccccggcaggatccatcactgcatgaggctgatcgggttctcagagagggccctggcactcatgaaggcccgcgtgaagtcccgcttggcttttgggaagcccctggtggagcagggcacagtgctggcggacatcgcgcagtcgcgcgtggagattgagcaggcacggctgctggtgctgagagctgcccacctcatggacctggcaggaaacaaggctgcagccttggatatagccatgattaaaatggtcgccccgtccatggcctcccgagtgattgatcgtgcgattcagaagacgtctctgcaagaagcctggagtctgtttcaggccaggaggaggggatttgctgagggccaagggggttctgggacagagtctggaaagctggtcttcaggctctcagtcccaggctgggcaggcacggtcacttcacttcagcctttcagtccctctctctctgcctgtgggaatctggacacattttgggaggcctcccaaggctgtgggacgtgcttgctctggcagctgcagggttcctgtctggcctccctggtgagcagaggggcggccacggcgggcggtggcctagagacccaggacctgggcgcctgggaaaatggaatgcaacccacattgtaaagccactggcatctgattatctccatttgaacacacagcacagaacaatcatttaaatgttattttggaaaggggttttggggacacagaagaataagtaaacacatctcggaggcttt

SEQ ID NO: 797 - protein, 936 aa, Homo sapiens
MEGICKPDPRIYKLCLEQLGLQPSESIFLDDLGTNLKEAARLGIHTIKVNDPETAVKELEALLGFTLRVGVPNWVKKTMEIPKDSLQKYLKDLLGIQTTGPLELLQFDHGQSNPTYYIRLANRDLVLRKKPPGTLLPSAHAIEREFRIMKANAGVPVPNVLDLCEDSSVIGTPFYVMEYCPGLIYKDPSLPGLEPSHRRAIYTAMNTVLCKIHSVDLQAVGLEDYGKQGDYIPRQVRTWVKQYRASETSTIPAMERLIEWLPLHLPRQQRTTVVHGDFRLDNLVFHPEEPEVLAVLDWELSTLGDPLADVAYSCLAHYLPSSFPVLRGINDCDLTQLGIPAAEEYFRMYCLQMGLPPTENWNFYMAFSFFRVAAILQGVYKRSLTGQASSTYAEQTGKLTEFVSNLAWDFAVKEGFRVFKEMPFTNPLTRSYHTWARPQSQWCPTGSRSYSSVPEDAHTSRGGLVISPESLSPPVRELYHRLKHFMEQRVYPAEPELQSHQASAARWSPSPLIEDLKEKAKAEGLWNLFLPLEADPEKKYGAGLTNVEYAHLCELMGTSLYAPEVCNCSAPDTGNMELLVRYGTEAQKARWLIPLLEGKARSCFAMTEPQVASSDATNIEASIREEDSFYVINGHKWWITGILDPRCQLCVFMGKTDPHAPRHRQQSVLLVPMDTPGIKIIRPLTVYGLEDAPGGHGEVRFEHVRVPKENMVLGPGRGFEIAQGRLGPGRIHHCMRLIGFSALMKARVKSRLAFGKPLVEQGTVLADIAQSRVEIEQARLLVLRAAHLMDLAGNKAAALDIAMIKMVAPSMASRVIDRAIQKTSLQEAWSLFQARRRGFAEGQGGSGTESGKLVFRLSVPGWAGTVTSLQPFSPSLSACGNLDTFWEASQGCGTCLLWQLQGSCLASLVSRGAATAGGGLETQDLGAWENGMQPTL

SEQ ID NO: 798 - DNA, 2407 bp, Homo sapiens
cagggggcagccacgggccgggggtacctagcgccacccgcttcgcttgcatcagctgcgcgccccatcccgaggaatggtagaggcagccccgcccccggcccgcccccgcctttccattggctgccgcgcggggcggggagcggggtcggctcagtggccctgagaccctagctctgctctcggtccgctcgctgtccgctagcccgctgcgatgttgcgcgctgccgcccgcttcgggccccgcctgggccgccgcctcttgtcagccgccgccacccaggccgtgcctgcccccaaccagcagcccgaggtcttctgcaaccagattttcataaacaatgaatggcacgatgccgtcagcaggaaaacattccccaccgtcaatccgtccactggagaggtcatctgtcaggtagctgaaggggacaaggaagatgtggacaaggcagtgaaggccgcccgggccgccttccagctgggctcaccttggcgccgcatggacgcatcacacaggggccggctgctgaaccgcctggccgatctgatcgagcgggaccggacctacctggcggccttggagaccctggacaatggcaagccctatgtcatctcctacctggtggatttggacatggtcctcaaatgtctccggtattatgccggctgggctgataagtaccacgggaaaaccatccccattgacggagacttcttcagctacacacgccatgaacctgtgggggtgtgcgggcagatcattccgtggaatttcccgctcctgatgcaagcatggaagctgggcccagccttggcaactggaaacgtggttgtgatgaaggtagctgagcagacacccctcaccgccctctatgtggccaacctgatcaaggaggctggctttccccctggtgtggtcaacattgtgcctggatttggccccacggctggggccgccattgcctcccatgaggatgtggacaaagtggcattcacaggctccactgagattggccgcgtaatccaggttgctgctgggagcagcaacctcaagagagtgaccttggagctgggggggaagagccccaacatcatcatgtcagatgccgatatggattgggccgtggaacaggcccacttcgccctgttcttcaaccagggccagtgctgctgtgccggctcccggaccttcgtgcaggaggacatctatgatgagtttgtggagcggagcgttgcccgggccaagtctcgggtggtcgggaacccctttgatagcaagaccgagcaggggccgcaggtggatgaaactcagtttaagaagatcctcggctacatcaacacggggaagcaagagggggcgaagctgctgtgtggtgggggcattgctgctgaccgtggttacttcatccagcccactgtgtttggagatgtgcaggatggcatgaccatcgccaaggaggagatcttcgggccagtgatgcagatcctgaagttcaagaccatagaggaggttgttgggagagccaacaattccacgtacgggctggccgcagctgtcttcacaaaggatttggacaaggccaattacctgtcccaggccctccaggcgggcactgtgtgggtcaactgctatgatgtgtttggagcccagtcaccctttggtggctacaagatgtcggggagtggccgggagttgggcgagtacgggctgcaggcatacactgaagtgaaaactgtcacagtcaaagtgcctcagaagaactcataagaatcatgcaagcttcctccctcagccattgatggaaagttcagcaagatcagcaacaaaaccaagaaaaatgatccttgcgtgctgaatatctgaaaagagaaatttttcctacaaagctgagggtaagagtatatgaggaaccttttaaacgacaacaatactgctagctttcaggatgatttttaaaaaatagattcaaatgtgttatcctctctctgaaacgcttcctataactcgagtttataggggaagaaaaagctattgtttacaattatatcaccattaaggcaactgctacaccctgctttgtattctgggctaagattcattaaaaactagctgctcttaatgtagggaccagccccacagggtcggtgggtttttctccccatgtgcggagacgagagattgtagaaataaagacacaagacaaagaggtaaaagaaaagacagctgggcttgggggaccactaccaccaagaggcggagaccggtagaggccccgaatgtctggctgcactgttatttattggatacaaagcaaaaggggcagggtaaagagtgtgagtcatctccaatgacaggtaaggtcacgtgggtcacgtgtccactggacagggggcccttccctgcctg

SEQ ID NO: 799 - protein, 515 aa, Homo sapiens
MLRAAARFGPRLGRRLLSAAATQAVPAPNQQPEVFCNQIFINNEWHDAVSRKTFPTVNPSTGEVICQVAEGDKEDVDKAVKAARAAFQLGSPWRRMDASHRGRLLNRLADLIERDRTYLAALETLDNGKPYVISYLVDLDMVLKCLRYYAGWADKYHGKTIPIDGDFFSYTRHEPVGVCGQIIPWNFPLLMQAWKLGPATGNVVVMKVAEQTPLTALYVANLIKEAGFPPGVVNIVPGFGPTAGAAIASHEDVDKVAFTGSTEIGRVIQVAAGSSNLKRVTLELGGKSPNIIMSDADMDWAVEQAHFALFFNQGQCCCAGSRTFVQEDIYDEFVERSVARAKSRVVGNPFDSKTEQGPQVDETQFKKILGYINTGKQEGAKLLCGGGIAADRGYFIQPTVFGDVQDGMTIAKEEIFGPVMQILKFKTIEEVVGRANNSTYGLAAAVFTKDLDKANYLSQALQAGTVWVNCYDVFGAQSPFGGYKMSGSGRELGEYGLQAYTEVKTVTVKVPQKNS

SEQ ID NO: 800 - DNA, 2164 bp, Homo sapiens
cagggggcagccacgggccgggggtacctagcgccacccgcttcgcttgcatcagctgcgcgccccatcccgaggaatggtagaggcagccccgcccccggcccgcccccgcctttccattggctgccgcgcggggcggggagcggggtcggctcagtggccctgagaccctagctctgctctcggtccgctcgctgtccgctagcccgctgcgatgttgcgcgctgccgcccgcttcgggccccgcctgggccgccgcctcttgtcagccgccgccacccaggccgtgcctgcccccaaccagcagcccgaggtcttctgcaaccagattttcataaacaatgaatggcacgatgccgtcagcaggaaaacattccccaccgtcaatccgtccactggagaggtcatctgtcaggtagctgaaggggacaaggaagatgtggacaaggcagtgaaggccgcccgggccgccttccagctgggctcaccttggcgccgcatggacgcatcacacaggggccggctgctgaaccgcctggccgatctgatcgagcgggaccggacctacctggcggccttggagaccctggacaatggcaagccctatgtcatctcctacctggtggatttggacatggtcctcaaatgtctccggtattatgccggctgggctgataagtaccacgggaaaaccatccccattgacggagacttcttcagctacacacgccatgaacctgtgggggtgtgcgggcagatcattccgtggaatttcccgctcctgatgcaagcatggaagctgggcccagccttggcaactggaaacgtggttgtgatgaaggtagctgagcagacacccctcaccgccctctatgtggccaacctgatcaaggaggctggctttccccctggtgtggtcaacattgtgcctggatttggccccacggctggggccgccattgcctcccatgaggatgtggacaaagtggcattcacaggctccactgagattggccgcgtaatccaggttgctgctgggagcagcaacctcaagagagtgaccttggagctgggggggaagagccccaacatcatcatgtcagatgccgatatggattgggccgtggaacaggcccacttcgccctgttcttcaaccagggccagtgctgctgtgccggctcccggaccttcgtgcaggaggacatctatgatgagtttgtggagcggagcgttgcccgggccaagtctcgggtggtcgggaacccctttgatagcaagaccgagcaggggccgcaggtggatgaaactcagtttaagaagatcctcggctacatcaacacggggaagcaagagggggcgaagctgctgtgtggtgggggcattgctgctgaccgtggttacttcatccagcccactgtgtttggagatgtgcaggatggcatgaccatcgccaaggaggagatcttcgggccagtgatgcagatcctgaagttcaagaccatagaggaggttgttgggagagccaacaattccacgtacgggctggccgcagctgtcttcacaaaggatttggacaaggccaattacctgtcccaggccctccaggcgggcactgtgtgggtcaactgctatgatgtgtttggagcccagtcaccctttggtggctacaagatgtcggggagtggccgggagttgggcgagtacgggctgcaggcatacactgaagtcacagtcaaagtgcctcagaagaactcataagaatcatgcaagcttcctccctcagccattgatggaaagttcagcaagatcagcaacaaaaccaagaaaaatgatccttgcgtgctgaatatctgaaaagagaaatttttcctacaaaatctcttgggtcaagaaagttctagaatttgaattgataaacatggtgggttggctgagggtaagagtatatgaggaaccttttaaacgacaacaatactgctagctttcaggatgatttttaaaaaatagattcaaatgtgttatcctctctctgaaacgcttcctataactcgagtttataggggaagaaaaagctattgtttacaattatatcaccattaaggcaactgctacaccctgctttgtattctgggctaagattcattaaaaactagctgctcttaa

SEQ ID NO: 801 - protein, 512 aa, Homo sapiens
MLRAAARFGPRLGRRLLSAAATQAVPAPNQQPEVFCNQIFINNEWHDAVSRKTFPTVNPSTGEVICQVAEGDKEDVDKAVKAARAAFQLGSPWRRMDASHRGRLLNRLADLIERDRTYLAALETLDNGKPYVISYLVDLDMVLKCLRYYAGWADKYHGKTIPIDGDFFSYTRHEPVGVCGQIIPWNFPLLMQAWKLGPATGNVVVMKVAEQTPLTALYVANLIKEAGFPPGVVNIVPGFGPTAGAAIASHEDVDKVAFTGSTEIGRVIQVAAGSSNLKRVTLELGGKSPNIIMSDADMDWAVEQAHFALFFNQGQCCCAGSRTFVQEDIYDEFVERSVARAKSRVVGNPFDSKTEQGPQVDETQFKKILGYINTGKQEGAKLLCGGGIAADRGYFIQPTVFGDVQDGMTIAKEEIFGPVMQILKFKTIEEVVGRANNSTYGLAAAVFTKDLDKANYLSQALQAGTVWVNCYDVFGAQSPFGGYKMSGSGRELGEYGLQAYTEVTVKVPQKNS

SEQ ID NO: 802 - DNA, 5142 bp, Homo sapiens
attttgaggaggtcggagcggaaggacgtcgtggagattgcttgcgctggggtgccacacttaggctgagctgcaggttttcgcacagtcgcgagttaacctctgcttgctccagaggcctcgtcctaatccacctcggctgacggcgcgggatccctggctccgcgagcctcagcctcaccatgtgtgtcaggagctgtttccagtccccccgtctccagtgggtgtggagaacagccttcctgaaacacacccagcgcaggcaccaggggtcccaccgatggacacaccttggaggcagcacctacagagcggtgattttcgacatgggcggagttctcattccttctccagggagagtcgctgcagaatgggaggtacagaatcgtatcccttctggaactatattaaaggccttgatggaaggtggtgaaaatgggccctggatgagatttatgagagcagaaataacagcagagggttttttacgagaatttgggagactttgctctgaaatgttaaagacctccgtgcctgtggactcatttttctctctgttgaccagtgagcgagtggcaaagcagttcccagtgatgactgaggccataactcaaattcgggcaaaaggtcttcagactgcagtcttgagcaataatttttatcttcccaaccagaaaagctttttgcccctggaccggaaacagtttgatgtgattgtggagtcctgcatggaagggatctgtaagccagaccctaggatctacaagctgtgcttggagcagctcggcctgcagccctctgagtccatctttcttgatgaccttggaacaaatctaaaagaagctgccagacttggtattcacaccattaaggttaatgacccagagactgcagtaaaggaattagaagctctcttgggttttacattgagagtaggtgttccaaacactcggcctgtgaaaaagacgatggaaattccgaaagattccttgcagaagtacctcaaagacttactgggtatccagaccacaggcccattggaactacttcagtttgatcacgggcagtcaaatccaacttactacatcaggctggctaatcgtgatctagttctgaggaagaagcccccagggacactccttccatctgcccatgccatagagagggagttcaggattatgaaagcccttgcaaatgctggagtacctgtccctaacgttcttgatctctgtgaagattcaagtgtcattggcacccccttctatgtgatggagtactgcccaggtctcatctacaaagacccttccctgccaggcttggagcccagccacagacgagccatatacactgccatgaacacagtcctgtgcaaaattcacagtgtggatctgcaggctgtgggacttgaagactatgggaagcaaggggactatattccacgccaggtacgaacctgggttaagcagtatcgagcttccgaaactagcaccatcccagccatggagaggctgatcgaatggctgcccctccatcttccccgtcagcagaggaccacagtggtgcacggggacttcaggctcgacaacctggtgtttcatccagaagagccagaggtgcttgctgtccttgactgggaactttctaccttgggcgacccccttgctgatgtggcctacagctgcctggctcattacctgccatccagttttcccgtgctgagaggtattaatgactgtgacttgacacagctgggaatccctgctgcagaggagtatttcaggatgtactgtctccaaatggggctccctcccactgagaactggaacttctatatggctttttcctttttccgtgtggctgcaatcctacagggagtctacaagcgatcactcacagggcaagcaagctccacatatgcggaacaaactggaaagctgaccgaatttgtgtctaacctggcgtgggatttcgcagtcaaagaagggttccgggttttcaaagagatgcccttcacaaatccgttaacaaggtcctaccacacgtgggccaggccccagtcccagtggtgccccacaggcagcaggagttatagctccgttccagaagcttccccagctcatacctcaaggggaggtctggttatctctccagagagcctctctccacctgtcagagagctgtatcaccggctgaagcacttcatggagcaacgtgtgtaccctgcagagccagagctgcagagtcaccaggcctcagcagccaggtggagcccctccccactgatcgaagacctcaaggagaaagccaaagctgaaggactttggaaccttttcctacccttagaggctgatcccgagaaaaaatacggagcaggactgaccaatgtggaatatgcacatctgtgtgagctcatgggcacgtccctgtatgcccccgaggtatgtaactgctctgcgcctgacacgggcaacatggagctgctggtgaggtatggcaccgaagcgcagaaggctcgctggctgattcctctgctggaggggaaagcccgctcctgttttgctatgaccgagccccaggttgcctcttcagatgccaccaacattgaggcttccatcagagaggaggacagcttctatgtcataaacggtcacaaatggtggatcacaggcatcctggatcctcgttgccaactctgtgtgtttatgggaaaaacagacccacatgcaccaagacaccggcagcagtctgtgctcttggttcccatggataccccagggataaaaatcatccggcctctgacggtgtatggactggaagatgcaccaggtggccatggtgaagtccgatttgagcacgtgcgtgtgcccaaagagaacatggtcctgggccctggccgaggctttgagatcgcccagggcagactgggccccggcaggatccatcactgcatgaggctgatcgggttctcagagagggccctggcactcatgaaggcccgcgtgaagtcccgcttggcttttgggaagcccctggtggagcagggcacagtgctggcggacatcgcgcagtcgcgcgtggagattgagcaggcacggctgctggtgctgagagctgcccacctcatggacctggcaggaaacaaggctgcagccttggatatagccatgattaaaatggtcgccccgtccatggcctcccgagtgattgatcgtgcgattcagattttcataaacaatgaatggcacgatgccgtcagcaggaaaacattccccaccgtcaatccgtccactggagaggtcatctgtcaggtagctgaaggggacaaggaagatgtggacaaggcagtgaaggccgcccgggccgccttccagctgggctcaccttggcgccgcatggacgcatcacacaggggccggctgctgaaccgcctggccgatctgatcgagcgggaccggacctacctggcggccttggagaccctggacaatggcaagccctatgtcatctcctacctggtggatttggacatggtcctcaaatgtctccggtattatgccggctgggctgataagtaccacgggaaaaccatccccattgacggagacttcttcagctacacacgccatgaacctgtgggggtgtgcgggcagatcattccgtggaatttcccgctcctgatgcaagcatggaagctgggcccagccttggcaactggaaacgtggttgtgatgaaggtagctgagcagacacccctcaccgccctctatgtggccaacctgatcaaggaggctggctttccccctggtgtggtcaacattgtgcctggatttggccccacggctggggccgccattgcctcccatgaggatgtggacaaagtggcattcacaggctccactgagattggccgcgtaatccaggttgctgctgggagcagcaacctcaagagagtgaccttggagctgggggggaagagccccaacatcatcatgtcagatgccgatatggattgggccgtggaacaggcccacttcgccctgttcttcaaccagggccagtgctgctgtgccggctcccggaccttcgtgcaggaggacatctatgatgagtttgtggagcggagcgttgcccgggccaagtctcgggtggtcgggaacccctttgatagcaagaccgagcaggggccgcaggtggatgaaactcagtttaagaagatcctcggctacatcaacacggggaagcaagagggggcgaagctgctgtgtggtgggggcattgctgctgaccgtggttacttcatccagcccactgtgtttggagatgtgcaggatggcatgaccatcgccaaggaggagggtcaactgctatgatgtgtttggagcccagtcaccctttggtggctacaagatgtcggggagtggccgggagttgggcgagtacgggctgcaggcatacactgaagtgaaaactgtcacagtcaaagtgcctcagaagaactcataagaatcatgcaagcttcctccctcagccattgatggaaagttcagcaagatcagcaacaaaaccaagaaaaatgatccttgcgtgctgaatatctgaaaagagaaatttttcctacaaagctgagggtaagagtatatgaggaaccttttaaacgacaacaatactgctagctttcaggatgatttttaaaaaatagattcaaatgtgttatcctctctctgaaacgcttcctataactcgagtttataggggaagaaaaagctattgtttacaattatatcaccattaaggcaactgctacaccctgctttgtattctgggctaagattcattaaaaactagctgctcttaatgtagggaccagccccacagggtcggtgggtttttctccccatgtgcggagacgagagattgtagaaataaagacacaagacaaagaggtaaaagaaaagacagctgggcttgggggaccactaccaccaagaggcggagaccggtagaggccccgaatgtctggctgcactgttatttattggatacaaagcaaaaggggcagggtaaagagtgtgagtcatctccaatgacaggtaaggtcacgtgggtcacgtgtccactggacagggggcccttccctgcctg

SEQ ID NO: 803 - protein, 1379 aa, Homo sapiens
MCVRSCFQSPRLQWVWRTAFLKHTQRRHQGSHRWTHLGGSYAVIFDMGGVLIPSPGRVAAEWEVQNRIPSGTILKALMEGGENGPWMRFMRAEITAEGFLREFGRLCSEMLKTSVPVDSFFSLLTSVAKQFPVMTEAITQIRAKGLQTAVLSNNFYLPNQKSFLPLDRKQFDVIVESCMEGICKPDPRIYKLCLEQLGLQPSESIFLDDLGTNLKEAARLGIHTIKVNDPETAVKELEALLGFTLRVGVPNWVKKTMEIPKDSLQKYLKDLLGIQTTGPLELLQFDHGQSNPTYYIRLANRDLVLRKKPPGTLLPSAHAIEREFRIMKANAGVPVPNVLDLCEDSSVIGTPFYVMEYCPGLIYKDPSLPGLEPSHRRAIYTAMNTVLCKIHSVDLQAVGLEDYGKQGDYIPRQVRTWVKQYRASETSTIPAMERLIEWLPLHLPRQQRTTVVHGDFRLDNLVFHPEEPEVLAVLDWELSTLGDPLADVAYSCLAHYLPSSFPVLRGINDCDLTQLGIPAAEEYFRMYCLQMGLPPTENWNFYMAFSFFRVAAILQGVYKRSLTGQASSTYAEQTGKLTEFVSNLAWDFAVKEGFRVFKEMPFTNPLTRSYHTWARPQSQWCPTGSRSYSSVPEDAHTSRGGLVISPESLSPPVRELYHRLKHFMEQRVYPAEPELQSHQASAARWSPSPLIEDLKEKAKAEGLWNLFLPLEADPEKKYGAGLTNVEYAHLCELMGTSLYAPEVCNCSAPDTGNMELLVRYGTEAQKARWLIPLLEGKARSCFAMTEPQVASSDATNIEASIREEDSFYVINGHKWWITGILDPRCQLCVFMGKTDPHAPRHRQQSVLLVPMDTPGIKIIRPLTVYGLEDAPGGHGEVRFEHVRVPKENMVLGPGRGFEIAQGRLGPGRIHHCMRLIGFSALMKARVKSRLAFGKPLVEQGTVLADIAQSRVEIEQARLLVLRAAHLMDLAGNKAAALDIAMIKMVAPSMASRVIDRAIQIFINNEWHDAVSRKTFPTVNPSTGEVICQVAEGDKEDVDKAVKAARAAFQLGSPWRRMDASHRGRLLNRLADLIERDRTYLAALETLDNGKPYVISYLVDLDMVLKCLRYYAGWADKYHGKTIPIDGDFFSYTRHEPVGVCGQIIPWNFPLLMQAWKLGPATGNVVVMKVAEQTPLTALYVANLIKEAGFPPGVVNIVPGFGPTAGAAIASHEDVDKVAFTGSTEIGRVIQVAAGSSNLKRVTLELGGKSPNIIMSDADMDWAVEQAHFALFFNQGQCCCAGSRTFVQEDIYDEFVERSVARAKSRVVGNPFDSKTEQGPQVDETQFKKILGYINTGKQEGAKLLCGGGIAADRGYFIQPTVFGDVQDGMTIAKEEGQLL

SEQ ID NO: 804 - DNA, 3493 bp, Homo sapiens
attttgaggaggtcggagcggaaggacgtcgtggagattgcttgcgctggggtgccacacttaggctgagctgcaggttttcgcacagtcgcgagttaacctctgcttgctccagaggcctcgtcctaatccacctcggctgacggcgcgggatccctggctccgcgagcctcagcctcaccatgtgtgtcaggagctgtttccagtccccccgtctccagtgggtgtggagaacagccttcctgaaacacacccagcgcaggcaccaggggtcccaccgatggacacaccttggaggcagcacctacagagcggtgattttcgacatgggcggagttctcattccttctccagggagagtcgctgcagaatgggaggtacagaatcgtatcccttctggaactatattaaaggccttgatggaaggtggtgaaaatgggccctggatgagatttatgagagcagaaataacagcagagggttttttacgagaatttgggagactttgctctgaaatgattgtggagtcctgcatggaagggatctgtaagccagaccctaggatctacaagctgtgcttggagcagctcggcctgcagccctctgagtccatctttcttgatgaccttggaacaaatctaaaagaagctgccagacttggtattcacaccattaaggttaatgacccagagactgcagtaaaggaattagaagctctcttgggttttacattgagagtaggtgttccaaacactcggcctgtgaaaaagacgatggaaattccgaaagattccttgcagaagtacctcaaagacttactgggtatccagaccacaggcccattggaactacttcagtttgatcacgggcagtcaaatccaacttactacatcaggctggctaatcgtgatctagttctgaggaagaagcccccagggacactccttccatctgcccatgccatagagagggagttcaggattatgaaagcccttgcaaatgctggagtacctgtccctaacgttcttgatctctgtgaagattcaagtgtcattggcacccccttctatgtgatggagtactgcccaggtctcatctacaaagacccttccctgccaggcttggagcccagccacagacgagccatatacactgccatgaacacagtcctgtgcaaaattcacagtgtggatctgcaggctgtgggacttgaagactatgggaagcaaggggactatattccacgccaggtacgaacctgggttaagcagtatcgagcttccgaaactagcaccatcccagccatggagaggctgatcgaatggctgcccctccatcttccccgtcagcagaggaccacagtggtgcacggggacttcaggctcgacaacctggtgtttcatccagaagagccagaggtgcttgctgtccttgactgggaactttctaccttgggcgacccccttgctgatgtggcctacagctgcctggctcattacctgccatccagttttcccgtgctgagaggtattaatgactgtgacttgacacagctgggaatccctgctgcagaggagtatttcaggatgtactgtctccaaatggggctccctcccactgagaactggaacttctatatggctttttcctttttccgtgtggctgcaatcctacagggagtctacaagcgatcactcacagggcaagcaagctccacatatgcggaacaaactggaaagctgaccgaatttgtgtctaacctggcgtgggatttcgcagtcaaagaagggttccgggttttcaaagagatgcccttcacaaatccgttaacaaggtcctaccacacgtgggccaggccccagtcccagtggtgccccacaggcagcaggagttatagctccgttccagaagcttccccagctcatacctcaaggggaggtctggttatctctccagagagcctctctccacctgtcagagagctgtatcaccggctgaagcacttcatggagcaacgtgtgtaccctgcagagccagagctgcagagtcaccaggcctcagcagccaggtggagcccctccccactgatcgaagacctcaaggagaaagccaaagctgaaggactttggaaccttttcctacccttagaggctgatcccgagaaaaaatacggagcaggactgaccaatgtggaatatgcacatctgtgtgagctcatgggcacgtccctgtatgcccccgaggtatgtaactgctctgcgcctgacacgggcaacatggagctgctggtgaggtatggcaccgaagcgcagaaggctcgctggctgattcctctgctggaggggaaagcccgctcctgttttgctatgaccgagccccaggttgcctcttcagatgccaccaacattgaggcttccatcagagaggaggacagcttctatgtcataaacggtcacaaatggtggatcacaggcatcctggatcctcgttgccaactctgtgtgtttatgggaaaaacagacccacatgcaccaagacaccggcagcagtctgtgctcttggttcccatggataccccagggataaaaatcatccggcctctgacggtgtatggactggaagatgcaccaggtggccatggtgaagtccgatttgagcacgtgcgtgtgcccaaagagaacatggtcctgggccctggccgaggctttgagatcgcccagggcagactgggccccggcaggatccatcactgcatgaggctgatcgggttctcagagagggccctggcactcatgaaggcccgcgtgaagtcccgcttggcttttgggaagcccctggtggagcagggcacagtgctggcggacatcgcgcagtcgcgcgtggagattgagcaggcacggctgctggtgctgagagctgcccacctcatggacctggcaggaaacaaggctgcagccttggatatagccatgattaaaatggtcgccccgtccatggcctcccgagtgattgatcgtgcgattcagaagacgtctctgcaagaagcctggagtctgtttcaggccaggaggaggggatttgctgagggccaagggggttctgggacagagtctggaaagctggtcttcaggctctcagtcccaggctgggcaggcacggtcacttcacttcagcctttcagtccctctctctctgcctgtgggaatctggacacattttgggaggcctcccaaggctgtgggacgtgcttgctctggcagctgcagggttcctgtctggcctccctggtgagcagaggggcggccacggcgggcggtggcctagagacccaggacctgggcgcctgggaaaatggaatgcaacccacattgtaaagccactggcatctgattatctccatttgaacacacagcacagaacaatcatttaaatgttattttggaaaggggttttggggacacagaagaataagtaaacacatctcggaggcttt

SEQ ID NO: 805 - protein, 1051 aa, Homo sapiens
MCVRSCFQSPRLQWVWRTAFLKHTQRRHQGSHRWTHLGGSYAVIFDMGGVLIPSPGRVAAEWEVQNRIPSGTILKALMEGGENGPWMRFMRAEITAEGFLREFGRLCSEMIVESCMEGICKPDPRIYKLCLEQLGLQPSESIFLDDLGTNLKEAARLGIHTIKVNDPETAVKELEALLGFTLRVGVPNWVKKTMEIPKDSLQKYLKDLLGIQTTGPLELLQFDHGQSNPTYYIRLANRDLVLRKKPPGTLLPSAHAIEREFRIMKANAGVPVPNVLDLCEDSSVIGTPFYVMEYCPGLIYKDPSLPGLEPSHRRAIYTAMNTVLCKIHSVDLQAVGLEDYGKQGDYIPRQVRTWVKQYRASETSTIPAMERLIEWLPLHLPRQQRTTVVHGDFRLDNLVFHPEEPEVLAVLDWELSTLGDPLADVAYSCLAHYLPSSFPVLRGINDCDLTQLGIPAAEEYFRMYCLQMGLPPTENWNFYMAFSFFRVAAILQGVYKRSLTGQASSTYAEQTGKLTEFVSNLAWDFAVKEGFRVFKEMPFTNPLTRSYHTWARPQSQWCPTGSRSYSSVPEDAHTSRGGLVISPESLSPPVRELYHRLKHFMEQRVYPAEPELQSHQASAARWSPSPLIEDLKEKAKAEGLWNLFLPLEADPEKKYGAGLTNVEYAHLCELMGTSLYAPEVCNCSAPDTGNMELLVRYGTEAQKARWLIPLLEGKARSCFAMTEPQVASSDATNIEASIREEDSFYVINGHKWWITGILDPRCQLCVFMGKTDPHAPRHRQQSVLLVPMDTPGIKIIRPLTVYGLEDAPGGHGEVRFEHVRVPKENMVLGPGRGFEIAQGRLGPGRIHHCMRLIGFSALMKARVKSRLAFGKPLVEQGTVLADIAQSRVEIEQARLLVLRAAHLMDLAGNKAAALDIAMIKMVAPSMASRVIDRAIQKTSLQEAWSLFQARRRGFAEGQGGSGTESGKLVFRLSVPGWAGTVTSLQPFSPSLSACGNLDTFWEASQGCGTCLLWQLQGSCLASLVSRGAATAGGGLETQDLGAWENGMQPTL

SEQ ID NO: 806 - DNA, 2173 bp, Homo sapiens
cagggggcagccacgggccgggggtacctagcgccacccgcttcgcttgcatcagctgcgcgccccatcccgaggaatggtagaggcagccccgcccccggcccgcccccgcctttccattggctgccgcgcggggcggggagcggggtcggctcagtggccctgagaccctagctctgctctcggtccgctcgctgtccgctagcccgctgcgatgttgcgcgctgccgcccgcttcgggccccgcctgggccgccgcctcttgtcagccgccgccacccaggccgtgcctgcccccaaccagcagcccgaggtcttctgcaaccagattttcataaacaatgaatggcacgatgccgtcagcaggaaaacattccccaccgtcaatccgtccactggagaggtcatctgtcaggtagctgaaggggacaaggaagatgtggacaaggcagtgaaggccgcccgggccgccttccagctgggctcaccttggcgccgcatggacgcatcacacaggggccggctgctgaaccgcctggccgatctgatcgagcgggaccggacctacctggcggccttggagaccctggacaatggcaagccctatgtcatctcctacctggtggatttggacatggtcctcaaatgtctccggtattatgccggctgggctgataagtaccacgggaaaaccatccccattgacggagacttcttcagctacacacgccatgaacctgtgggggtgtgcgggcagatcattccgtggaatttcccgctcctgatgcaagcatggaagctgggcccagccttggcaactggaaacgtggttgtgatgaaggtagctgagcagacacccctcaccgccctctatgtggccaacctgatcaaggaggctggctttccccctggtgtggtcaacattgtgcctggatttggccccacggctggggccgccattgcctcccatgaggatgtggacaaagtggcattcacaggctccactgagattggccgcgtaatccaggttgctgctgggagcagcaacctcaagagagtgaccttggagctgggggggaagagccccaacatcatcatgtcagatgccgatatggattgggccgtggaacaggcccacttcgccctgttcttcaaccagggccagtgctgctgtgccggctcccggaccttcgtgcaggaggacatctatgatgagtttgtggagcggagcgttgcccgggccaagtctcgggtggtcgggaacccctttgatagcaagaccgagcaggggccgcaggtggatgaaactcagtttaagaagatcctcggctacatcaacacggggaagcaagagggggcgaagctgctgtgtggtgggggcattgctgctgaccgtggttacttcatccagcccactgtgtttggagatgtgcaggatggcatgaccatcgccaaggaggagatcttcgggccagtgatgcagatcctgaagttcaagaccatagaggaggttgttgggagagccaacaattccacgtacgggctggccgcagctgtcttcacaaaggatttggacaaggccaattacctgtcccaggccctccaggcgggcactgtgtgggtcaactgctatgatgtgtttggagcccagtcaccctttggtggctacaagatgtcggggagtggccgggagttgggcgagtacgggctgcaggcatacactgaagtgaaaactgtcacagtcaaagtgcctcagaagaactcataagaatcatgcaagcttcctccctcagccattgatggaaagttcagcaagatcagcaacaaaaccaagaaaaatgatccttgcgtgctgaatatctgaaaagagaaatttttcctacaaaatctcttgggtcaagaaagttctagaatttgaattgataaacatggtgggttggctgagggtaagagtatatgaggaaccttttaaacgacaacaatactgctagctttcaggatgatttttaaaaaatagattcaaatgtgttatcctctctctgaaacgcttcctataactcgagtttataggggaagaaaaagctattgtttacaattatatcaccattaaggcaactgctacaccctgctttgtattctgggctaagattcattaaaaactagctgctcttaa

SEQ ID NO: 807 - protein, 515 aa, Homo sapiens; identical to SEQ ID NO: 799

SEQ ID NO: 808 - DNA, 2407 bp, Homo sapiens
gggagctcaggcacccgggcacagaggggatgggagggtggggagccaagcctaaagggcaaacagaccacgcagaatccaccctagccggcagttttcttagtgctgtctctattcctcctgcgacttttcaggctcgacaacctggtgtttcatccagaagagccagaggtgcttgctgtccttgactgggaactttctaccttgggcgacccccttgctgatgtggcctacagctgcctggctcattacctgccatccagttttcccgtgctgagaggtattaatgactgtgacttgacacagctgggaatccctgctgcagaggagtatttcaggatgtactgtctccaaatggggctccctcccactgagaactggaacttctatatggctttttcctttttccgtgtggctgcaatcctacagggagtctacaagcgatcactcacagggcaagcaagctccacatatgcggaacaaactggaaagctgaccgaatttgtgtctaacctggcgtgggatttcgcagtcaaagaagggttccgggttttcaaagagatgcccttcacaaatccgttaacaaggtcctaccacacgtgggccaggccccagtcccagtggtgccccacaggcagcaggagttatagctccgttccagaagcttccccagctcatacctcaaggggaggtctggttatctctccagagagcctctctccacctgtcagagagctgtatcaccggctgaagcacttcatggagcaacgtgtgtaccctgcagagccagagctgcagagtcaccaggcctcagcagccaggtggagcccctccccactgatcgaagacctcaaggtatgtaactgctctgcgcctgacacgggcaacatggagctgctggtgaggtatggcaccgaagcgcagaaggctcgctggctgattcctctgctggaggggaaagcccgctcctgttttgctatgaccgagccccaggttgcctcttcagatgccaccaacattgaggcttccatcagagaggaggacagcttctatgtcataaacggtcacaaatggtggatcacaggcatcctggatcctcgttgccaactctgtgtgtttatgggaaaaacagacccacatgcaccaagacaccggcagcagtctgtgctcttggttcccatggataccccagggataaaaatcatccggcctctgacggtgtatggactggaagatgcaccaggtggccatggtgaagtccgatttgagcacgtgcgtgtgcccaaagagaacatggtcctgggccctggccgaggctttgagatcgcccagggcagactgggccccggcaggatccatcactgcatgaggctgatcgggttctcagagagggccctggcactcatgaaggcccgcgtgaagtcccgcttggcttttgggaagcccctggtggagcagggcacagtgctggcggacatcgcgcagtcgcgcgtggagattgagcaggcacggctgctggtgctgagagctgcccacctcatggacctggcaggaaacaaggctgcagccttggatatagccatgattaaaatggtcgccccgtccatggcctcccgagtgattgatcgtgcgattcaggcctttggagcagcaggcctgagcagcgactacccactggctcagttcttcacctgggcccgagccctgcgctttgccgacggccctgacgaggtgcaccgggccacggtggccaagctagagctgaagcaccgcatttagagccttggggctgcagtggctcaatgtcctggctggtccagctgtgcccagatctgtcactgatgtgcctcgaaagatccggtgtttgtggctcctgcaccctgctcagcagctctgtcccgggacagtcagggtggactcaatctttctggttctccacagaagacgtctctgcaagaagcctggagtctgtttcaggccaggaggaggggatttgctgagggccaagggggttctgggacagagtctggaaagctggtcttcaggctctcagtcccaggctgggcaggcacggtcacttcacttcagcctttcagtccctctctctctgcctgtgggaatctggacacattttgggaggcctcccaaggctgtgggacgtgcttgctctggcagctgcagggttcctgtctggcctccctggtgagcagaggggcggccacggcgggcggtggcctagagacccaggacctgggcgcctgggaaaatggaatgcaacccacattgtaaagccactggcatctgattatctccatttgaacacacagcacagaacaatcatttaaatgttattttggaaaggggttttggggacacagaagaataagtaaacacatctcggaggctt

SEQ ID NO: 809 - protein, 473 aa, Homo sapiens
MYCLQMGLPPTENWNFYMAFSFFRVAAILQGVYKRSLTGQASSTYAEQTGKLTEFVSNLAWDFAVKEGFRVFKEMPFTNPLTRSYHTWARPQSQWCPTGSRSYSSVPEDAHTSRGGLVISPESLSPPVRELYHRLKHFMEQRVYPAEPELQSHQASAARWSPSPLIEDLKVCNCSAPDTGNMELLVRYGTEAQKARWLIPLLEGKARSCFAMTEPQVASSDATNIEASIREEDSFYVINGHKWWITGILDPRCQLCVFMGKTDPHAPRHRQQSVLLVPMDTPGIKIIRPLTVYGLEDAPGGHGEVRFEHVRVPKENMVLGPGRGFEIAQGRLGPGRIHHCMRLIGFSALMKARVKSRLAFGKPLVEQGTVLADIAQSRVEIEQARLLVLRAAHLMDLAGNKAAALDIAMIKMVAPSMASRVIDRAIQAFGAAGLSSDYPLAQFFTWARALRFADGPDEVHRATVAKLELKHRI

SEQ ID NO: 810 - DNA, 125894 bp, Mus musculus
  misc_feature (1)...(125894): n = A,T,C or G
ctctgagattaaaagcctcccactacttccagctcacactctgctgtgtgcttataggtgagagtgtgagctctctgctccctgctctcagccgctcacaccgcatccacacacagccaggaaatagagatggaaggttgtgcttagctctctttctccttcttatcagtccaggctcccaagccacagaagggtcacatgtgggtcttcccacctcaactgtcctcaggtggataagcactcacagacacacacacccagaggattgccttattagtgagtctagatcctgtcaagttgaccacattaaccatcaaattacctacattcctggagacagaaagcagaacgaaggcaatatgtcacttaattggtccagagctgagacttgggaaggtgagagaattcaagagatggggggggggggggctcctgatttgctccacatcagagcaaatgcgtagatgccactgaagtgcacacttacagatgcccaaatgatagaccccacagttttaaaaaagcatgctgtgaagagctactcagtatagaaggtggcaaaatccaatttctctccaaaaattattcttattcaaaattttgaagaggccgtaaattacttcctggataagttcagtcacggtggactcttgagtatctttatttggtcaggaacaaaaaaaaaaaaaaaaaaaaaaaaatcacaccatgccaagaagagctgctggaggcagtgtcaataattaatgaactttgaaaaataccctaagcctctagttatttataacgaaaatattatgcatacgcagagctttttgtgtctgcaaatctctttataaatcagataaataattcaaacacaatttttcccacttgggtatctaagggcagtgacgggccaaggccagggcctcttacccattctgatggttgtgggttttgttccctagaaatgtatgctggcaacggaatgtcttatgactcaaagaccctatggctcagctcacagtcaagtttctccacacatcacctattttctcttcgaaattctgatgtgttataatttgaagaggactgactccaggctgactggagtctgttgtactgtttcacacaagcatgggtcttttaagatttatttttatttatgtgtcgtgtctctttgagagttttccatgaaggtgcttatggaagccagaagaggatgttgaattccctggagctggagttaaaaggcgttgtgagttctccagcatgggttccaagaaacaaacctacatccgcaggtagagccgtaagcgctcttaacggcactccaggctaagcttggtttttgtgatgatttgtatatgcttagcccagggagtggcacaattagaaagtatagccttgttggagtaggtatgttactgtgggtgtgggcttaagaccctcatcctacctgcctggaagccagtcttctcctagccaccttcagatgaagaagatatagagctctcagctcctcctgcaccatgcctctctgggtgctgccatgttccctaactgatgataatggactgaaccactgaacctataagccagccccaattaaatgttgtccttataaaagttgccttggtcatggtgtctgttcacagcagtaaaaccctaacaaagaaagtttttaaatcattattagtcctatgtgtatgtattcttcttatgttcttatgttctccccaaggcatatgttttaaatgcttggtcctgaaatgctagcaacagttaggatgctgtagtaatttcaataggtgagtcttagcagaacaaagtaaatcactagggatacgggtttggtttttttttgttttttgtttttttgttttttgtttttttttttttttgtttttttttgtggggggcggtctcttgtctctgtcccctttatcctccttcggccatgaatttacaagctctcttctaccacatactcttgccactataacattcctgctgccatgtgcatgggccaatcaaaacagggactcaatcctttgtaagcatgaaccaaagtgtagggttatggggcccgaggctgctctgcctcaggacttggccgctcagggaggcaggacttggcaagtctgaccgtgcttaacccacgctgggtgggtgttgggcagtagggcagccctggaacacctgggggatgggggtgaggtgggggtggggaagcacagtctgaggtgcaggacaaccaaagctggcttgggggtccctgggcctgcaatgaggtcagggccatctggttctcaggctctagggcacccaggcactgctgggagcaccggaagagctgagaatggagtgaggacccaggggctggatctagtctgggacagcagaggaaaggggagagctctggctggtcccacctgggagagtctttggcttggtgatggctggggctgggagtgcagagaggacttctacagtagattagatgggcagctctataggtgaaggctttctccatggctcccaacagtgaaaagaggcagtccatggttttaaggcatttattgtcatagtggaaagtagatgaataaaaacataccctacttctcaggatgggcctgagattaaataccttttgcagggaggagtgtctgggaaggaaaacttattgtctaagcccttcaggcctttaggtaccttattaaaatggagatctgttttgagcctatgtgaccacaggtcatgtcctctaactgtgaagtggcttggggcattgccctttacgtgactaatggccacaaatctatggagggctgtgactagtgacaggggcctgatgcccagaatcaggcaaaatgcttaccttcctttcaggatcactaggatttcgagccttagctcaactgggagcaaggccacttacagagtcccacaccaaagtactcttcctctaagttgtttctctcacatactttggtcatattgatgacaacagtcactgatacagtccttggcgtttttgatatttgtaacagtttgcatcttcatagacctaaaaaaaaaaggcaggagtgtagtgtagaccatggtgcatgaaatgtcagcgtactcaactcaagccaaacacctgtgagcatagctgctaggcaagggggcctctagagcagcagtaatggcaccaggttccttcccttcatagattcagtcatttacttaggaaatcaccccaagtcttacttgctagaatagttattttttggctagaccatggggggcacagctatctggttaaatactttctgtgtttacctgtgagggggttgcaggctgagatgaacttacagattggtgggctgtgcaattcagacagcctccttcaacccgagggctcactcaacctgaatgggtcagaaggcctgggtgggaaggactttctcctactgcctactggagctgggaccttgatttgtccctgtccttgaatttacagaacagcaatcctggtccccaggttttcaggtactcccaagtattccacctgccccctgggccttcggcgtgttgcctgtaggttgtaaacaaagcaggcttcatagctgcatgaactatgttgttattttacctattaacgtagttacatatttatgtcttgtgtgtatgtgtgtgagtgtgacaaacttattacccgttctgtttttctgaagaacctcatccaccaactcattcacttgggaagatctatagcttcgttttttggaatctctatcagcaaagattgattaggtaaggaagatagtgcctatagttagttataattaactaaaatgtcgttagttctatctgtatctttcttatagtgggaacattaaatgccctcctcaaggctcatgctttgaatgtcttggtcctgaaatcctggcaagatttcgagatgctctggtaattttaataggtgagactatctgttaagctaaagcattggagtggggatacctttggtgtgccaccaagaaatcacaccatgcaacagatctagtgcaagaggtttattggaggtgggggtagaacaaaaggtcatcttggagtggggggagaggggaaggagagagagggacagagaaaataagaaagacaggaaaagagagagaaagagacagactgacagggacacagagacacagagaatgagaatgaagaagacagagatcgagggggagagagagatctggagtggctggggccttgcatgctccgcacttggcaaacctggtgcacctgggggcggttgatgacctaagctgctgctgctaggtccctgaggtcaggccagtggaaatgcctgattgctaacaatatcaaaggctgctatggcattagttactggtgagactcgggattttaagctcagtctgttggaaaggacagagaagccctgtttgtatatctgtttctgctatctgctacctttcaaaaccccagagggcagtggcttacaaccacttgttcttcaccacaattctccgaattgtctggaaagttcttttgggtcattttgatccataaatctgaatcagctggcaagtcttttggtaccagatggtctactctgcccacactggtgtatctactaatggaaggccagtgcctgtgaccacaggggctattgggcccagtgtttcttgctatccaggaactatcccaagtttatttcacatgatagtcacagaatctccaatagcaatgagaaagagcagcctcatgggcaaggatgtccaaatctctgctggtcctacattcactacagttctgttgtccgatgtagatgacaggaccaagctcagcgtccaacaccatcacggcaggaaactcagcagcaagcaccaggcttagtgaccgaatagtggagagctcacatcttgaaccactgtcaagaatcagagaaagcaaactgagaaaggcaaccatggaaacctcaaagtccatgttgagcgattcaattcccccagcaaggccatacgtcctaaacctaccaaaacagcaccaccaactggggaccaagtactcaaatgttgcagcctatggggaccattctcattcaaaccatcacgggacctcgtccccgattctccatcttttaccagccattgtccctcctatagctcttcttctaggagtgagtcttgtcagatttccccatccacattgcgtgtcgcatttctagagagaggtacatatgtaaaacaataaaataattagagaagaggaggccatgaatttgaaaagaagtgggaaggccatgggaggaactggaggggggtagaaataatgtaaatatagtactcgagtataaaatttcaaaataaaatttaaaaaatgtttaaaaaattttaaaaccacattaacaccatctccaaatatgttaagtgttccaatctcaacatactcaagaagaactatttttttccaatacaaactggaggcaggggaacagagcgtgttgatacgtagcctttccttgctcaaggcccaaactcctgggctgatctcttgttaaatctaggcagcagaggactcaccttgccttctctccactctcaacaaagtaaggtcttacagagagagctggctccggacagagaaagatagcatgcagctgcacttaggaagtgaggagaagacttaatagcaccgaggaaaagccagcaagcagccaaggccaggatcagtaaactctctccaacatagggaaactgtattctctgccaatagcttccttccctagtgcctccttgaggaacttacaagacttatggtgccactgttctgtttcctagcacagtagcagaccataaccgactgccttagcctaggccactccacttccctggcctgggcatctacgaatgcacgcatgcacatacgcatgcatgccagtcttttaccgtcctggtctacaggaagctatggatagatgggtgcaattgctggtgttttatactaactggaagaatttcaacaaagcataccctttcctcaaattctaccctctgtttagcgtcctctttacctggtaccttagggctgctattggtgtggtgaaacaccataaccaaaagcaagttgggaagaaaagggtttctttcagcttacaactttcaggccacactccatcgatgagggaagtcagggcaggtacccaaggcaaggaatcaagagacaggacctgcagcagaagccatagagcttactggctagttcagcttgcatgagcagctcaggaccacttgcccaggggtggcaccatcccccatgggatgggccttcccacatcaactattaatcaagacaataccccagagatttgcctggggcccaattttacagaagtgttttctcagttaagattctctcttcccagaaatgactaggcttgtgccaagttgacaaaaactagcccaggtaaaacaacttcctttataaagacaaaaccttctattttgatgtgcagaattctaaaataaggtaccatagtatatttccaacttggcaggcacattagtgaaaaaacaagaccaaagctgagtactgagtactccgaactcaggcagtctgaggaacgtcactgtgcctggagggtcattgattcgctctgtaaaaagttggttctcggatagactttttgagtctagtgtgttgagtggattcattgttcatactgaagaaccttgactggcatgtttgttcgtgtaaagatttatttattttatgtatgtgagtatactgtagctgtcttctgacacaccagaagactgcatcagatcccattaaatggttgtgaatcaccatgtggttgctgggaattaaacttgggacctctggaagaacagtcagtgctcttacccgctgagacatctctccagctccaaccagtttatttttatgatgagtattttggtgaagttttatcttgttctctctctctctctctctctctctctctctctctctctctctcctctcctctcctctcctctctttctctcccctgcttgcttgctttctttctttctttctttctttctttctttctttctttctttctttccttccttctttctctttctttctttctttctttctttctttctttctttctttctttctttctttctctccctttccttccttattctctttctttctctctctccccctccctccctctttttcttcattctttttctctctatctctttctttctttctgaaaaagttgtagctttggcagtgctgctcagtctacattaggtgtcttgcactgttcccgacccccatcctgccttaggccaattgttgacctccctggagcttcagtggaccgacccatcaagtgaaagtaaaggtaggtatggagataaaaaggccaaatacacatcagtatcataagccaatcgttaggtcttaatatgttgtagtaaattagcctgttttgtctctgaaaggaatattaaatatcagccttctctaccagctcctttacaactataaaacctgtgtttaggacaaggaattcagatcttttatctctccaacccagtaagacttttacataaacgttttaatagcaccaacccagtaagcccctgctacattctcagattaaagtcattgacttcctttcaccttcatttctctagctttgattttaaaaaactatccaatcttgagagcctgaagtcagactccagccagtggaaaaaagacagttgccaccatcaagtggacttcctgtctctgtgccttcattctctctaaatcatcctcctgaaaaagagtaacattttgctttgttgagacgcttcagatggagtggtgggctctgtctttgggacctcaaagttacttcgaacagtctctaacttagcaagtctatgtcacaattccttatcttgtggattctgaatatggttgccatctttaactctgattgacttgaataattactgatgtcatttattgtttctgccacactccttcccatttagctcctgagtaaacaacacaaagacatcagaattcattaacaagctacaaacctaaactgggcaggttctgacactatgacaacccaatgaggctattaataaccagatgaatatacccactgcttgccaactgagtcttgttttgtttcatgtgtggcctcagggtgagcttctcttggccacatgatcatgggccatcctgcctcatggagtcctccttcttcctttacctttttccttctccttgtagtccctacctaagaccccctactccatttcaagttctgccttcctctctctccttcccagtcttgggctctagccttttattgtccaagcagagattggggagaattctttatagcacattggtcaatacaatgcccacgtctagactgaaatgtgaccttgggacacagaacaagcatctgaatgcacagttcacgagaccaactccaacaaataaactctccccagcctgtttcattctagtccttgtagggcaaacatgtttttcatgttttgaaattattctttgacagatcctaactctaccatcaaacatttttctcagtagattgccgttagcaaagttccctctgctacaaatgctgattaagttattgaagacacacatagggtttgcgtttttataatttctgcaagagcagagcgaacactctagtcttcttagttaggtggatccagaccctaaggcaatgaggttggagagaaatcccttgtcaaaatcggtacccactaggaaaagaaataacaggcaaggcaaacctagcagagagatactttcattgcgccctttccagttacgagccgcaagataatgaaggaaggtaattctgaaagctttatgtcagttttaatggtccctcaagcactaagaaagataatagtcaatggatggtgtccataagaattttttctccttttcccctgacagccattgataggatcattttgtatttgtaatggctgtcactgaagcatggagaaatggcccagtaaggccagaggatgaagacaacttccctgtcaggatctctgttgtcattgctatggcaataatagttgctacagttctcgttctgtttttctatagcatgtctattttgtggagcttaaggctataggatttgggtttcataaaatcacactagcagaatgccatgccttttctaatccttcaagaagaacatttgataaaactattcagcaggatgaaaataattacagatgcaggtcacttgactaattattgatggaatactaacctcttcacaggggttcagatacactacaattagtttgatttattttccttttctctcctccctttcccttccttcccttccccaatctgcccctctggtcccactgctagcttttttcttcccaaggaccagactcagagttggacaggtatgtaaattaactacaaatgagctcttaaaatcctttggtagtttctcttcattatctacaatgaaaggaaaaggagaggagtcaggtcttttcaatcttctatgtcacggcctcatctcctcccacggcgctgtgcatagtgttaaatttcatctttactagctttccgaccgacagaattagggatgtcaaatgcttccaaagttcgatggtgtgaatgaagccagactggagatgcttgtgtgaatgttatcaaatgtgaggtgaacaagctcaaagaaggacaggcagcaagaagacaaagaaagtgggtggagaaaagggattaaaagtacatgcaaaaaggaacaacactagccactgaacgtaaagaggaaaataaaagaagcagcagaacgctgcaaaagtgaacgccaatggagaccttgacagaatgtgcaagtacggaagcttggactacagccccccagagttccttgcagcgccgcgggccatgacgtcagtctcctaggcaacgcgtataaacaagatggcggccttcgagcgaaatccctcgagatggaaaggcacccgtttcaggcggggtttgggcgcctctcgcattgcagcccaggcgatactgtcgctcacagaaaaacaaagtcagggccgttggccttctttccccctgggtctgaagtcaaaagggactttcagaagcgcctcctcttacctcctccaccagctcatccaccgctctcatgaggcagaagcggagcaagaagagaagcaacaggaggacggagaatctgaagagtcagaggagtccgaaatgcagaatttggaggtgtgcctccccccctccccaacccgcaccccagtctcaggcatcctccagccgctcaacctggctgcctcagcggcagcttgcttctgccttctctagccctgggctcagcccactccactctagccagagggcaagggcttttctttgctgcttatttttattcccccatttctcgtgtgcttcacctcctgtcttggagaaagggggtgaaaccctccaaatatttactttcttttcctagtttcttatctgtcagattacacactgttataacggggggaaaaaaatcagtgtaccagtatgggtttaatgctttcaaaattacgcattgacaaaattatgcgggccattcatcttcttccttcctccagggtggtttaaaaaaaaatcccaatgctctgctgaagacgaaataatgtatacgttttatatgttacttctgctcggggtatttgtgtgcctatttaagcactcccactctttctggttagaagggagccacagcatgatcagagagagccagctcacccctagttggcagagtttggcttatggggagcgttcccaacgctcttaactattttcctaatctcctgattccacttcccttccccacttgactgtattcccacacaccgactgtccttcctcatcccttcgcttccttccaccttgcattcccttactcctagtattggcttctatttattgtgctttttcaaaatcgtaggttgatctgtttccctctcatacccagttaggcttttctctctgtcatagctactcagaaccaacatctttcttgatttcacttcttgccttttttcgctgctcccccttcttttccctcagcttcttcacaagccacctttctccccctgtcaaacatggctcctggtttgccttctttcttgtccttcctgcctctgacctcccgttactccacttctgccctcctttccctgggctcttgtctctaatgccctttcctgcacttggaatatttggcctatttcccccctcatccctctttttgtttttcctagtctacatctttcttcctgggctggttgcattctaacgttgcttgaagttggctatagcagtgtgctggcaatggcgttcttgccattctcacccggcactgagaggcagagatagggtgattgtcgtgagttagaggttagcctggtctacacacccagtttctgattagctagaaacactgatagaaccacacagtgagaccgtgccttaacaataacgatgatgatgatgatgatggtgatgctggtgatgatgatgaagataatgataacaaacaaccaaaaaggccatcatttattttattctccctttgttggttaattttccaccttcagctgagactacgacaaaccgtagctgtgtttgtgctccttcgaaatgtttgtgtggtttccaccatcttccaccccagaggaattcacaaatgaaccaccagcattacttatgattctaattagcacaggctccttggatatgagttcattagcgccatcattaatctgtcttcaggatgccattaacaagccgttagaaggggtccatccaactggctacccctttctggtttggagactatgttgagaaaaagtttattatttcctccagttatattctaaatactgatactgacttttcacggtattgcattttaaaatgtggaatgagctgaaaagttgtgaagtatacgttcttgttgagtggttgatttcccgtttctcaccctgattccaagtaatcacgtggtggccatattcatcagtgcagcctgcttcagactgcagaagccctgatgactttaagggaagcggctgagactggctgtttggagcacagcctttgtgatgaaaggcttgtggctgggatgtgggctagcctttggttagtaccaagattctgaataagtgatttagcttataatgtgcttgagagtcccctctgtctcgtggataactaaatgctatcctatatgtaaaatgcttagcatcgggccggtgagatagcttctcatgtaaagacattcgctgccaagcttgatgacctgagttcaacccccttgacccacatagtggaagaagagacttgactctccaacgtggtcctatgacgtccacatgtgtgctgtggcatgtgtgcatgtacacaatacacatacaaatagaaagtgtagtaaaaatcccaaacacttagcatagtagagtcctgatactaaaaacagtaattcagacatttctaattgctacctgtagcttgttaaagtggttttagccctatggaacgaacatttaccaagcaattgcttaataggaaacaggaaacactctttgaccgcgtctcgacccaacatttggtgcgtgaaaacttcccattgccagtaccagtcactcaatgtgagccacagtgcctattcactgggatagttacagactccaaatttagtaagagactaccgtaaagttttcatctgctggatagagtaggcactcagaagttacagatggaataagtaagtgatggcagttaaaatagaagacgacgctgtgactgagatgtgacggaagacatgcagggtccatgctctcagagtgacacatgggtatgtcacagcaagcagcacctggagtttcatacacagagacaggatcagctgcacttgggagttaaaacgtaagagcggaacaagcagctgaagctggggtagggctaggctctgggctgtgcacagacactcacttgatactgtaagcagttctctgatgaccaggtaaatttaggtgatagggtggtatgtattctagcagtatctataggggagcggggagattccggactaagggagtgcttggaacataaagtaggttaaagataaaacacttacgatgaaaccatcaccaattgggtgtcagagacctcattgtcactgtgagacaggacagtgggggatactgggtcatggcaaagggaatcagagacagacgttactatatattaaggaattgggtttaagaatcatatgactgaaaatcagggaggagggatctcagaggcagaagctgtggagttcatagctctaggtctgtgaaataggccaggaaggaaggaaaagccagggagaggaggggaggtgggaaggacagcagtataggaaaacagattcttcgctgatgtgcaggtgaagacgagtgtgagaagggaccaatccagaggtgtaggagaagaagagctacatgctagctgtatgatcacgctccgctggggcaaggacatctccagaacaaggagctgggttattctgccaataggtcaaatgggaagaggcctgtttgcccattggcagaaaggtctgataacgtcttccaggaacctcgagtgtggagccttggcttcggaatctgagagaacgctggcagttttacccactcgatatccacagctgtggtgaccaacaggccttcctgaataagtaaggaaatggtgtcctgtgcagtcaggtgacctctggagctctaggtgggaagtttgggaggaaggcaggatgcctccacctccctccctcctaggttttacaagacacttcatacacaggcatgaatgtccttcctacttgggagcagcgtggcaggcatgggacttttgcacacagaacttttattgacacattcgatgtgtcccagacaccatgccaagggctttctatacattgtctctttaattctccttagaatattaaaaataaggaatagaagagaagcgatggtcttcctaatctcctagctctcctagctggacccacgaggtcactatgaggtaaagtgaggatgagcaggtcaacgcagactaagggtatgagcatggtggtttttaatattacatgcatcagggtagtatagggaaagattttttaaaacctcctcttacagttgtttgtttgtttgtttttgtaatggccctcatcagttgcaaacctaagttttccttgctgaggggtgaagaccccacttctctgtgggctcaaggacagatgtttatagatcgttgtcagggattatgctgggttagtaaatgagccgttgtagattctcctccaataaccaccgtttaacaagcactgaatagttagctagatgtccagaaccaatccgggggaaaggctggagagatggctcagtggttaagagcactggctgttcttccagaggacccaggtttgatttctaacacttacactgtggcttctaatcttatcttcttaatccatttccagggggctccaacgcccttttctgtcttccaaaggcaccagataagttatgtggtacacagacttaaatgcaaacaagaacccccatacagatcaaattaaacaagcaaacaaatcctacaaatgaaatatggaagagtctggagaggtgactcagcagttcagagcacgtgttgctcttgcagaggatcctgctctggttcccagaatgcaactggtgactcaccaccattcattaactccaattccaggggctctaacaccctctctgtcctcctcaggcactaaatgcctatggagcctgcaggcaaaacactcctacatataaaatcaataagtgtcaaaaaatctattatcattatttattcaggtgtgcggcacacatgtggaggtcagacagcaactcgtaggcatttgttctctcttgctgctgtggggttccggtcctcaagcttcgaggcaagggcctccaccttctgagtcagtcatcctgccgatctggaaacaattttgatgtgagatttgagggtctgcacaccatgctaacaggggaaggggagagaggatgtaggccgcttaaagggacggggagggggcaaatgtgaaagacacacgggctctcttaggacagttgggagatttgagagctggtggcacagcctgcctcactgtggtgtcaggctctctctgctcctgtgataagggtcagtctcctccagctgatgaaactcccggggaggggatttacaacaatcgagttccttttgaaggatctgcctctctgtagataaaagcagttcagagaaagtctctccttggcgggcgttcgctggtttttcaagtgccttcagcatcaaacaatcaatacaccaaacgcagcctactttggagggatggtgtgtctagaacggctttaaagaaaaacacactttctatttataggtggagaaatgaggttcagagaaagctttgccctccccccaagtcacatgacaggttatggggttcaagctgagcccacctgactccaaaaaccatgcactatctccaagcaggcaatattccctggggacgtcctctttttataccaacatgactctgtatacttaggacctcaggaccaacaacaaacagcattcttggctcccgggttaataaagaactaacaagcagatgttttccatcacagttcatatgcttgctcttcatggttaagtactttatgtcagcgtggctgccatggtgaccgttttctgtcatcttgctgatgtcagtgtctgtgctggccattgcagagttcagggtaggagacatagattggcgtgttgtatctcctgtctgccatcactgccttgcccatccactgactgcaagcttcctcaaggaagtgacccactaaatcatcttgtaaattagatgaatcttacagaatcagcaaccaggaagtgagctgaggacttggtttgttcggcaagaataccagatttcaagacattattgcctttgtttgatgcaaccgtcttttgagggctgggtaagcagcctagtgcagaatcacagacagactgacagactgacatttcattccagctctgttacctactgccatgccattttgagcaggagtaacctctaagccttagttacttaaattggagataagagtgctgccccagggctgtcagaaggattagcaggttgatagcagagctcttgcacagggccaccaacattcatgtccctgtggcccctgtgctctcccagccttggacaccaaagggaagtggcacctgacaaaccggtggcgggtggtggcaaggcatggctttgatgagtgtttacttaactgtatacagtatgtacatgttgggcactcgtgcgtgacccacacacacacacacacacacacacacacacacatggccttttctctggaagcttgttgggacctggcagtcagtcagtaggaaccatgaccgggggagtgaggatgatcataggaaaggcagaaagaagatgcaggagatagagatgggaaagctgctggccaataccatgccagcaatgagtatattctctcagtgtctcttaaaggtgagcaacagaaagcatggccaattccaggaagataaacagtgaccacaaatgcttatgcagtgactttatggtacccagtatctatgtttgactaaggcctttcccttcaggctgggacagtctcttgaggatgtatgtgtaagtggaggaacttgtcaaggtataaggcacatcttaattaaaaacaaagacagatgccagcatgctcattcatgattaatcacaagcaagctatcagccaaagttgactttggaagtgctcccccacagatgctgggtaggatgaggtagacagttgactttctaatgcaagttctttgcctaccattctcttcccgcaggacaagtatgacgggatcctgagagaggagaccgtggctgaggcaatcactggattggggtggtcaggccgtggcacggagcaggtttacctcaacctgaatctatcggtgagtatgacaggatcactttaggctggtgacatgggcggatgacgttcatcttctttggcattcatgtggtggtggcagagctcagggcctcacgtctgccggagatgagctatgagagatgggcccatgaatggcagacttcagggagccttgctgtctgactgtcagctcccctaattcttctgtttttatcctcctcggcaccctctttcatcctaagtagcctatattatagcaatcaatgctttctttgggagcttgaatctggatgtgtaaaaccaatcaaaaactctgtaagaattttcgctctgatcggccaaagctgagctaaactctatctgaatcccagggaaccgagtattattgatttctccctgaagtatgtcaagaagtaagtagctctgagctgtcttttattttcataaagatgcctatcattaaagcaaaaaaaaaaatctattgttacccatcaattttcaagatttcaaccctcgtcagccaatagcgcagggtcttggctccactttgactgtgaggggctgcaagagctgaccgccaacactgcagcttctctgctgttgcccgtagtcctggaaaaatagtttagttctttttgcttccattagaaaaaaaaaaaaaagtcaaggggttggtgcaatggctcatgggtaaagtgcttgaggtgcaagtgtgaaggctggagtttggatcttagtcatgctggtgtgtcagcctggtcaagatgaaatcctgagctccagattcaggcagagaggcagcttcagtatacaaagtaaatgcaagtgaggaagacagctgatatcgagcatgctcacactcacacacacacacacacacacacacacacacacacacatacacacacacacccctcttatacacacgtgcacccatacctgcacaactgtgcactctacgtgtacttaaagaaaagcacatcgaacttttactatagctttctggtttgcttcattcccaacggaaagggtgttctgccttggatttgaactaataaaacacccaaggactaatgaagtgtggtccctggtgctggcttcatagtatgtccgtcagcatatgactgccatagtctctatccccagcaatgtctaaccttctgtgggtgtcccaggcactcaggtgtaacgtccggtgagtgccctatacacacagcactgtgtgaaccattgaaatgctgtcattctggcagccagtacagccccgtgaagggtcatttccaccaatagtcagtctacttacgtatgtagagctatgccttaggttggtctgccaacaaaagcaaccctttgaatcttatttcagccagagggagggagcttaactcactttgcccctgccctccttactgttgagagattacatgttaagttacttggcctcaaaaccctgtctcaatgagtacactttctggctcagtatcttactcatgctatacatgataatacaacaacaacaacaacaacaacaatgcattattatttatttgactcctctaattacttgcatacatatcttctctcctgccaaagtcctacattcttaaaggcatggcaaagctccacccctccctgttttctcatcaccatggtgatgtacacagtgggcactcaatgctggtttgccacttcactccccacatgagaacctgctttcaaatgactccctattagagtcattttgtagttgttgtttatttgttttgttttttgttttgtttgttttttgtcttttaccgcttgagacagagtgacatgaaccacttgtctaagtctctatgccaagggatcagattccctcctaagtccacctgaacttcctttgagtaccgttttcaggtatgaattttggacagagactccgcagagtcggatgctgcggctccccagggtgctgtgtcactccaggcttagccacacgcctctctgtgcttctttctgcagcgtgtgttagtgatagcctcacggcatgtgatgtcccttaagacttcatttaaactcccagcgtttgcttttctctggctggatgaaaatgtgatctttattgctataacttttatttcaaactccgcctaacagttctcacgaactgtttatcttttcaccagatttgctcttgctgataacactaatttcttacgctgataaattattttttcttcttctttttgagtcagggtcttattgggtagccttggttgccttcagactcacagagattcacctgcctctgccttgattaaaagcctgcaccactacaacgacagactagtgtttcttctgaaagaatactttcttttggtgggatctgtagtctactttggagtcccattagtagagggtcttaggtttcatttctctcttctatacttttttttgttttgttttgttttgttttggagacagggtttctctgtgtagccctggctgtcttggaactcattttgtagaccaggctggcctcgaactcagaaatccgcctgcctctgcctcccgagtgctgggattaaaggcgtgcaccaccaccgcccggctcttctatgcttttgaaagaaattccgaatttctttccaccagtgttgtttctagatgttgcaggaaggctcacacaaacaagagtggccatatttaagcccctctccctcttcgtcccctcagcactgtgagttggtcgacatcagcattctgtgtggctatgtccacctgcagaagttgaatctttcgggaaacagaatcgaaggtacgtgactgtcgcttgaggagactgatcgccgagctagtacagaaatctacaggctgcatatggaatttaatgtagtttaataatactgaatttgatgtaagtgatttgtagatcaatttacatattgattcattgttgtccagggagggaggcagggaggaagggagtgagtgagggcaatgccgcccccccccccccccccggagactgtttgatgatgccttttatttgtttttgttcatctctcatacatcatatccggaccgccataccttccttttccacattctcctccccttcttctgtgtgcctgcgtgcgcgtgctcttttcgcccgtgttgttgttgtggtgctggcgtctcttttttgggtccgtcgtgtcctcttcgcttcctccctgtttgcctccttcggtgttgtttctagctcgctcttacgttcgtttctgtcctcttgtttatcgtctctccgccccttttttcgttttccctgtcggtttctgctttgtcgttttgtgtttcacgctcgttgtttttcgttcttctttgctttcgctcttgtactatttccctctgttatctccccctctgttctgactctcctgagtttctcctttcgtttctcctctcccccttgtatccgttttctaccctgtcttctttcttctcccgttcgcctttttccttctcttctcctttgcctcgtcctcttctccgtgttgctcttcttcccttcctttccctttctcgttcttccctctccgcctccctgttatttatggttttttatcccatataataataataacatacnnnnnnnnnnnnnnnnnnnnatcttttttattagagggtaaacgaaggagggaggaaaagggaggaaacccacaggggggcccgaggcggacaaagaagagagagaggaaagaagcgagagggggaaagagggaggggagagaatcccccccaccccccgcctttggcttgcttttgcggttccatcctagctagctcctcctatttttaatatctaaacaccagggcttcccagagtcattcttcccctccccatgtgctccaccaccagcttttctgaccacaccgtctgcaggtccatgtatttatcagtagactctccttcttcacacttaaggaatgtagtcctgtaactgtcaggttttcttcatagcccggttcttgtttctgattttctgatctttgatggaactgtgtccattttttctgttagattcctagagaaacaagcgaatacttatttctgacccgctttctccactgagtgtctttctgcttgcctcttgtcttttacctgccttagcagaaacccgtaaggcaccgacaatggtctctccattgcagttcccagcccccctcagctgactctgataaccaaagtccatgcactgagagctgggaagcactgtgctctttcaggtagccctgctcaaaagcctggtttgttgtttttcaagttttaataaactcactttaggaaactgcaaacaaatgcatgagccgagaaatgtctgggatgagtactgaggctccggcgtaacaagtgtgaccctccctgtccctcttcctccgtgttacttcaaagcagatcccagactatgagacgatccacccattaggaaggcattttagtggcgcagtggcctgcccacccgatgcctcccaggttgattatgctctgcccaccccatgtgtccaaggttgcttttccacctttactgaagaaattgcagcctcgtgagaggctccgactgtgctgaatgccagagacttagctccatgccctgacgctcacgccacacttctctctgtgaagaccactcctctggttctccatgacccactgtattaattcatcgggagtctgagagtctgccacgtgtcaggattgcagaatggttttgtgtgtgtgtgtgtgtggggggggtactgacgtcagtcttacaagtatcctgaggtagaccacatttcgactttcaacagactcacttgtgctagagtgggagccgttaggacacaggttgctgaaccccacctgcagagtttctgactcagtggaattggggggaagggttgagaatttacatttgcagtaagtgagggtgaggccaatactgctggtttagaacccttggtgtagacgcaaggtgcttctgccatctggtggacaaagaggttactgcaccaaggagggacgacatagaagttagcaagccagggactgtttctgtcacagtgtatgagtgtctgtatgtgtgacagtgagtgactgtgtgagtgtcttatacagagtatgagatatagttaccatctcgttgtatctgtccaaatattagctgatgcttctactctaaaacagatatccatgcgactggcattaaggatgaaccccagcaggagttcaggctcggtggaaactaatagaattgagacaacttttaacagacatgcagctggctgcagaatgggcaggttatgggctgataggtttatgggctgataggtataaactgttaagtgtttgacttccccatagggtttgtctcacaggcaaccttccttgattggcctgttgacttctaacaaagtgctaatacccagtgaattacctacctctttgagaggtgctcgcaactgcagtattgtttgatccagagaagtgaagtagaagttggtgagattttctggcttcccagactcttgatcaggcatattaactggctttctgttttggtgataaattctatgaccaaagcaacttacagaagaaagagtttatgttaaggttccagaggtttagagcccatagtgacagagacatcacacagcaggcatggcaaccgcagtgggagctgagagtggagagctcacatctggaacctcaggcaggaagcagagttgactggggatggtgtgtggcttttaaaacctccaagccctcccccagtgacacacttcctacagccagccccacctcccaaacctacccagacagccaccagctggagaacgagcattcagacacccaagactggggggaatatttcccactcaaaccctcacaaaatgtaggatggcagagccatctctcactgcccgccaatcctgcccaagacagctggtatgcccgcctctctgcgtgtgtctgtgtcacttggcctggctttgcctgcggttggcacgactgtccttgatttgtcgtttccttcagactgagagagaaagagggtgctatcaccacacctctttctggtggagaacaagtctcttatacagacaaggctagaacgtctactgtgtggattctttcattctggtgcccaggaatactgggctgcaacaaagaatggcaaacgctggctcccagccccagctcgcctgtaattccgttacacgtgaactccgttagcgcagagttctccttagcgtcacgtttggggctacctgcgtgggataaaatgccgagctcagatgtgagtttgaaccaatccggagtcaaggcacaataacaagcaatgctctaaatcacctcgaataattaatgagatttaggattaagtccaactacaacaaaattgaatttgcaactgagacttccctaattgtggtatttccaatcttctgaaaagacctaattcagtcatttaggagctaattatcaagaggattatctaaggctttacagtctctcatcccttcctgtaaggctggtaatatttgaagtcctcaggggttagcagattgtgggaaaaataagcggggccatgcaaggggctgcagccactggctacccgggcatcctagagatacaggagatggagggagtgggtagggcctagaggagaaagaggaaccactggttctttaagtcagctcagattgtgttgggtactattaggacacatcagaacaaagtgtgccctgtggttcctctacctcttatttaccctctgccttcccctagaccccagacgtgcctgctttggtctgtcctacactttaaaaagtacttcacgggatggagagatggctcagcgcttaagagcactgactgctcttccagaggtcctgagttcaattcccaacaaccacatgatggctcacaaccatctgtaatgggatctgatgccctcttctggtgtgcctgaagatagctacagtgttctcagatacataaaataaataaatatatctttgagaaaaaaagtacttcacacattcctgattttattaatttgactcagctgaaatattagagatgtgtttgtacccgttaaaatttatgccgacatgggccaggtgtggtagtacagtcctttgatcccagcacttggaagtcagaggcaggcagattcctctaagttctaggtcagcctggtctacagggagttccaggacagccagggctacacagtgagatcctgtctgggggaaaaatatatgtgttctgatataacgtgcttaatggcttttcccagtatcttattggtttgctgtttttgcccccagatttgtcttgtgtgagctgcatgccgtatcttctagaactaaatgcttctcagaacaagctgactaccttcttcaatttcaaaccaccccaaaatctcaaggtatacttatcagtacactaatcacatccggtaagtggttgccaccgcacttgaacgatgtagagagagctaacggagagggcagatgcagactacgagtatgggtgtctctgcattggaacacagacaagtgtctgtatagccggccttgccaaaagatgctccagcaacataacctcgagagctttgctgaaaacttatgttcaaagagcagcttccttctgttttcttggacatatgtcttgtcccgtcccgtcccgtcccgtctcctctcctttcctctcctctcctctcctctcctctcctctcctctcctctcctcttttcttttcttttcttttcttttcttttctttttggattttcaagacagggtttctcggtgtagctctggttgtcctggaactcactctgtagaccaggctggcctcaaacttgtagaactctgcctgcctctgccttccaagtgactgagactaaaggtgttcaccaccactgcccacccattttactttcttaggttaaaaataggattttaattgattattatttctttggtttggagacgtaggtcttgttgtgcagttccagttggccttgaactccttcccttcctgcctcaggctcccggaagctgggagctcaggcatgagccaccacacacagcacctttgctctaagtagccatggctgttgtgtttcttttgttacagcagcataagtctatctgaaaaagtgataatgttttcctcttgcctatccaactttggctttttagtgaaacgatgcttttattacgagtcggctggctcggcccagatagtcatcacgttcagcagtgcaggctctctcagtctggctgcttttgttcccctcagtgtttgacggcagcctgcagcacggcacacgtgggaacagcagcatacagcaccctgtgctgttagagcccctgcaagccttgtgtaggctcccgtgtagcctgggaggtcagacctccatagagagcctttggcagcagttggcaccgcagcttccagtcaggcctggttagcagggtttctctcagcctttgacagtgactagtgctagaattccagggcatgtggtagctgactctggaccctaaagacttgacagggctctggaactcttcagtgacagtggccagctgtttccattctctggctcttccagccttccagtctctgtcggcttcagcctctgttccctgtctcccctagtttctttggtcaccctattcctgctctgaccattctctcagccggccatgctgcctcttcttcagcgatcaagcagcctgatgcccacatgactgccaccttttgtcacttggctcgttagctgtacagcaattgctgccattgctttgatgcttcttctaatattgctgctccctgtctctgttgctgcgttcttcacgtccctggctcacccccagcaaagactttgttgggcctgtcgctgtatgtaaccagtggagccagcacaggagccagcttgctcctggaacctgaacaactggctcttagagccagagaaggagtgttggaccaatcacagctcaccttgcatgcaaatgaagggttgtgtttgcaccagtgaacagccttcctacttccccaccagttagagcagtctcccagctaggccatcagggaagtgagcctcctctaacctaggtggagatgatggcaaggccatccagagttgtgacgacaaaaacaaacaaacaaaacaaaaaggtatggtgtaaaagcgaagcagccctggctgaagctgtgccttttgtaaggcttctaagggttgctcaaaatggctggtgctggcataaggataggctgactggctggctgcctaacgtttcttctgtcaaggtggccgggcatcacaagagagtctgacagctgtcagttagggggccagattgtcctatcccctacctcttaccttgctacagaaaaacatccaccagaaggaatgcttataagaagaattttatgaacttacgatccacacacctgtgattttaaatagagcgtaacagagcttaccacctgagctgtgccccagagagaggcgggggcctcctcctcaccacctccatgtttgtctcctgtacttgtttttgagcttggtctttgaaggcaggagtgaatcatgtatggatagtggtttgggaaagagttagctatgtgtggagagccatttctcctgctcccaggggtgcccaggtcacctgcggttctaactgggcagtttggtgggagctgtgtctaagtttaagcttcctggtccagctggctgtcatggcgactgcagcatgcatgggccatgctgtgagaggtcacagggtgctggtttctaggcctctaggcctttcaccactgggatcacttgggggaacttagatcccattgccagaatatctgatttaggaagctcaaggaaaggcatggatggggttttggacttgataaatagcccccagatgagcccaatattctaaccaattggagaaccattgtccaagaacatgggctaagcttccttctgttagtctcaaatatttaacaaaaacattattttaaggaatgaacggacaactcttaccttttattttagatttattttgtttctaaacctagttaacttagatccaaagtcttctaacttaggcctggaccaaaatgaaagtctatttagaatcaagaatttggcattctccatactgacgtcaaaacactgtggtcttttctgtagtttccagtcattctgtcattgtgctttgatcaacacacacgcacactcacacacacatgcacacacagacagacagacagacacacacacacacacattgacagagagagacagagacagacacacagagacagatagacacagacacacaaacacacagtcacacacacagaggcagacacaaacacagacacacacacacatacagagacagacacacacatagacacagagacacacagactctctgtctccctctgtgtgtgtgtgtgtgtgtgtgtgtgtggtgtgtgtgtgtcccgtcccctcctgggcaatattcctttgtccagagaggccgcctcagatgcctgtctgtactcagcaggggctctgagcatatcgggagcagcatttgcagagttaaacagctcagtctcctcagctgccctttttgctttgcatcccagggaagtaggtcacaggagaagcctgaccctcccctcagatgttattctaggagtttcttctcaccccaaccccctctccagaagaccttgcaagtcaaccaaacaaaccacatgttccaccttcaggggtctcacttcttggggaatttatatccagtctcccagagaagtacttgctgtgtcccagacagcctccaatgaggtccgtccaatgctagggcgcctgcgcagtcccatgctaaggctttctgctgacttcaatacactgtcttatttaatccaacaaagctgcgagcctgcggatactggcctatctgtggatgacatcaccaaagcacacaatggttgagagttttgcttcagctgcggagggagacggaagggccaccaagagtccagggtccaccgttttctagaaaacaagctgaaatagaacaactccctcacacacttgagaagactggcttctttcccctgtaatactggcaaagcttgttccatcaacaagagaaagcatgcatttcctttgtaaggggcagaactttgtacttacatgtttgtgtgacttgaaacattttgatctcagggccgaagagctggcacagtggttaaaataaataacttttcatatatttgatctcagtagatgaaactgttcatttgatttggtgggtgtcttatatgaactgtaggtttcaatgggaatcataggaaaaaaaaataacctttttaaattgctcaaaaacctaatatcacagatacatagaagacatggtgctgacatacagccttgactcaggcatgtgtgcatgctgtgttatggcgtaagaatggaaacacctgttgtatataaggctttacttccagtcgatcgctattacataaaagcaaagagggtgaatgttgaactctgtttctgccatgccatcttggctgatgtcataccatgcctttcccatacccccacctccccacccgatgtgtgcaggccgaagtttccatttggattcatgtcgccaaaactgctgatgtcacactctcctccttccggtgctgtgcagcactggctctctgacggtgtagtcctcccttcccattagagctgtaactgtcccggccagtggtctatccttgcctcacagggctttctaggatttagtccacgaaaccataatcttagtttgggggaagtgcactcactgatttaaagcgcacaagaggggccgtgtttattcagtatctgcctgatgaccttccagaaggagattgtagcatcctcatggagtgttcaatatattgtttcaaaattcttgagttttcttgctattttttaaagtttttttttttttctagtaaatgaaattaggcaaggctatttatttaattggttagtttgtttctagtctcattctagactagggtcaatggatgttgctgacaaatgcctgtctaaacgactcattttaagaaaggatattaagcagaagcccgagggctcataaggactgctgccccgacagtcaggggtggcatgtgacagtgtctggcagacagaagaagaagatgcgcgtgcacagatgggaagtgaatgtggtctgctgggtattagagaaaactggggacatggtgctatgggtgaagctgaatcctgaaggaagagaccaaggaagcttgaagtacagctgagaaggaaagagtgagcggggcacggcggctcacgcctttaatcccagcactggaggcagaggcaggcagatctctgagttcgaggccagcctggtctattggtgagtgagaccctggaggccacaggagggagggagagggaggatcagatttcggatcaatcctccgggccatgaagaagactttcctccccagttccttctcaagatggtgacagttagggtccaggttagaaaagacagaggaaaaaacaaacaaaccaacaacacaagacagagagggggttgctgggtttgactctagtgcacctgcaggagtcgattctaagcctgtgtccagaagcctgtgttctcttctgctcttaaacaccgtagtgagcctgacgggagacaacatgtaaccttctttctctttttgtcaccagaaggtggatttttcctccaacctgatttccgagatgtatgacctgtcagcgtaccatactctcactcaactaattttggacagtatcctttgaatgtgggaaggggagacgatggtgagtggccccactgaagaggctgtcacaaacgacatggaaaggcaccagagaagtgattcccggaagagtgtgactcatgtaactaagaataggcagtcatagaacaaagattgctcttgattcttgaactaaaacaaagttctgtctaaggaacgtgtttcttcagccttacttaagcctttgtcttattttacacaaattcagagtctgaaaacttagatttatcatcaggaaaattagtagttattctacagaggaattcatacttctgcttttaaataaagcaaggtgtcttagtattttacctgtctatctgtctgtctgtctgtctgtctgtctctctatctacctacctacctacctttcctactggggacatgcttggttaagtgctctactacagacctatacctccagccctttgagtatatttaaaacatgtttaactcaaaacagaagaaaagtccagtttttgatgtgcaggttccttcaggaaggatcatgcatgcatgcattgcacgagtcaggctcccatgcaaacagaatgccaacttcagcttgtgtcacctaaagagttaactgaagatctgtgagtctaatgagcttgagtcttctttacaccagggactgatgctctctgggtaataagagagcaacgccttctgttgctcagcaagtatcctcctctccacttgagaattgtgggggtgggggtggggcagaatggaggctgagttgattacccctgagtgtctcattccagggatgaggcagcagcctgtttgtgtaagtctgagacttcaggagtggagattttggagatgtattttgtagagaaaggctttctcccaggtggagtgctagaacacagccacactcccttttgaactgtaatacagatgtcaataatcagggagtgagcagttaggtggtgctcatgatcagcccaatggagacaccagataggaatttaaacaaaatgtttccatggcaaatcagacacacacacacacacacacacacacacacacacacacacacacacatcttcctgtggaaccctgacttcatgcttgaccatcttgtgtactgagtgttcagagaaggggaactcaggagccacctggcccagaaattcactcatctctggtccacagggaccagcatagcatagcttggaactgtctagaaatccagatccttggcctctgcccaaggcctctttgaaccaagtatctagacagtgtgagtacacgtgaaagctaagaagctgactgtaccctcgagccttgcctgtcagaagaggctcagcactcagaggcccttcccaggcctcagggtacccagagagcagcgtagagtccggcatggacaatggtcgctccggaaccatagcttccgtgtgcagcccagaattgccaaagaaaacaactctcacactgtagacgcaaaacatttctaccacgagggttttaatttttaaaataaatttagctttccatgtgcaaaagtaaaacattagcactctgtacatgtcgaataatatagtgacgtcataaagaaagaagccagctttccttttttagtgctgacattcggcatagcagtccggtctcaccattgacaaacaaagagaagtaattgttaagtcaagatgaatggaaatccagaacataggcagatagagtgtatcatgtttgcaaaccatgtatgaaaaactacagggacaaatagccaaaaaaactaaagcaaaccaaaccaaaccaaaaaaacccactcttcttgagccgttacacaaatatttaatattaaaaattctataaattccataaatatatatatatttttgcttttcctgtgaagaaactcaagtgatctgaaaattttaatgaaatctatcactcttttaattttttattacattctgtaacttattttgtgtacatgcatgtttgtgggtgcacacagcacagtgtctgtctggaggtcggaggacaacttttgggagttctctctctccaccatgtgggtctcaggaacccaactcaagtcatcaaacatggtgacaggtgcctttaggcatctttgcagctcccaaatctagtgtcttttcccaacccaacccaggaaactagaaatacggggttctctctgtgtgcgtgctctctctgtgtgtgctctctgcaaaggtagtcgaagcacactcatctaaaaatggcagctgctgggaagcacacagagcaagagaacccctttgtaacgtgcctgtgcttcttgaaactagctcatcctctcggagaagacagctgtgagttttcttacgaaggtgagtatctgcactcactaggacctggcgctgccgactagtgccaagttgatcatgagtgtgcctggtggaggcttgcggaagagcgcttgctcactgtggtgttggctgtaatagcaagaatgcagacacaccgagtgcccatcaggaagggacgctgtccatcaatcatgctactgtcaggtaatagcgaatgttacagcgttggcggcgacggagcaggggcaccagcgggctgcagcagagaggggtatttaagaactctttctgaccttactttacttttgtgtttgtgaatattctgcctgcgtgtatgtaggtgcacggtgtgcgtgtatggtgcctgtggaggtcagaagagggtggcttgccccctggaattagagtaacagatgtttgttggccttcatgtggtgcctgggtcctctgcaagagcaacaagttctctatcccagagatgaattttaataaaagtaaatacaatctaagtacaaagtggaaaaagacaactcaggatagtaagcgatttgttttgttttgtgttgttttttttgggtttttgttttgttttgttttgttagattatttcatgtaagtgagtacactgttgctgtcttcaggcactccagaagagggcgtcagatcccattaaagatggttgtaagccaccatgtggttgttgggaattgaactcaggacctctggaagagtagtcagtgctcttaactgttgagccatctctccagcccctatagtaagcatttttgagaggaatatacatagatcaaacaggagagatgtgtggtatgggtgtgtgtgtgtgtatgtgtgcatgtatgcacgtgtgcacatgtgcgctttaggacaggttcacggtcttgtatatgctaggctacgttctacaacagagccaaaatcccagcccccttatatttttaaacgtaaaaataagcttaacagtccattttatctaagaattaaaagctgggtttctttttatttgtgtgtgcgtgagcatggatgtgtgtgtatgccttcctttctgtttgtgcatcacatgtgtgcagtgtccacagaggttagaagaggataccctggaactggagttataagctgcccaatgtgggtgctgggactcaggtcctgggcaagaacagtacatatccataaccatgagccccctctccagccccaaaccctggaaagtcttaattgagtcatttgaaaataatataaaccaattatgcttgtaatgtaaagtgattatggtagtttgtgttaatatcttgaactacattgttaactacaaggtgtcaaattttcagtttatcattattagattattttgtccttccctgtgtagataattgataattaattgacgagcatcctaaattacaagatgagaaaccaagtcaaggtaaatgtacttattatcaagtagagatgtagtttattctttaccttaccaagtcttgactggttgttgaaagttaaaaacaggatttgtagaatttaaaatctggacaggattttcgaggtcacccagactaatcattattttatgtattttatggaaaaggagccagagacccagggagggcaacacctttctggagctacctggtaagcagccgatgagagcgtttgctcttctgaagcctcttagtttgctcactttgcagtgcgctgagcacttacgacttttctaatgctaccatctaagtgatgtgcacatgtccttcctcctcgagatttactctggtggcaagaaccatttttcactggtaaggtgacagagagctctcaggattggttgtgattaaagccgtcaccacaggtctctccactaagagaatggtgatggatttcggcatttttttttcttagtaactgttttctgtgcacccaaaccatattttatgattgtagacaaatgaataagagcaaatgctgagctagtgaataattcatgtcaagcgtttatgaactactgacagcattgccgaaatgtaaaaatatattgttgggtttcctagacctcagccgtggctatgcttaaacgccacagggctccttcacttggtttccagaacaatctaaaattccactgaaaatgatttattcacaagaatggcaaaacttcagaactggaaagcaaccgtgatgagtttgagttcttggagtgtttctcctgatagccctcttttaatattataatgcacctaagaggattgatccagtaagctaattcatcggaatagtttagtgacttatcagattgtacttcttcttatcaacaactcccaagacctcagaaagaacatgaaagattatgctaggaagaagggcaagaaaggaagaagatgggagatgtgaaggagtggctagcggggaactcagagctcagcacaacccagtcacgtgtactgattggaatcaccacacgcagtgacacttaatgtgactgttggaataagtagggggaagaagcaggtgacagtgtggccattcctggggagtgtgttccaggactcctcagatgcccaggccacagatgctcaaatccttgtgtataatgagttagatgctgtctcaaacatcattatgccatattgctagggaataatgacaagggaagagtctgcatgcttcgatgcagttgtatggttttcgcatcaagttttccattatgtagtagattgaatgaaaggctgtggaatccatgcagatgcagggccagcatatcctttacttgcgaacctaacctagggtgcctggacgtccttctgtgtcaaggggagtgaaacatgggaggtgggaggcaatggtaggatgtgagcactgatctcaacaggagtgcttgttagatctcttactctgtaaaacaccttgagcattgagtggaacctgctggagcctgggctgtggttgcagtaaggtgccctcatttcacctcctttctggaggtcccaggggagctgaggctgcgtctggggtctcagaaacaagcttcaaatccctggcatcactgtcactgctaggattcctgtctttgagctccccgcccttgcctgcccattgcatccagttactctgctgggctttggagcatcctcctctcggtgggaacaaagcttccaggacacgagtgttctgaaacaggcttagacactccgttctccctgatgctgagcagatggctatttgaagtttccatggcttaatttttgttgccaacgattgctcgctgcaaagatatttcatacacagctgtgggagataatttaatctcttatttcctatatttcatgttcatctttcatgagagtccatattcacaaagagctggcctttattctatttccaaaaaatcattgtttagccagcccaaagaaaatgggatctgagagatagtgtttgtgagtatctgtttgcatggtggttttggcagagaccttgctcataggagatttgagatggcacattggacactgcaaaaactgtttctgcccatgggtgagatctggaaccaataagggagacctaaaaatttctgctacgtttggtatcatgtctttgtccagctttcttgtttatttctttccctaatacaggtcttttttggattagattctagccttgagttatccatttccatgctaagagttagaggacggccgcatgtgattgtaatttagtgatgatatgagtgccttctgattgggagaatagctcattcacacccttttaaaaacaactaaaattgttctttgacagcctgcatgtatacagtgcgtcctggctgtttctatccccacccactctcatctccaccctacccctgtcttacttaccagaccgctttccttcactcatgtattttcattctgttttgtaactcactgaatttaacaagggctgtctgtgtggtcatggatttaaaactatccattggagcccggtggctcatcagtgagtacataactcagctttggagctgcagttttttgggcacaagataaacttaaaatgtgatcggcgagaacagaaaccacaaatgatgttagccttccagctttctctatatgaatgagagaagagaagccaatacgaattggaaggactgctcccttctatgagagggtggtggccttactacttgctccagaggacacctacaaggtgataaagccccattcccattgcctcagcaggatgagcgtgtcttccaaatccctgtctgagaggagccccatggtttctcgtggacatcgttaactaacagagggcagcatgcacagcccaggaggcagctctgaactgctgtttcctcccatagtttaaatgagtcacatagagacgcacgcgctattcctttatcattctatggaattggtattttatctatatgaaaaacatatcaagatttggggcttatcctgtgtggggtacataacattcccttatttaaactcttgtctgatttttctagtgattatttaaccctgatttagtgtgtgtgtgtgtgtgtgtgtgtgtgtgtgtgtgtgttttccaaggtgcttgtgtgaatgtcaaaggaccacttttaggaattggttctctccttccattatatgggacctagagattgaactccggctactcatgtttttacctgctcagccaacaccctggcccaaactgtgtgtgtgtgtgtttgtgtgtgtgtcatctttccaaaaactttgaataacattttccttaaacatagtcatcacgtacagacaacgagatagaagaaatcactgggctagagaactgcatcagcctgacccaccttagtctggctggcaacaagatcactaccatcaaaggcttagggacattacccatcaaagtgctttctttggtgagtccaacatgacatcattctttgtagaagtggtgaatattgtttaagaagtgtttgaattgtgactgcttagaatttttctttgctccttatggtgtctggtatgcatgcatgttctgccccccaccctttttcctccctccctcctcctacccccaccccttctccttctcttgtttcatctgtctgtgtgtttcatcaatagtccatgttcaagtaaagccagttccatatttggtatccagggtaaaaaaaaatttagacagttgattttctatgctgtgaaagaaggtatatttttacaagtagtttttaatatatatttcattggtaaaaataacatctgtgctagagagcatgtttattgctgctcagcctttactggacataaatggaccacgaaatgcttcctagccactgaactcaggcagcccatcatacacaaatgtgtgctagtctcctgctctaggagttgtaatttgtgctgagaataaaaacgtagttcctgtcagaaagattccatctgattaccgtttcccaaagaaagtggctttttcagccctatggcatgccccaagaccaaaactcaaatgcaaatggagactgttcaccaataagattcaaagatacacatgatagttataaattaacgatccgggttactagtatctgagagagggtgctgatgttgtttatatacatatttttctttctttcttttctcctccctcttagccttaggttctcttggcctttattatacccaccagagggtaggcaggaagcatttcatcatggcgtgcatcttagtaatgttatgtctctctcacaggagagtgtttaacatgaattaatgaattgggttatgtgtacatttttttaaaatttaaaattatttttttattttttacgtatgagtgttttgcctgcatgaatatctgtgtactgctttcatgcctagtgccatgggagcaagaagaggatgtagaatcccctgaaactggggttacagacagttgtgagctaccatagttgtgagctgggaattaaacctggaaaagtggctagtgctcttaactgctgagccatctctccagcctcttgcgcacattgtttacatacacgtagaaattctttacttaaccatagatcactgatgcttggttcctcttaaagctcaaaatgctatctaaagactcctctagccctccataaaatttagtgagggcagagggcaggcattctcctaccatatatacagaggtttcatagctcacctgagattttatgttttctgcctgctaagacatgctagcaaaatgtcagtgaaggagaatctaataaattagatataaaactttcagttataaaataaagtcaatcacattggaaaatttcaactatctaaagagtagttgttagtatattgctattttgctcaccattttgaaatttctcagaaatttatcttctctcccctctccccttnnnnnnnnnnnnnnnnnnnnnnnnnnnnnnnnnnnnnnnnnnnnnnnnnnnnnnnnnnnnnnnnnnnnnnnntctcccctctcccctctcccctctcccctctcctctctctcgttatattttaccatattggttggaacttgctatgaggaccaggctggccttgaacttgtgatgatctttttgcctctgccacctgattgcacttgattgcagctgtgagcctccactgcagacttttccatgtgtctcgtctgtattgacagtcccatcgacctgcagtagagtggaaagacatgagtgttacgggggtgggggacagttattattaaaacagtgcattccttttttcctgctcttcaataaccacacgcctgccactgacactatcactttttaccatttttgttttctgccaacaaatgagatagattgctctagtccctgcacccagcacccaggatagactagaaaacacagaaaatgctcttacttattttcactgagattctgagaattgaaaaattgtttttcccaaatttgaataaaatttataacctaaaatgatatacgtttgcttcaggagtttttcttgactttatttttaactcatggaatcacaacataatgtgctttagcgattggcaaggaatttagtttgcagcatagcaagaagagcagttcacctacaaacacttgcccttctacctctctgggacctgtaaaagctggcaggggaacctcacagcgtgccagtggccactacatccttattagaacacagaacatagtgacactgtactgcaaacttcactctgtcaaagtaaaagccagttgggtcttcctgacacactggtaaatggggaatattttctaatttaatttacttcaaacaaaacagcttctctctaacaatggtggttttttttctttctttcttttttcttttcttttttctgctattcacttgtgaggctggaagcactgcgcagaaacttcatgtccacacccaggagtgagcctttgggttctcagtgctagacaaaggcacttcctagctggttttcaaccagctattctgtgcttctcaacttgtctcagtctcttcccttttatgaccacagactatctaattaaacttttctgtgcctcactctgctcagaccatctaccactttgaaagccatcagagacactgaagaatattacatctgtcttgcacatagaaaacgcttcagagtcctttgggggaaagtgtattgtatatagattggatatgcgggcagtatttgaatgggaggctgagccctcatttcaatacattaaattgatgatggtgagctcagcgtggtcactctcctcttttcactttttataacttttttgaactttaaacaggaaaatttgatttcactttggcaaataaggttatgggtttttttttctttttattacatttttccagcatatagaggtaaaaagaatagtataataaaccctcgtaggctataacctacctttaaagattattaacattctattatgatattttaagggctatagagttaccagtgagcacaaatctggctcattattaaaatgaaattttatgaagaataggctgaaaatgagctcttgctattcaatgtgccatggaacatttaccagtgaaaatattcagattaaagggaatacattaatttaatttttcagttcttaagtcaatcttgaaagtattgaatggtttttgtttgtttcattctgtttttgtttttgttttttgaggcagggtctctctatgtagtcctggatattctggaacttgctatgtagaccaggctggccttgaacttaaagagatccccatgcccctgtgtcacctcactcagccagaaagtttagaatgttttaaggctaggtaagacataatgttagccgaaaaattgacattatgaacttaagagatccacctgcctctgcatcaccacatcaggcccgagggttttgaatgttttaaaagggtaggtaaaacataatactaaccaaaaatttgaaattattctttatgacaactttggactcaaaccagaggttaaattttactatgacattttcctgttccttaaaacaaaggagccaagtaatgaagagtatgttggaaatattcaaaaatggaaattattcttattactgctattgccctgggtgtgtggagactgaggaagtggacagccgtttgggtacgggaaacttcctcctattctcattgccggagaaatgctcatctgtgaattattgaatctgctgtgatgactacattctcacccaatttagtctcggtgttttcccatactggcattcttacatggtgtccaagctgctcagacctgaaagcagaagtgacttggttatatcttagaattaggactacacagttctgtcatacacctttggttaagggaggtcattataggctagtgcaggttaaagaggaggcactatgcaagcgcagaaatagccagactctaccgagtcagccatcaccaccgactttgagatgatgtcactttagactgtgtctgtggacaaggtgtctgtgagttacagtattggtttactgtgatgatgctaaaagagtgtgcagatccatgtcgtgtctttagagaccacagtcaagctgaactgatgttcgggtttcaggtgtgtgtctgagtttctttcctagtggcactgataaacagcttcgacaaagcaactgaagagtgtttcctcagctcacagttctgggtcacagcccatcatagcagggattgaggaaacatgtctaatgggattcacagaattcacagaagcagagagcaatgaattggtgcctgtatgtgagtacttagctccttctctaggatcctctgcctagggaatgctggtgcccacagtggatgcggcttccacttcaatcaacataatctatataatccatctcagacatgcccacaggcaacccatctcaccaatcttttcttttttttttttaaattttttattaggtatttagctcatttacatttccaatgctataccaaaagtcccccatacccactcacccnnnnnnnnnnnnnnnnnnnnttgggctaatatccacttatcagtgagtacatattgtgtgagttcctttgtgaatgtgttacctcactcaggatgatgccctccaggtccatccatttggctaggaatttcataaattcattctttttaatagctgagtagtactccattgtgtagatgtaccacattttctgtatccattcctctgttgaggggcatctgggttctttccagcttctggctattataaataaggctgctatgaacatagtggagcatgtgtccttcttaccagttggggcatcttctggatatatgcccaggagaggtattgctggatcctccggtagtactatgtccaattttctgaggaaccaccagactgatttccagagtggttgtacaagcctgcactcccaccaacaatggaggagtgttcctctttctccacatccacgccagcatctgctgtcacctgaatttttgatcttagccattctgactggtgtgaggtggaatctcagggttgttttgatttgcatttccctgatgattaaggattgagattcccttcccaagcactatgtttgtagtaaaaattaatggaaaaaggagtctatgaacttgaaaaaaaagcaaagaggagcatatgggaaggtttgggggaaagaaaggaaagggaaatgatatgataatcttaaaaataaatgaagtaatttgaaaagtcaaagcactaatatcattatatcatgcatttttaaagcttttatcagttagttgcctggctttcctactgacttaaaagtttatgctgatgatgaaaatattaagatactaaatgaaaatactaccttttggccttttagatagaaaatctaggattttcttcttgggtatctatgtagacaattagataggcgaatgatggaaatgggggtgaggcaagaacagcttattggtttggctttacttttagtgaattggggaccatgtccaaatgtgaacatttgccactacaagttttcttagccattgctttcaatgaaaaaaactgtattttatccattctagagtaacaacatgattgagaccatcacaggtctggaggagctgaaagccttgcagaacctggacctgtcccacaatcagatcagcagcctccagggcttggagaaccatgacctcctggaagtgattaacctggaggataacaaggttggtaatgtagggcgtgatttcaggaagcggactgcaggctgcagggcagggcgtggtttcaggggcttcaggaagttggcacattggagagttggcccaaagacttcacattgacttttgtttttttacgatttatctattttagatatgagtacactgtagttgtcagacacatcccattgaagagggcatcagatcccattacagatggttgccagccaccatgtggttgctgagaattgaactcaagacctctggaagagcagtcagtgctcttaacctctgagccgtctctctagccgttcacattggcttttcaaggacattacatgaaacggcctcttaggaatgctgctctagcaagtttccagggaatagttcttggagtatgacttttttaaaaactcaaccattttaaacccttgacgattcttacttacattgttttaaaggttcagactgtcatcgggtgtgtgtagttttctgaagttgttatgaccatgcagcattctctgtagaaaaggagcatcgggaacttttgaaatgtccaagcaagaagaggcaaagagaatatccacaggctaatgtctcctcttgtctacactcagaggaaaatgactgttggtggagaaggcttgtgaggggaggggtaccactaaaaagaatacagagcttcagttagcggcaaggcaaagggatgaagtcaaagatctattaataccactaaatggggttaactggattttcttttggtgatggtggtagtggttgtagagttgtggatattgagacaaggtctcaggtagtttaagccagccttaaacttgctatatagccaaagtcagctttgaaccattgatccttctgcttccacctccaaggtgctagaatttatagacaagagccaccagcactagttagcagtagtggtcttgagaagtgctgggaatgggtttttaatgttcttaccacaaagatgatacactttagaaaattagctatgtttagcccttacaaaatgtgcatatatttgaaagtatcatgctgtatctgttaaatatatacagttgtatctgtaatttaataagtgtaaacaccacaggaaaggcttaaccataaaaattaaaccagaaaaagaagagacatagaagtgattccttatatactgctggtagcaatagtgtctctttgatgggttggggaatgaacttgtttgcatatctggcttaatgtaccctttactattcaaaatatattcatattcttcccctccccctcccttccctcccacccttcttcaccctctctttctgttttggtggtattggggactgaccccagaactctttgatttctctaccactgagctgtatctcagattaatttacctagttgcttcctccctccctccctccctccctccctcnnnnnnnnnnnnnnnnnnnntgacacagaaggacgtccaggcaccttaggttaggttcgcaagtaaaggatatgctggccctgcatctgcatggattccacagcctttcattcaatctactacataatggaaaacttgatgcgaaaaccatacaactgcatcgaagcatgcagactcttcccttgtcattattccctagcaatatggcataatgatgtttgagacagcatctaactcattatacacaaggatttgagcatctgtggcctgggcatctgaggagtcctggaacacactccccaggaatggccacactgtcacccgtccctccctccctccttcccttcctccctccctccttttcttccttcttccttctttctttccattcttctttccttgcacagtgctgggccttgcacaggtgcccacgagcccatgattgagttgtgttcccagcaacttaacctttcccctagcaagctcatatcattccttaggctgtaaacaacccaacacaagtcagttattaaggtctgagaataaacagttttcatattgatcttcatctcacttgctctgtttactgagtagatctagtgacttcttacaaggtaattaattctattaatgaccttggcccttgcatctgtgtggtaggaagtcagtacaattcctgttccaaatggccttcattgttctttttctgaagttgcctttgaagattgactggggaaacattttgtgcttaaaatggttttcatatttatatgggggatgctgagaaggtagaatatgctcattaaatactaactcagtacatctcagatttcaagagaagaaacagcaaggcgtataaaacagttacagtagatgagaatcaagggcccttccctccaaaatgggtgtggggtaatacttgagaacatgaggcctgaatgtgagccataggtgtaaagtaaagtgcctcgaattgataatagaaaaaagaaacaggaaatgctaactttagtagtacacattattaaacttggtataactatcttaaggttttactgctgtgagcagacaccatgaccaaggcaagtcttataaggacaatatttaactggggctggattgcaggttcagaggttcagcccattatcatcaaggtaggagcatgacagcatccaggcagtcatggtgcaggaggagctgcaagttctacatcttcatctgaaggctgctatcggaatactcacttccaggcagctaaaataagggtattaaagcccacacccactgtggcacacctactcacaacaaggtcacacctccaaacagtgccactccctgggccaagcatatacaaaccatcacaatatctgaaatttaactttagcacataagctataaacgaaattatattagagttatcttgtctcccattgttttgtactggccttttgacatgagtcaaacatgttatagtttggagtgcatctcccttcatttagccagaacacagggtttaccactttcttgcttttaagtcaccttctaaactacattggaaaagttggggggaggggggaagatatgttcaaatgaaggagttcacaaatgttagtgactctattttgtaaaaagtggccacatgcctttcagaggactcctctggcaaatcagtcattgatggtaacggtcccccaccggcatgctagggagtgcaacagtcctttgaaatgtcatttggaccatctgaagagccctaaggggtttctccgggatagctgataattctttgattcagggatggaaaatgtatttgtacagggaacacaacataggtatgctgcttcctccatgattaaatttgatgttagaaatactgtgttcttggtagcagtttcatccgtggtacacctgtgcatatgcatgtgcctgactgcccttaccagcgtctcctgtctgctgattagggaggcctctgccagcttcctctctgaggtccctgtgacatcccagaccgtggctagcacttaaaaactgacccagactctcagttctccaacctccctacttcctcccagaagcactattcttgtcaggggttactctgaatcttggtgcttggtggtggggctaggggtaggtgctgttgtttttcgagacagggtttgtctatgtagccctgactattctggaatttactttgtagaccaagctggcctcagactcatagatccctgcctctgggattaaaggcgtgcaccactctgtctggctcatacctcagaatgtattatcagtacttcttgccagtgattgtaaggagtagcaatataatgcttgtaaaatgacaggtgcaaagaaagaatttcagtcctaagtaagccctggacactctcctgtgatatggacggaggtggcaacagctaagcattgcttctgtaacgctttagatggggcatggtcagatgcgaaggatttcatgcttgccactgttgagcaatatgctcttttcaatggctcaggcaagcagtgaaaggatcttcccctggagcctggcttcatacttttgttcatgtgtatgagcaaaaagaattcgtggggagctgactgactgctgagtgcacttgacctctctctctctctctctctctctctctctctctctctctctctctctctctctctctctctgagtttacatttattaggcttgaggaatggctgggtacatgatctggggggcggggggggggtcctgggttattgcagaggctaaccctgaagcagaggcagcccaaggttgggctattagagatgctgtcatggtcacatcactgttacagtcagtctctcttctactcctgccattggggatgagcaagggggaggccagcccaggctaggtagcctgagctgctatccagtcctagaaatagtggcagtatcccgggttctctgctgagtgccgataggtgttcccttgcagccctgttcctaagctgcttcgttggctcatcagtactttttgagatttcaggtcaagaccaatgtgactttccctttagtcatgactcttacttaatgtggactccatagcagcaagcttggcctgcctgcacttaaaccagttcataggtttggagtgagcctgctaaagaagtcaaggacttgactaagatcattagtccatcggagtaggacagaagatgtgttagggtcaggtctacactacttagggagggggaccagttcacttcgggctaagcatgggccacatgctctttggttagggattagagggcagaagtgccatcattttcctcctgtctgcctcacagactccatgtctagcctctccagcacctcctcctgtgttcccggtcctccgcagggcttttcattgttattattgctgaagattacatcatatcacgttttatactttatatcgtgatgagttattttccttccctctagaatagtgtttttcaacttgtggatcgcaacctctttgggggtcaaatgaccctttcacaggggtggcctcgggccatcagaaagcatatatatttacattattattcatgacagtagcaaagttaccattctagagtagcaacgaaagtaatgttatgtttggggtccacccaacatgaggaactgcagtaaagggtagcagtgttcaggagcacgagaaccactgtgctagcgtgatagttgaccttggggagtttattttgttcaaattttacaatatctggtttgtagttggtacttaagaaggttgttggatgaaaatatgactctcaggagccctcagcccctctcctctgaagggtgtgggtgatgtttaaggtgcggtaaaattctaggaagaccatgtataagaaggaggctcagaagtttccctactgggcgaagaaagagcatgaagatcagtatacctgttttaatggagactgtgagggtcttccgtacggcagaggcggtgaagaaggaggaagatcccagagagccatctgagaaggaaatagtgaggcagaatagaggtagtggatgaggagaagatgttgcgaatgattgaagactatgtcaggtgacttcaatagtggtgctaaccagcatggtggtggggcaggatgtccctaaatgttttagcagcaggatccactccagggtagctgctgtgtagggagctgcacgacgccctctctctcaggtaaatgtggttgtggagcaacttcccctggaaggtaatgcttcaaggtagattgggttcaactgtgacatcccccaccaaggatgtgcccaagccccttggcctgctgaacgtaacctgggttagaaaagggatttctacagatgaggttagtgattccaagatgagattgtcaccccggaatcaagagttagggaggcctaaaagacagtggtttttttgtttgtttgtttttcagttatcagtttattttatgtctgtgggtacatgtatgtctgtgtacatgtatgagttgtgatggtttcaagtctccatgtagctgggaatggaacttagttcctcctaactgatgacccatctctcaggcctgggtgttcttacaagagacagaagggagaaagcagacacaggcactggctttatgttgctctaagtcagtgctctctatctttaccagaagctgggaaagacaaggaagagttctcctctagagccctcgaaggaacctcaggctctccagccagccctggattgtaggctcatcttcagagccagaagaattggttcctgttagcttggcctataagttttggggttgttatggaccctccaaggctcgtgtatgtgtggcgctatgtctggggaatggaggggagtttgggagttatatttaactgtgatctcttatcatttctgaattttgtgttttaataaatcttccttattttgatttttaaaatattcttacgttttttttttttgtaatttcaagttttggaatttttctttttcactatgtagtttgtaagtagggtgtgtgtgtgtgtgtgtgtgtgtgtgcgtgcagtgtgcaacagacattgaattcccatatagaaaacaaattgtcccaacatttcaaaaagctgatttaatagcataagataatctattaatggatctgtcaggatttattgaattatttacttattgaaatttgttgtgtttacaacttgctgttaaaataatgttgaagtatatatgctcacacataaatccatcgttacatgcattttttattatttccttatgatggatttctggaaatgccatttctgggaatggctgtcataaaacttgttgatttctgttttgaacattcatgctttctcttcccactgcagttatgaagttaggataacttactgtaggcatgtctggctgttcgtttgtcaacaggatcatttaaaaattgtctgtctggtggtgaaacctggtgccttgtatactgttttatatatatttctttgattatcaatgaggttaaacattttttaaaattttatttctttttaaaaattatcagccaggcgtggtggtgcacacctttaatctcagcacttgggagtcagaggcaggcggatttctgagttcgaggccagcctggtctacagagtaagttccaggacagccagggctacacagagaaaccctgttttgaaaaaccaaaaaaaaaaaaaaaaaaaaaaatcagtccattctcttagccatcattttctttatgacagttgtaatttgcttcttattgaatgtaaggtatttcagctacacatttaaaatgatgtgtagaataagtcgacactttctgtaatagacttctttattatttttatcttcttgtgaaatctttttccgttctggatctgacacgtgcttatctaaaccgttttcctctgcgtcactttggcctttacttcttttttattttttctctactgtttcttttttgagcaaaacaattttaagagtaggagactttcatatctcactctcctcttttttgtatttactcctttgtttagcatgtggataaacatgaatggatgtgcactatatgcaggcagtgtcactgagaccagaagagtcccaggtctcctgggactgtcatgtgggtgctgggaacagagtcctagtttcctggaggagcagccagtgctcttaatcccccttcctgtctccctgacccctccctccatggttgtttctgttcttttgttagatatgcttttgtttgttagttacagcactctggcctgacactcactgtgtagtccaagctggccacgaaaccacaaagatctgtccacctctgccttctgagggctgggattaaggtcacgtaacaccgcacgcagctatcttgaatccttaatctataatttagtttgtcttataactgaaatggttagtcctttacatcctaacacatcaaaatgtgtgtggcagcttgctgctactctagctagattgattttgggatgggcgacacttggaactttggagtttgcctttctgattacattattggaaatgtcatcctttgaaggtggcatgtgtgtgtccacccctgacttagttttgggataatttgcattttggtgtcacttgggtgtggacaactcagaaatgatctgtgaacccgttggtaaaatacttttatgaggcatgcagaatgctgtgagaaacactaatttattacaaaactcactctctgtgtctgaaattagattgtaattgtttattgtagaaaatttaagtaagcctatttgtgtctttagtatggtcgagggtgcaggaccgctgtaacccaggctgtccccctggctaaaccaaggcactgtccatctgcagaatcatttccgtttttttttttttttttttttttttccaacccggaagttcttaacatacaaccctggcattggcacacacctttagttacagcacttgggatgcagagccaggagtatctctgtgatttcaaggccagctaggccagctagggttgcatagggacctccaaataaacaaacaaacaaacaaatcatacagtttccactgtaaagtagttcttatgggaagagcatagagttgcatgtttcctagctgtcagaaggcctaaccaaccacagacacagcaggggaggagaggccctgaggagtgaagtcagagcctggagggctgggggggggggctgtttctcttcctttacacactatcttaccgaagttaatgtgctctttcctgtgttctgcaatggccttgtggtattctcattgaaaagctggatattcaacaggacatgtttaaaataaattacatttaaaggagctaattatattggctctttttatattgtgttgcttattgtcttctgctcactggctgttgacagtgaatttatttatttattaataatttatttattttgatcaaatagattaaggagctgagtgaaatagaatacattgaaaatcttcctatccttcgagttctcaatctactaaggaatccaattcaggtgagagattgtttttctcaggggtaggggaggggagaggaacaggggccaagtcttgaaattttgattgagcattgattgggagcatcaggaaggtgaatacagcccccaactccccacccctccaaaaacaattacaacagctaccacttcaaacaacttgttttgaaaaagtaagattgtctctcatggccaataaactgtcaactgccccagttcccctaaagcccacatttgaaaagtcacttagttcatggtcctttaagacagatggtggatggagctaaacattataacagagaattgtaattaaaattgtaaagcagcattcttttatatcggagaataaagagcccagaggtccagacagaatgtggttcctgttttataacagagggaaagcagatgaattcatttataaaccaacattctcacagcacactttgaagtatgcaagagaagctttaaaatgttccaactggtgtttaataatcatacaggtttctggggtgcagtgtggcggtccactcacacatagaacacggagtgatctagtcctgtgtctctgtgttgggaccctaatcgaatatgctgttacacatttacttctcatgcattcccatctgtgaaaggcatcttacacccaagtcttgctattcagggaggtgaagcatcttattcaaaataaacccctcagttacggctttaaagtcaggccatcctaacagcagtcagggaatacagaggaatctgttcctaagcaattgacattttattactgtaagacaagttcagagtgatcccaactaatacaaaagaacacaataaataatcaacccataatgaaatcataagaaaacgtcaaatgtcattattttcagtaatgaaactctttggctttagtagagaagggtttggagtcttagatgagctgcctatgtctgtgggctcagcctcgacaccagaggataatcctgccttcccgcttatctcacggagattagtgagatctgcacatttgaagagctttataaattacaggacacattctgtagcttggttgttaattgaagggggcctgacagacgtgagaatgcagagccctgtgttggggtctggaatgcagggtcatggtggcaagtgttgagaggctcctaaggatagaagaatggcacttgctgacctgggaaagaggaaggccattcaatagtcctcttgttttaaacagaccaagcccgagtactggttcttcgtgatatatatgctgctgcgactgacagagttagaccagcagaagattaaggtagaagaaaaggtatgtaaccatgttgcctcacgtgttttctggttgagacattcaaaagtgtcaggtgcttacagcaggacatgtaaccaatcagtgagaagcagagccgtatgcaaattaattcttcatttaggatcaacttccttgtcctaggatttgccagctgaaccctctgttaagctgggcaattacaggtgttccatgggtacaatgggaagtctggcagcgaggagtccaggaacccctcctgctgctcatggctggtttacaatatgtatagcttccctacataatcacagagtctgaaattctacctatgtcacattggaaattaacagtgaaatatattgcgccacactacggtgcttaaatcactgctctaatattgcagtttccttaatgcagctctttctgaggacccatcagatccacgtagctccagaggaatgagccacggcatgctggccagcacctgactccctccttccatcccttccacagctgtggcaggaatctaggaggggtttcctaaaccagatccaatttgagacaggaataaaggaacgtatatcagtgggcacatattccatcccatagatgtttctgcagcccagactagaaatagtccctagtgcttcctcatccttgtctccctgccctgggccatgggtacatacctcttttaacattttgtaaatagaatccgaatgaaggccactattaagtaaagggataatgtatgtaggagggcagtaaagacagagaggcctctacagcaaggaaagggcctgttgtatccatggctagagaaagccagggtaagggggtgcaagtctgggagaatgtgagggggtgggaacagttctggacaaggggacatcaggaaatggctctctggtgtcaactacccagaatcttatacagcaacttggttttccttcttcttgaactacaagttggattgtttattgtgttaaaattaatccggcacttcagaaattttgttttgacttttttttttagctcctcccaaaccagagaatataaagaaaaaggataaaagggactccttaactttgtacagtaactttcgttatcgggattttgggaaagttagagttgaccagagagactacgtgcaaggctggggaccacgtgacttaccttgtcagtttgattgtgtatctaggaattgctctaagggcagtcaatccttgttcttttgagaaacaatcatgtctctctttacttttctaattctggaaaaggtttttgcagtgaataagtatgaccctccccctgaggtggtcgctgtccaagatcacatgacccatgttgtcaacagcatgtcgcagccacagaggatctgggacaggtatttattagggccgcacagatagaagtggggggttgggaggagggtggggggagagcgggtaagtaaaagacagtattgtcattttccctaatcgtctcttctgtgactcacttggtccccgtggaagctgctttctcagggctggagagatagctcagcattttagagcactgggtgttcttccatgggacctgggttcaatcccagcacttacatgtcagttcataactgtctgcaactccagtcccaggcaatctgacattctctctcttctgttctccatgaacaccaggcgcacacatagtacccagatggcatgcaggcagagcacattaaataatacaattctttaaaaaagatttgcttgtttatttgagtacactgtagctgtcttcatgcataccagaagagggcatcagatcccattacagatggtcatgagccaccatgtggttgctgggaaatgaactcaggacctctggaagagcagtcaatgcttttaaccgctgagccatctctccagcccagttttaaagatttatttatttttatttatatgagtacactttagctgtctttagacacaccagaatggacattggattccattacagatggttgtgagccaccgtgtggttgctgggaatcaactcaggacctctgggagagcagccagtgctcttaaccgctgagccatctctccagcacatttttttccccaaagctctttattgtcctctcagaggtaagggaccaagtgttcaatcatggcctgttaccgtgtacttgaatgtgctgttcattcaccctttggtgacctaatggtgatctgattctttactctatcatgggcaccttgtgtctagctagcctgagccaaatgtcagtgaatttgaattctaaaataaaaagtgttaacttttctgccatagaatagaaacacagacctttatctcattaacagaatttattattattattattagatattttctttatttatatttcaaaagttatcccctttcctcatttcccctctgaaaccccccaatcccgttccccctccccctgctcactaacccacccactcctgcttccctgtcctggcattcccctacactggggcattgagccttcacaagaccaagggcctctctttccattgatgtcccacaaggccatcctctgctacatacgtggctggagccttgagtccctccttgtgtactttatggttggtggtttagtccctgggagctctaggggtactgattggtttatattgttattcctcctatggggctgcagaccccttcagctccttaggtcctttctctatagctcctccattggggaccctgtgcttagtctaatggatggctatgagcatccacctctgtattgccaggcactggcagagtctctcatcatttataaacacatttgttacctctcttgttttttgatgaagaacttgagactaaagtaaattcttctattagctgcttttatcacagccaaagaagtcactaatacagcaccatacacattcacgttgagcatgggtcatatttccctcagttaatcttctctggaccaatcctcaaagattcacctaaaggtgtgcctcactgatatcctaggcttgctttctcaatccaaacaggctgagcatcatagctaaccatcacaccatcaattgtaaacccttccttaaccgtgaacagatgttacatacccctgccagagagcatcctgtgaattcagacttctagggagtccctagaaggaagcccagctcacctcagactagtcccttccagagccaccgtcagcccggcagggaggagccaccttgcctggctgcgcacatgattcccgtctctcacctccagatccaaagacagatttaccacggtttctccatttctttttgaacagtctgccagagcagatggccatttatgccacaagtataacatagacgttctatcaatacccagaggcattttaaaaatacttgtaaaaactcttggatataagcacttttcttcttcatgtggtgttcgcttctgcgcctcacggtcggcttcccacagagagtagaatgttttatttcacaatccaggacatggatattacatataatgtaatcatgtcgacactgacaggtttgcatgtttatgagagccctctgggtgagatgacttattcttcctttgtgtacatcaggaaaagtgcatttgacttggaagaaggtctcctctctgatttgtaatgtggctatttgatatttaaggttgtatttatgtaagaacataagacagcagtgtttgggaagcttatatttcatggtcatgtctggctgccagacaaacaagggcagaggccacgcaggtccggatggcgaagtatagggcaccgttcacagctctgcatcaatggctgccgtgtagaccaaccattgcccttcctactatgccaggacacagcaggccctgcagctggagtagggtaccagccgctgctggcacctggccctgtcaattgtatgctgcattgttagagaatcagtgtcccctcacctgatgtcactggggtgaggatgcctgattaagatgaagacaaaccgtgagcagcctggtagtcactggcagctccttgctccgtagtatggccaacttcccagaatcatcttgtgcatgctttgtccctggcatgttctggcactaggcctttctttaagaggctttggctttgtttgggggctactttggatatagtgtatgctttcatttgtatttatcttttgaattgtctaacattgtttttgtgtggttgatttgattttgttgttttgttcatttgcctattttctatatttgtcactgtctggtttttttatttattttttcttgaaaatgtactttgagggagtcagtaatacccatgcaattgtggggactctgttcctttcccccatattctgcaatggtggttccctgtacaggtgttaaccaggtgcccaaactaggagactgacgggaggcctccgagtcctcaggtttctgcagcccctcaggcgctcctgtgtgttcagctccatcttggtgctatgcaggttcattaggtcagtcacctgagcaccactctcaagacttagcagtgtcacaagtgtcccctgggtgcctttagatagctggaactccctcccctcccgtcctcatctctcatctctgccatctatgggtcgattctcattgcattagacttattgtcacttcaagaagatgatgtgtgtggatcatacagagtaaccttcccaaactggcaccctctcgccctatgcaggataccttcctggaatttcgtccatgtggttgaattcttttttcattgctaagtagcattccagggtttgtcagcattaatttaaccactcacatgtgaaaggttatttgggctgacaccagttagggataatgacactgtgaatatcaatgagcaggtgtttgcacatgtcagtttgagcctgttgcttccagtgagtacctagggctgtttggagggttcctgacctcagatccgttagatgccacgcaccgcttccttgtcctgcacaggctccagtaccagacacacttctgttaggtgtgttttccacgggcatttgtccccaagctttccccatttttatccatatccatagagattagaaaccctgctcatagccgggcgtggtggcgcacacctttaatcccagcactcggaaggcagaggcaggtggatttctgagtttgaggccagcctggtctacagagtgagttccaggacagccagggctatacagagaaaccctgtctcaaaaaaaaaaaattttttttttctttttaaacacggggtctctttatgcaactctgactggcctggactttgctatgtagaccaagttagccttcagtgcacagagatcttcctttctctgtctctgaatctgtgctggattaaaggagtgtgccactaggctgacaagaattgtattctttcttcagttttccagcctagagtcatgttccagcccttctttcctttgctcaagtcagcctgcctttctttaccccagctcgtgttaaacgaggaatgatagaaacagcctccttagctctcgtggtaattccatgagggctgtgtagagcacagagaggagggcctggcgtgcagtgactgatcacatgtgacgtccttcactctgaagcctgcttggcatgcctgtgttccggggcagtagacatggagtctaaacactgcccccagagttcacccactttgctcattgataagttccaggaggaacagattagcaatcaggacctaatgtgtccttccatgtttttcctttagaaaatcttggtaaggtaaattgaggtaaatttgtatttttacattagtatctatcctttgagtgctatttttcccccaaaggttatatttcatgttgtatatctgtgtgtgtgcccaagtgcacatatgtgtgcaccaagtgtgtgtaggtgcctgtggaggccagaagaggacatcagattcttgtggaactggagttatagttggctgtgagctactggatatggctgttagaaaccaagcctgggtcttctcgagagagcagcaaatgacatgacccactggtctgtctctccagccctaaatgttattgtgggtagattattttgggtatattatgagccttcagcaagtgctcattagttatgactgtgatgtagaaactttaccttgtgcagatggctaacacagggcatctctgctggatctcattgcagcaccctgccgagtctggatgccccgtatcccatgctcatactaactgggcctgcagcttgcgggaaacgagaactcgcccaccgcctctgcagacagtttagtacttacttcagatatgggtaagtttgcctgttggcatgtaagtctgggagaatagtccaccttgttgggaacatcaaagtttccttccacaaagttctcagatgttgcaaaatctctctgttttgagcaaattcttacatagatgtagcaatttatgtaagttatatttaaaaactaggagtggtaaataaagtgaaagttaggtagatgacaagttctcacaagtcccaaccaccgtgtacccttgaaggtcatttattgctacagttggattggtatgatttcgtggtcttgcgtgatacggaatcttccttctcctgccgtcctaactgatgtagtaaagatgtttactgaagtttattccatttacagaagaacttagcaattagccaaatgaatcaaaagatttgtcttcgatgagataagtagtaaatatgtcgatgaccagccaaacaagtaagcaagcagggcacatccattcctttgcacacctttcccacaccgggtctgttagcttctgtgccacttactctactgtaatctaccctgggttttatttgagttcttcagatgcttaatctagagcagtgccaactcaaatcattctccgagatctgaaagtactggtcttcctaattgagcataatggggtttgaaggcggtatcccatggacttgctgttgtgcgccactcttctctggggaagaggtgaccaatgtccactccttccaggtagagaatctatgacagaccaaaatggtaattccaccagagaccaacttattgaaccagtaagtttattggggttacttatacaacttaaaggcagttgcctcaccaaaacccatctcagcaaggagatgattcacaaaagctgggaccctccccgatccgggttccacggttccacttccagccccctcagcaggccctcagcatttcttactgcatatataatctcagggaaatagaggcctcagggagcaggggtgggtggggtggtggggtgctgatgggagctctgctcatgaatcttgtatctggaactttctggaactttcttcctgagttggaaggcacctccccgtcaggactccctgagtcttaatgagcttccctcgggaatggagtgtttcagttaggagggaattggcatacagtacttgcaaggtcacagtgtgggtcacacttccgtggtggtctgtcttccagggacagccttcccccagctgggcctggaacacagactggccactctggagttccttgcctcctccccagaggtgcatagcagcagagaggggacaactcaagtgtttcctgtctcttcctgtcccttccctcaggtggcccatcaagctcaggatttcctgtagcaaatagagaagatggggtgggggtcggtgggagtgggggtcggtggggaatgtggggggtacaaaacaaaacaaaaggagacacctgaaaaaaaaaacagcccactagacttacaagagttttagaagtttctggaaatcatatttagagttgaactgtgatcttctgacctgtttcctctttggcctttatatgtggcaaaggatttaccttgaaattagtggtgaatgccagtgagttgaagatgttactataaagctatgtaggctagtaagaaacgtgagtctctaatgccgttacagaaacagccccttcctgaagcttcctgaagctgtacatgttcaagcagtgcaaataccatctttaaaaggcccatttactgagatacttaaaattacaacacacatttggacatttctagacataaatgctatagaatagaaataccacatcgttacaaaaataagctaaaagttagcacttgccttaaaagcttagctagcggccattatgttcagtggggacacccagcctgcttccaaagataagctgagcaccgtgattggaaggtcaaactagaggtcaagggtatacactgaccattgtgccagggtatacatttggaaccttttagcaaaccaaagccacctagggaaccagggctttctctagtccctgtcacgtctgtggcagcatctggcaatagttggtggcctggtcctttttatttattactgctcttgccagagcatgtttggtctgatatgtttttggaaatgtttattgatttaccctcaagatttctaatccaatctgctctgatgttcttatctggctcaattactcatttccacccaatcccacgtgtcccttattcaaatgcttacccatcctgactctattggtttacttagtgtcttttttcttagtgtctaagcccaggtaggtgagtggccacctcaaccttgtttaccagtgagttctaactgtctaacatatgaccgggtacttaatatacatataataaatatttattaagtgaatgactaattgaataaatggctatgtatgcaaatttagctgaaatgacagcaactggaagtattgatggctttcccgatggctctgtggagaaatggacagatggatagattcatctatacattcatccatccattcatccacccattcatgcagtaaatctttactgagttgctcccatgatctggtccctgatgatacagtgagaaaccgacgcctgaggtcctttccttgtgcagtgtataacctggtaacgaggtgctgccttaactcatggactgtgcggcatctgtgcatgtgtgaggtggcaaagctctgagaaagagcttcatggctattctgctggagctgccgctgactgagtcgatgataggaatcacagtactaccgactgctccaacacccccaccccccatcactcacctcggagagtcagaagttggtccacccactggtctcagcatcttcatggaggtagagagccaggctcgtcccatggcagatcattctaagaacaccaccaaggtctgggtcaaagtccatgtccttgggtcacaaagaagggcactaggcagctaaggatttcatccattgagaaagccaagataggtctgccattctacaaagctactttatgattaaaactgaagctaaaccaaagcacatcttcagagacaagccattgctttcacttacagtttctttttaatgtttcttatcccacatagattgtagatttttaattaaatgaaagcaggcacaaatacaatcttattgcaacatttccccggctatttactcgactcttcttctctcttatttattttctttgctttggtggttttcttcttaaaattacatgcaccatgatcaagacaatcaggaaaattctcacatgccaacttgcatgtacagatacatgaagaaagagcatgattctgttgtataaccagcagtggagggcaggggtgctcttccgtggtattaggctttggttttactgtttgttcttggtttagaactaggccagatgccatttcttaccagtattagttactggtggcctagagatataaaggtactgctattaccatacaaaccatgacctagaaatgtgttggatgaagaaggccccaccaagaccatcatccaggcttaaggccagtcacgtgatctgaagcatcctgaaagacaaattgttcttccctgcatctctgttttataataatctctatcgtccttagttttctgtgatattgactattaaatgtgcttttatttttagcattaaagtaaaaagaccacatgctgtttagctgcataagatagtttgaggtcatttttctctgatgtgtccctttctacaaatgtaatagccttgtagcatgtctgcttgacttattcagtaatatgtaacgaccatggtccaggcaccgatgataaaactgaaacgaggaaatatgggccccatccttctggtttcataaaacagtaagtgttggatgggatttacgtaggaaatactgtctaacaagagacttggctgagttctgtaagagcccatgacagcatagtgggctgtagggcctgatggaaacactctcctagttaggcacggatacactttgctaagagagaggacacaccatagaacagtctgaaggctaagcttgaaagtgggaaggcatgcagacaaaaggcaaggctaggcagatgaccacaagtgtctcagcaggagcaggatgttgcatatgccagcaagattttgctgaaaggaccctgatatagctgtctcttgtgaggctatgccagtgcctggcaaatacagaagtgaatgctgacagtcatctattggatggaacacagggcccccagtggaggagctagagaaagtacccaaggagctgaaggggtctgcaaccctataggtggaacaacaatatgaactaaccagtacccccagagctcgtgtctctagttgcatatgtagcagaggatggcctagtcagccatcagtgggaggagaggtccttggtcttgcgaagattatatgtcccagtacaggggaatgctagggccaggaagtgggagtgggtgggttgaggatcagggttgggggagggtatagaggactttcaggatagcatttgaaatgtaaatgaagaaaatatttaataaaaaaagaaaaaagaaaaagaaaactggagacaagaggaccagtttcgataaagtgggcaggtgatgccagcccgagccaggtaggatatactcaccagaacatgagcacagtagtggcttcatagaatcccttgtgctcatgatcccttcgctgtgtccactgatctcctgatgtgtatttgcactgggtgtgcagacaacatcgttagcctactcagaggcatgggaacgcctgggcttttgtggctacatgttgtgagaaatcacaatctagcatattaccatgtactgaatcatcacagaatggcatatcgccatgtattgagtcatgtgctcacagccaagctccctgaattagcatggggcttgctgtcctgtcatgctttcctgaggcactcaagtccagaaccaaggttttaaatctgtgctttgagtctcactgagatggtctacttccccaaccagcggctcactctttcttcttagatagcttttcttcctacctagccttaccctagctactttagaatggcattattagggacagccatccaaatgtccttccttcccacagtgtcctttctataggcatggcttgttagctgtttcaatgacagccctctctaaaatgccaaagttcccctccgttctttataaccggagatgcagcccctccttagtctccagcctagtcctttggtggcaaagtgcaactaccagggagtgtggctcccatctgaagccatgacttaaccaggatatcactagtaaactaattagcaaataataaagtcatagaaatacgtgtttggaggagggggcagatgctgacagggtggcccaaagaaatccacttaagttaaagttggtgctgcttctcctaagtgagtgtggtgaaacattgtgatgtatttccttttcaaggtgttcatattcaggcagcacacacacacacacacacacacacacacacacacacacacagtgcaggtgtctgtatgtaaaaatcggatgacagatggaaaagcccacaggtcatcgcaggtctttcttaatagaaggtccctcagcctctgggagtctgtcatcctggtctccacatcactgaagccattcctttgtttacctgcccacttgcttgaaattgcttctttgtgtagtctctgtttagaaacccttcacagttccctgccactcagtccctttgttgggaaatgtaaattcaacatagcttgtaaagactttgctgagggtgcacagcctgggatgccaggccacagacttatcctccccgactatcagggacagcaataagagagaggggcccaggtctctgcccaggcacagagaaaaatgccagtgcattccaacaacaaaacaaatgtcactgtgttttgaacgtgttctcttttggcatctaccgtgtgaacgtaacattgaggcctgaaattttcctggtacgtttaattcttgatcatagtagaaagggagcagccatatgacttttaaccatctctgttctgacttgtaacgtggaggcttttgaggctcagctctgcacctcctaattaatgtgttgtcacagaagttgactggagccatcctggtatggctgcttaactctgctctgtggtctcttctttttcttttgtaaatgaatcagcgtgtcaagcatctactgattctcctctcctagttcagagctgttagataatctagacttcagttttactcccagaacttactacttggaaggcagaaggctaggagatctagagtcttggggagttgggaactctgtgttctggttctcgggccatcaccagcctgcagggtgaccttggacaggtcaccttcgtagtcacctttataatggtgagcttcgcagctgtgcacctcacacctttcgttttctcttgatgttacagtaattatagtgaatggctactatgtgccaggtgttgggaatgcaaggacaaaatagagggcaaaggtcttccagctagatattgtgctgggacgacaggaaaggttatcaaaggaggtttcagagtaagggtgtgtgtgtgtgtgtgtatatctgtctgtctgtctgtctctgtgtgtgtctgtgtgtgtgtgtgtctgtctgtctctgtgtgtgtgtctgtctgtgtgtgtgtctgtctgtctgtctctgtgtgtgtgtgtgtgtgtgtgtctgtgtgtgtctgtttctgtgtgtctgtgtatgtgtgtgtctgtgtgtgtgtgtgtgtgtgtgtgtgtgtgtgtgtgcgcgcctgcgcacgtgcacatgtgtggttaccagtgctgtctcaagacagtagatagctaaggtctctgtagttaagagttcattcagcactagaactgtgcgttcccacagaggcgtgtgcataattctagtctaaaatcacaatccaggaagaatgaggtgtctctgccctcaagtggaggaagagatgggccctgaacaagcagttgggaatgcagatggtgcaggctgcggttgtaggagcataaagacctgcatactgtaccagaggaggttaggagaagcattcggaaggtgacgcttaagcacagtcctgacaaagaagcggccatgtgtgtggagagaggggagaggagcctacagaaaatgctcatagatcagagagaatgtgaaagcaatcgatgctatacttcttcaactgtcattatgtggcggcaaggggggcgattcagaaagcaataaataatgtaagtaaaaattggatatcgatgaacccaaatttgtataatcctcatagattatagtgattaactatagtctaacacttctaaggcacactgttttcacaattgcattactttatgatttatgatcggtggggtcgatttcatttgtaaaacattcttcacaatgaaagcggttccattgtgactttcaagttcatgaaaatagactaagctctctgtttctgactttggagcctgtcacatgagctctctgtttctatgacttcagggcctgtcacaccacgagaccgccttactttggtgaaggagatcgagttgattatcatttcatttcccaagaagtttttgacgaaatgctgaacatggtaaggcaggtccctgcttttctgtcttcgttttgttgtttgtcttggttttggttcgtttttatcaggtaagacatagatgctctttgccaggagtctaaggaaacagtggtttctgaaatggtaaagataaagatgaaatgtcttgcacttgctaaatctggatctgtgtgagatgtgctcattgctgaaggcggtacacagtcctttggcttcaaaaacattttcttaaacacttgtttcttctctgccttcacctggaagggactcctcacagcttggatgtgtttttcccagttgtgagtacacgctaatgcagtacatactcactcccagctttgttacccagaaagagcatctccaatcaccatatctctcgtgcttttcttacaccacacctcgtagttttgcctacaccacagtccttcctgtcattgaatgcagcaccgaggaccagtgaaggaccagtccttcctttgtgccgtgagcagtcagcattcagccaggagtactgtatctcttctttctcttttctccttcccttctttctctgtcttcacccccaaacaatgggcatgccataaacctccattgtgcacaatcatggccatctaagcttaggccgtgcaattacattagcttggttttgcccagctgactactgtggtacgtgttcttagggctcatcgtgtactcacagagaaagcacgtgagcaagtcccattcacccatcagctttccccataaccttgtcaaaagaatgtcttggacatcataagcctcttctcttggggctgtattttgacaggtctgcttgaggtattaagagtcttctagaagtttgtatttctatgagcctttaaaggagatttgaggcatgtcttcactgtactaagaagcatttttttttttctcagaatcctaggatgaaatctccctcgatcccaccatgggagtttaattctgctgtgagagtgggacaccctctctgggagtttggtttattctgttctccacccgtagcacctgttcccctatgtccatagcttatcaggtctataatcaagttagtctgcttcagtccccagtctaggacatcgatgcacttctaggctatatttagctttacggtttaatgccccacagaaatccccgtgtatttgagaagcactcatttttcctgtctctgccaacacgtgttactccaatgtaattcccatcagagtttcacctctgatctccttttctttagtgtgtgacactgtttcatgaagagagctaaaccaagagagtcataaatccatgatacactgtcagccccccaaccatgcccacgctgtcagccttgtgcacatagaacacccctccacgcaccacctgcccacacagcctgactctctcaacagacactgtggcctgtccacccccagatgcctactgtgaacggcctacctagccactgtgacagagaaagcatatggacccccacgctctcccatgttcatgtgtcttttcaaccaacactttcctataatcagcaaatcattcctcattccttagcccacagcccacagcccacagttcacagcccacagaagtacatcagccctttctacatgcactgcacttagtcaaggcgccccctctccggtggaaatgcaacacactggaggcttctattgtgtgaccattgctacttactaggaaatccacatgcactgtgtgcctggccagaactggggaattgcatcatctcaaggcttaacaaatcagttgaatggggtctcttttatgttatatgtacgatgcaaggtctcttccaaccatgcctgtttccagaaaatgtttatgagatacacaggagaagtaaacaaacatctatctgaaaaataattcagatatgtgtacattttggagacagagcacatgatagagtattagctctccagagaaacagacgcagtaaatagggtgtgtgtgtatttgtataatctctcttttatacacacacacacacacacacacacacacacacacacacacacacacacatttatatgcatatctagtcacacatgtgcgtgcacacacacacatacaaagacacatacatatttatacacatacgtatatggagagagagattggcttattagagtatcacacaagtgtggagattggcaagccagaaccttccgtgtgggtgggcaagctggagacttaggagatcccgcagtaaaggtgaggtccaaggctcacctttctgttcaatacaagtcttaaagggattggatgcagcccacccacactccagaccagtctgcttgttccaagttcaccagtttcaatgttaacctcacccccagtcactctccaggttgacccatgaacgtaaccatcacacatggtaaacacaccgaagcatgaaaggtgagccatagctacattcatagacgtccatatttaaatgcatacatgcatatggaaaagaatcagaacttttttttttcaaagaacaaggaaattatgaggttgaaagaataaaaaatgaaggacatgcattggtgggtttttaactttgattgtaatgattttcctccccaaccccagcacgcatagtcccatgaaacccacccaacctcaaaaggcactctgtgtctcctgccaaaactgtctcctctggcagatagccagtctgtcatctatacatatctgcagaacatctggagccaggagggtagcaagagactctggggctgctgctgctgttaatgacggcagcattagactcccaactgcacggtatttttaatgatgctcctgccatctgatggggttgggtgcacccctgaacatcatttattttaaagtcatgcatttcagaaggcacatttaccaaggtcaatcaggttttttattacttctattgttatcagcttcgaagtttagggtaggcctaatggattaataaatatatcatcaaagaaaaagttacaatttgaagggtgtgtttttttaacctacattttcttttctttttgtaaggaataaagctgacacaggaaatgggcctccaggatatacagagagggtggtatttatatttaaatgactatagcgcaggcaacaattttgttgactaacatttaaggtactttcaataaaaagccatctttacaaggaaaaccagactgggtctatttttctttttgtctttttctttttgccaagcttttaggatatctaaacagccttcatggttacccattgctcatggcttatctttaaatgcaaggaatttaggattggggtccttgtctgcaggcctgggatgctggcatagctacaagggagagggcgagccattagttttactccctccatgaggaaggtttgtggtgggaatttgtcaggaaataggtaagcaagcaccatggtctgatctatcagaagcttccacccataaccctctcacacatcctgtcagtagactgtctcagtaaaccttttcttagatagactcctgaagaaccccgccagagcttaggtgttccactgccccatggccctgttgctcttctgcacttcctaacaacttttcagttctattgaattacatgagagtaagacattaagtcatttagtcactacattacagcaactgttatgtgcaaacttttgtattttttctaattccaggggaaatttattttaacatttaattatggcaatcacaattatggattaaatagggacacgatagaaggtattgcaagagatggattagcaagctgcattcatatggaattagaagtaagtatttttcattcaactgtgagtgtgtgtggtgtgtatgtgtgtatgttgaatgtctgaagttggggctacactatcgggctaacatactgctgggcacaagagaaatgctgtagaaatgtcaagtggtaagctgattgtcactgtggggtaagacccgtgaaagtaagtgacaagatttagatcacagccccattcaagatgtattgcctcttatttcctcagtaaagtacccgtttgtcttcacagtatgtctctgtttatatgaagggggtacaggcatgggtggctccatgtgccctcaggactgtgtcagcctcagtggtcaccctcttccttcattctccacggagctgtgtaggtggtactgtcgtttggctccgagtgttcactagatgcaacgcctttatacttctggcaagttagacttgcagatttccagatttttgtccctcccctatctacccgctacccccaacaaccttctcaaattagaacgtacagacattttcccaaaactgcaaaatagaggaaatccttgaatttcccacctactggcttgaagaacattaacacaactaaattatccaggtcttcagtgatgatcaatgttttaaaattgcttttgctaagcaatataactcttataatcagacaaaataaattttatcaaaacaaacataaaagaaaacttgacaaggctgttctttcccgttgactaaatgcttgcctcattctcctttgtcatgccacagaggaggaggagatggtggtcccatttggctgactgtccctgcttcagtggagctgggcacacttctttcagctctttacctttctgcatcattatccattcttatctctttgcagttggttggttctgcatctttaagaggagtctcctttactctctttaaattattattattattattattattattattttaaaagatgggttcaaagaaagtgtctgccttggacagagaaacaaaacctcatgcgtgtttgagtgcagctgcactctatcttcttgtgtccccctttttccagcttcacagtttcttgaatgatggctcctgttccccatttttgtttttgtttttgtttttttttgttttttgttttttttcctccctgaaagctctcctcctcatttcctagaggtcaagtccataaactgttttatatctcccgctcctctccacctgaggtgtctttttcctgattgccctttgtcacctgctcttcgagacactgttttaaaagcagcctgtgtttcttcccaccaaatcattaaaccaaagattctgaacttgagttagatgacgttagaagtgatttgaaagggcttcacagtccactgggaacagctctcccctgccccacccccaccccctgccctgccccttgggaaactcatgcccaagagagatgtgagagagtttgagggatgtgtgcagagtccttaggaactacagagctaaagtcacaacccagacctcccaggttacagaccacaccccttcacccagtggtcacctgcctcagcatggtatgctaaccttggtctgtccccttctgaatggaggctgtaacacgtggaaccacaaggttgggttttttgttgtttgcttatttgttgagcagttaattacaaccagtctttaaattttgcatctgtgaatggaggaaatgttggaggcagaagttctggcccctagatggtagaggccagtactttccaaacaatagaaaaccaaggtagctttggtggttccagcagcggtggtagctatgatggtggctggaggatttaattacccagagaagtgacaggtgacatagatgcttgaactcagccaatcacagtggtagcagggtctagcctccacaaagaagacatgctttagacaacactcactcatatttggcaaccccttccccaactcccctaagttcaaggactgtctctgtgactgtagtactctgaccgtggtgctaaattttataaatctctacctctacctatctattctgtggtaccaaggtgatgaatggaagaagagcaccatgggagccctttttccctgggaagagctctgtcttctagtgcttcaaggatgcccgttgaaatatggaataaaattactgttcaataataaaatggcaatactgccctattttatgcccagcaattttctttttctttcttttttttttttaacagccatattcattagaaggattcatttgaggacaaccaggtggaattaattgtaatagttcctacgacaatttaatattcaatgaagagggaaaagtaatccagccttggactatttatagggagtgtgatactgttgtggtgcccctgagttgtcacgtgttcccacagtgatgtccacagtataagctgtttctgacttaccttctttaaccacctagggtgtaagaagtttgaaatattcttattttgagcctcgatatatcttggtggtgcctatggacaaggaaaaatatgagggatacttgcggagaaagggattgttcagtcgcgcagaaatcgaaattgccgtctccagggtggacctttatgttaaagttaatcagaaatacccaggatattttgatgcagtaatcaatgcaggtcagtaatgcccagagtttaattattttttatttatgttttcatgtttgaagtatacaatcactgctatattagtcagggttctctagagtcacagaacttatggaaagtctctatatattaagggaatttattgtgatgacttacagtctgcagtccaactaacccaacaatgggcagctatgaatggaaagtccaagaatctaatagttgctcagtcccaagaggctaggtgtttcccctggtcttctgtataagctggaatcctgaagaggtcggttccaacagatgtgctggcaagtaagcacaagcaggtgcagaagagagagccttcctccttccatggtccttatgtaggccaccagtagaaggtgtagcccagattaaaggtgtgcatctccacgcctggatttggaaattgctttgtcccaggctggccttgaactcagatatctgtttacttcagtctcttgggattaaaggtgtgtactgccttgtctgggccgaagcttttcatggccactatgcctcaaggtctggatcacagatgtgccctccatttctagactgtagtccattccacacgtactcaggttgacagccaggaataggcatcacaaatgagtttccagtttaggtcatggaaagagaattctgaggaaacagagacgtttgttgtaattacaagctgcaaaaagctgcagaagtgggtaagcacctgtgagagccaggctcccactgttcccatcagaagttaagcttcatcagtccgtaaggttgtgactaattcagttgtataaaacggggacacggatttcttcccctggggacattgtgataacaaagatatctcatttgaaatacatatttaaacttttaaaggcacatgaagctcaggtatttttatcataacctaactttacaaagaatcatgactactgaaaatattggaaaatttaaaatatctgggtaaaacaccttaaaaaactaacttagaataaagcatgtcttttttttttaaacccagatattttcaaattttatcaccacaaagaaataataaatgtttgacgtgaaggatgtggtagttatccaaatttgatcataaatacattgtatttatgtgttggaaccataatgtgttcaataaatatggaataattatgtcaatttaaattatatcaaataaaaaattaaagataaaaatggctactaatttgaagcagaagccagagagaaagatagagaaattgttgaaaaaatggaactttctatatgcttttaattatagtacttcatatatccatgaaagaacggtagtactctgtatagtaaggagctaccttggagcggtaagatggctcagcaggtaaagatgcttctacttccaaacctgatgacctggattcaacctgtcggactcatgttgcatggtggaagaagagaactgactggcttttgttttgttttgtttttctgatttttgagatacagtttctctgggtagccctggctatcctggaacccattctgtagaccaggctggcctcaaactcagagatccagctgcctctacccagaggcatccacaagcagatctctgagttttgggccaaacctggtctgcatagagagagttcaaggctagccagggttacactgtgacactctttttcaaaataaataagtgaattttaaatgaataaattaaataaactcttgatagcctttcggtgagatgctgggtagaaagggagacattatgttgagccatatgatattgctagtatcccactattatgcaaatgacaattttatatggttcatttaatcgttttctcaagcctctaaattgtgttaacgtattgcttatctattttggttttatactgctgcatacaaatgctcacagttaatgcctaacccagagcctgctcagcctgttaggtcagcataacaggactcagttaagtgctaagaataaggtgttgggtgagctgagatctcatctgaaggctctggggaaaaacttagctcccaattaccttctcgttggcagactacaacttgagtcttgagttccttgaggtatgggcctgagctcctacttcttggctggctgcctctagaaggctgtgcatagctcctcgaggttattctttagtcttgtctatatggtgctggccatcttctagacagcagagagcaggttgaatgtctgacttttattctgtcaccaactagacaaatctgtccttccctggctatgatctgagtgaaccacctgggcaatctccctttacagtcacttgtgctgttggtgaccttaactgtaccgtgcatcccttttgcatataatgtaaaatattcgtgggcatgacttctcttcacctccataggttctgcccacacttgagggggtagggggtgttataggagagagaaatgtgagagtcatcttagaattttatctaacacaacagctataggatgaaatgtagtgatccaggcagttcactcaccattgaacactgagtgtttggacatgattgtagcacattaaaatgttttgttgtttgttgtagatgacatggacattgcctaccaaaagctcagcgagctcattagagaatacctggggttgactgagacagctgctaagaccttggctccaactgcaggtactaacctatctcctttgtaccaagttgattttccgtggaaaataaggcagccttgttcttcttggttactcattagttgggctaatgctggctcacagtatttaattcctacaattttttcccctgggatatatgaatcagcccctctgtgtctgttaatgatgcttgatcggggtggggcaggggaggggctagccctgccgctcacttggcctagctgcttggctgttttgggcttcggtttcttgtcctgaagaatagataccacacttccctcctgcctcatgggtcctgagcagcaaatgttgagggacgtgcaagggcattgacttgaagtctaagaattcaaagcctagaaatttcaagacatgactattttgagatgtgtttgagctgcttgtccctcaagtttgcctcacacctacttggatggcgacttactaaaaaagtatctggagaaattagaaccttgtgctaaaaggtatgtaaaaggtatgtggctgctacaaaaatataatggtatataaagtcctcaaaaaaattgtcaacttttgtgtgatccagctgtttcacttctggataaataccctaagccactggaagtgagatcccgaggaaataagacaccctgttcatagcagttccattcacattagccaaaagttgaagccaccatggtggtccagtgatggacggatggataaagaaggtgtctcgtatactctttgatgttatctcatcttaagagggaaggaagtcttggcacacagtgggacatgaaccttgaagacagtgtggtgagtaaagccagctggtcagagcagactagatcctgtacaagtacatctctatgaggtatttagagcagtcaagcgaacagacaggaaacaggcgcctaatgacaggaggctgtggggaatggagcgctactgttaacattatttgcaaaatgttaacctaagatggttgctgctttgtagaagccttgcagcttggtggtccaaatagcattctgcttgcctgatggctttcgtacaggctgagaagggaggccaggcgatgaccttgacagagttcaagcactaaagcctaccgggccctttgcagttttgtactctcttcccaagtcaagtattccttatattttagacagaggtccgtgcagtaccagttactcacagatacgaatgccatttctgccatgcaggaacgtatctcctatgttaaaggaatggaggttatgacatgccaactagaagatacttgatgaaagcttgtggtctgcccaaataggctggtgaggctggacctccatggagctctctcttgaggaaatatggctccctgtgctttaattctttgctatccaagcaaccttgtaatctttaatttggtcccctgggtggaactggcccctgtgcgggctgtatcttacgtgagaacatgctgccctgctccctgaacctgccccatctcccattgtaaattaataaattggtgtgctggcttttacatcagtcccttgtgggtttggataaacagtgattagtcccctgggtaaccgagagatgtgtgtttctgtgtggtgctgctgaactaaggagcgatgagcaagacttggcacagtggcctgcaggctccatcactctattctgtgcctcttcctgttcctacagtgatcaggaccccgactatagcgtgcagtgactacctagcaaattaacaggcaaaataatgtgtgcacaggaaagtagactgccactttagagtgtatagtaaaatcttacttatttggaataagtaggttacgcctatctgatttaatgaaaggtataagttatagaatttataaaagtgtcataacttctcagaaacatctactaatcgaaaccgtggcatcttgttattgactaatggaattctagcttgaaagtagacaggatggattacagtcagtcatcagatctatatcatcaacagaaccttatttttctaaaaggtttaatattctgaaaaagactgttttcttaaggcaaaaccttatcttgtgtttacagttaatttgcacagggaggttttttttttcagttgataattaaagataaacttccacttcagtggcattgtagagatcagacaacattcaagtgagtatatttgaaattctaatgaatatagtccttattaatacgcttttagggtatctctggtggccccaggagttaagccagtggcatctgtgaattccaggactgtaaaatccttgccaagagtgagggtcacctggtcgtagggtcagtacaggtgaatggggcctggtctgtttcattgctgcttctgtagtcaaattccctgacaaaaagcaatttggagaaaaaggctttcaggtgacagctcatcactgtgcgaaagtcaggtcacatcacattcgcaatcaagaaaaatgagtgcatgcatacttgcttgcttgtgaatgcttagcttgaattctctgttctcatgtagctcagaaccccctgcctatggaatggggtgggccacgcacgcacactgagccgagtttttcatataattaacataaagttccccactgacatgccttcaggtcaaaccaatgtatataatttttcactgagacccttgtcttagttaaggttctactgctataagcagataccatgaccaaggcaactcttacaaggacaacatttacttggggctggcttacaggttcagaggctcagcccattatcattagcatggcagcatccaggcaggaggagctcagagttctacatcttcatctgaaggctgctggcagatactggcttccaggcagctaggatgagggtcttcaagctcacacccacagtgacacacctactccaacagggccataccctctaatagtgccactccctaggccaagcatatacaaaccatcacaactctcttcccaggaaagtctaggctttgtgtctaattggcaaaagcaaaatcataggccacagacatatttgccttcccatgaaactgtagattccctgagaaggagccagccccaagtagggatgctacacatcctgggcctagctggagccttgcctctttccctctgctcagaactaagctattctgttcctaatttctgtgattgagatatgtgtgtgtgtgtgtgtgtgtgtgtgtgtgtgtatatatgaagatatatgatataccatagaatatgatatatatataaaataatgttaatatattttatatataatatataatctagaaattaaacatcttagtatagagaattttaaaaaataattaagattttaagggaaagaaagtaaaatacgtatttacaattttatgagaggttagtctgaaggattatatatctggattgggtatctgaggcctcacttttctgtcttaaatttaactagtaatcattatttcaaatagagataaatttggaaaaatcatctttttcttaaaaaaggaagaagaagaaaaccgtatgtaacgttgtagcacattattgaagtctggcttggaaagctgagtctttttacagctagatcaagaatatccgtgagctgagccccagtacaaacagaaatcttatgttcagtaacatcatctttccaaaaaggataatcctgtgtcaatgcagcctaaagacagttctcaaatatttgaagcaatgatatacagctttatccctaataatcgtaagctgcctgcttgtcactggggacacgatgataatgtccacgcaacagtaaggttgaaacagaatgagaaagggaaggctaagagctgtgtcctgcggtcagcatccaccaacccagccctggaaacctgaaccctcgccaagatgggctaggtgaattatcaccaaatgcatgcataaagagctgtggctataccgtgatgataagctccttagatgtgccattaattttaagtgcataccaattaagtatggcacggtcctacttttcccatagtaatgtaggaaatgcttgtttttaaagcatgcagttaacaatatagcttctatgaaacaagaataaactcaattgattagcaacttgtctctcccttcataatgctgcaaccctttaatacagatcctcgtgttgtcatcccaaccataaaattagtttcatcgattccccataactgtaattttgctactgttaggattcataaatatctgtcctttctgatggccttagttgtctctagcacaagggtcatttgacaggggtcgtgacccacaggttgagaaccactggtacagctcctgtgtcttagttagtcgctgcttccggggagactttgaggaagtggaactaacgagcagcctgcagtcttgccatcaaggttatggaatgaaattatagttttcctaattctgattaatgataaagggaaaatggaccaatttgccagcccataaagtggtgctgttatcttctagtaaagggcatggggtcatttagccaaatttcatgagttgttaaatcatcaaagtagataaagaaaaccctgtctgcccgactgtaagattaaaaggagagctccctcagcactgagtcccattcttcttatgcttttcttttaaagttgtagacatgtgttgcatgcatcctgtaagcatctataacgcgccacattttttttttttggcaaattttacatttacttacacacatgcacttgtgacgatcagtcaacagcttgtgggaactgattgtcccttcctccacgtgggttccagagctcagactcagatcaacaatctcggcagcaagagctctgaccactgagcaagcaatcgtgccagccctcgttttccattttaatcacgttaggtgtggaattcagtgccagcgactgcattcccagtgccgtgtaaccatcactgccacctgttttcaaagtttttcatcatctgaaacataatctctatattcattaagcagtaatccccttgccgcggtcacctctgatccacttcctgttctctgccagtttacctactggagttagcctcatcttttaatccaaccttgtttcttcactaaagttgtgttttagtttttatctgtgataaattcagtgatgagaatgatgagccgagggtatcatcaggagccctaccgagagggaggcttttcagtctgcccgtttgccccttccattctctgggggcttctagcttgactggttacaaaagaggaccaggctggaaggctcattgtgaacccaaagtggcacaaacccatccttcctcagtggaggggagacaacggtcagggatacattggctgctggagacggaccactctggggtcaccagggtgtctcccaaatggagcccaggtgattcttcaaggttattccaggctgatgtgttagcgctgactgatgcacacttcagagctatgcagtcagggagaccagagccgctctaagaaggtggaattggaggaagcagtccctctctacagcatcagcattgccagggcctctgcgagctgtttctgtagccagagaaatctgtggctgggggtggggttggagccttcatctcaccaggagcagaccctggtgtcttaggatgccctcgaatccatgtcttccttcttcctctcctcactcactgagttcctgctgaactctgagcctcaagcgtattattagtaaacaggctaggctccttgcagcattcggattatgtcttaaccattgaacagcaaaaccaatctcatttgtttggaaactttctttatcatccacagatccaaatggttttgagcaaatatctggatgcttattcatttaaatttcttctcaattcactagatttgtcctaacttctagaaagttgcagctacttagtctcccccaaggagaaggggaaggtctacgagtgattttcttgttttaagggtccctgtgcatcaccacaggaaaacaggatttttgatgttagtttctagcaggaaagagcctttgtagctaacttctctttgtattaaagcaggagctccctctagcaagaagaccgcctctggggtccccgcacacctggtcccctcccccaggcgcttggcaagactacaagccgatggccagaaaacggaggctttcctggaagtgcagactcaagcagtggtccctgaaaatcaggaccccactctcccacagagccaggagttaactgaggagggcgaaccccctgagaaggagactaatgtacctcagcaggtcagttcttcagcacttggtattcctcagcaggcccaggacttaccaccaaaggtgaaggaagaggatggccagccagccaaccttcctccaaaaataaccaccgagatggatggcccagaagatgagcctggaccgcccgtgccaaaagcagaccagtcttccactcttgcgtctcaagagccgccccagcagcctgctcctgctcccacactcagccctcagcctgctcctgctcccacactcagccctcagcctgctcctgctcccacactcagccctcagcctgctcctgctcccacgctcagccctcagccagaccaggataaggaatccggagagaccaaagtagcccctagcaacccagccctatctgaacctgcacagggagctgacttagcttccctcagtcctcagagagtgcaggatgaaggaactgagtcagccaaccctgcacccaggagttccacgcacactcttccagaagatccttcccacactgaggtagagaagcctactgggggatctcaacgacctctgaaggaggaaacccccaaagcagaagttatgcgggccggtactccttacccagaaattccacctccccaagactcaaccacaaaagtcagggaacagccaggagccttgcttcctagaagcaggctggctcctaccagattgccacagccccagaccttggctcctctccagagccggagacccacacccaagcttctctctcccagcagggaagaggctttggggacaagctcagatcagaccccgaatccctctcccagatcttttccagctcaggatggagaccccagtaagcttcctcccatcagcccttcccaatccaaaccaccccgaaactcgagcccccctacagcccacagcccacagcaaggccaggtaggaaaagccagtgaggtgaagctcccacttatcagccccccagtccaggaacaagcccagcagcacacccccaacccaccccaggaagaggaggcacccacagtccagctcccaactattcctgctccctccacggaaccccagcttcctcagaacaccgagccaaggcctgcttcgaagcccgcaagggaaaagaaaactccgaaagtaggccgtgcctccagtaagaaggttctagatctgcaggccacaccccacagccaggggcccactaagcagaaaggagcgaagaaaaaaaacctcatgcaaaaagagacagctaaagagtcgccacagcagagaaagatgccagttgggaactctcagacagccccgcagctagaatcccacgacaagccaactccaagaaatgaatccgacccacttgacttcaggtcttctccgagccacactgaaccagtgccagcagacccccagaaccaggagaaaaaccacaaagcacacaagccaagaaagaaggcacagaccaatcccacccctaaggacgtggctcagtccacacacacatcccctaatggagaaatgtctgaagggttacctcaaggaaatgaaactgccctcggtgaggatcagccaaccagagagggtcagcccccgcaggaccctgccaagtctgcgcaggagggttctgctcccgtgctgcatcctggggaaagggaacaggctcaaaaaagggaaaagtctcagaagagagaggttgcggggaagcccgaaggcgaggagattgcagcccctagccaactgcgggtcaaagagacacaagcccatagggacaccagggagaacagacagagctatgcccagaggcacagcatacttgtatcgaagcagcaatccaaagaaaaacgaacccgaaaaaatggaggtgtagcacaggacagaagtcctgctgctccccaaaatcaggtgtcagaggaggatcagggtagccggacaggaagactgcgagccaggggcagtcagagtatcaaagtgtgagccttggctccggagaagctatgctgtcagtggatgcaagtccaacggcttccttctgcagccactggtcagcaccttgatttgcggggtcccagaagtcgtcgtaattctgcttcccatgggacagacttgggggaagacagctggctggttgctgccagcgattcagtctagaacacttgatgactggtgtcatcaaaaggtcctcgtgttcgactacaaatgtcaatgggatttcatggcggaacccaggcagattgccatcttccttaggaaaattcacttctagattagaaattttcctcgtgctttttacattattggaggtggggtggggctgcagcaaaaggaactctgcaaaaagaaaccttgctgtttttaaggattgccaacctgcagttcacttgtgagagtgcatctctgcaagccagacaatggccgagccaagtgtttgaggtctgcattggtctatgttatgaaaattccttttgtttctacatttttccaaatgaataccttccttccgtcttcaaataggaatctcatggtccatgccttcctcatgccacagcatctgattgaatcccaagaaatctgtggggagaaaattcaggggaatcagtcttcatttatctctccatattattctcttctattcctgtcaatgactaaggtgcagccagggctagcctgtggaaagctattagcaggaagtatgtgtacatctcatataaccaaactaccagaaggacacaggtaggtgggggctctcagagaaacaaggggtcagctattgagcatcaccaggggtctcgttatcttctggaccaagcaagagcctaggacccacatcaattctcatttctgttgttctccatgttggctccattctttgaactacagatggttcaaagccattctctctacatagcagggacatgaacacgaacaactctgcaattacatccggtggcatctcttacctttgttataaagacattaatctaaatcatcattaatcctaatatttaaaagaaaatccaaggaaagaccgattgcctctttgatcaaacattcatttccaaccaacaactctggcctgggcatggctaccaccacccatagcccactgggtccactgctctagatggagacttacatttccagaaggaaggataattgcagtcaagacatcagccctcaattccactctttaaaaaaaaaatgttagaagataaccatgtatacaggaatgttctgaagctatgtttactgtcccgtatttcatcatgtagagaatgactagagcctgtgtcttgtcttatacaaaagctatgtgcccacaagcctgtatgactagcaaatgttatgtcaagtgcaatagaggacatcgatattttttaaatcggggatgtaacggagcctctcagcgaacaaggctgttcttgtaactataatattagacgttatcttctgatttatctcccttctccaagataaaaagctataggatgatttttgaaagtaatttatgtttattaagtaaattcattctcaagtaagcctttgtggagcactttctctgagccagacatagtgatggtagctaggtgtggagtaagacgatgctgacaaagacgtgtctgacaaaggtccattcaattaggtccatgtaattagggtacccgggagccccaaagcatgctgagatttatgtggcaccccatagataagaaaacctgttggtctgcttttctagattgtagtaagagtgctctctgagaaggccacagagttcagcctactagagctgtcccaggaaactccaaggaaaagccaatgcctcagctgaacctgcagggctgtagaattggttgcggagagatggggtaggggatgcttcctgttgcctaaatacacaggcaggagcagctagtgtctccgaaggacccagacgccaggtgacctataggcctatctaacccgtgccataagaaggagcttgggaagccacatcttgtagcagcaaagggagggctggatgcttcaatgtgtacttcagagataaagttaagaaaaacaatcctggaggcagaatgactggtacatcatggtgggagtcaggacagggcaaggcaagggcctgaaagatggcactggtgtcagggaaggccaaatgctcatttggcttagctgtggagggggtggattatataagacagcaagtgaggggttgcctccatttctctttccctccctccctcccttctttccttttttttgagagggtgtcactgtgtagcccttcctgggctagagcttgctatatagaccaggtggactttgaactcagagagacccacctgtgtctgcttcctgagtgttgggattaaaggggtgcgccccgatgtaccactcattttctggatatggcatttgggatgctgtaaggaaccagagcctcacctggttagcaggcttcagaatcacatcaggtgtcctctttggctgccgtttggaggcccttgttgctgcctttttcattcatgttggagtggacacactaagcaagtgtctctctgctgtaaggaggctctaggccctggtattcataataataagaaaggtttgggtttttttttcctttgtgcttcttttatttctgtggtttgaagttgtatgcctcagactcactgctgttggacattttcagaggagtgggaaagactgagggggttttgcggctagtattgattaccttgctacaaggaaaaaatgtaattttcaatgcagagaataaatatttaaaatgatcatttctccatctgcaccaaccggcaaagttcacatcgcctccaactgggtttgtcacaaaatgatctttagagaggaaaagaaaagccagggttggctttaaaagtcactgtactcgtaatgacaccttcttagggaagtctggcatttagtgttcaaatgatgagggcattcccaccaggtataagagccttctgcacacatggaaagagctgagctcccacaagacagagaaggcacaatcatagctcacaaaataagggagtaaaggttgtcccataagtgtgtcagaaacaatgtggcctcgttgtaaattaaaacagaacagactgttttgatagatagcaggctgggacatataaaacaggttagggtctgtccgggtgaggaagttgatgagcatgcttttctgaagaacagttttccactctctgtcaaagagttacagtttgcacacttttagtctgatcatctagatccaagggttaccatgaaggaatgtacacgagaatgttcatatcaaattttataatgaaggttagaaatactctatgtaatagaatttttgaaatacatttacaacatagacatctgccttatgttgccgttataaccatgtagaatatttatttgaaaaacagtgttcattacatatgagggagaaagagggcaaagaaggtacagtcaacttggctcttgtgttagctccaaaatactaagttgtggcaatttttttctctcattcatgtttttggtactgtctaaattttctgccatgtctatttagtatatttcaatttgatataataaggaactttctaagagtccaaggtgacctgcagagaaacagaatggcctcctccgggcgtcagatgtatcaccttacgaaaaagcttctatctggggtgattttatagtatggatggagcctggttttctttatgatctatgatccacttagaacaactggtctacttgttggttatgaagaatccagatgcctttttcattaagtagagtgtttttgtagtagaaaatgaaatgttcttagtctccattagctccctggcctaaagaatgtttttggagcaagttccatagatataagtatatttcacagtatcacaacccagtaaacacaactacataaaggaaataaagtattctaagacacccttcataggcgatggactcgtattttctatggtgttgagtttaaattttctaaatgcagtaggttgtggcctactaaatcaatttcacagtgtagtctgcacattgtagtctttcacgctgtagtccagttcctggggcctgcttgccaggtctcctgctttctctgtctcccttcaggttggctggatagtcttgcctcacctcatactgagttctcggggagcaggagctggctttctggcagttataccttttgttattgttggcatcagcctgaatatatccaagcttcctatacatagctataagctcttatataaagcttacaaaacacttcaaaacattcgttatcaatggtgatgctaccactaaatagtcagtccccatgccctctgcgccatgacaaccctataaacaacactgttacagtaaaggagcctccgagttcctcttctggtcactgagctgttgatacggtatccagcacagtttacccataagtgaatctacgtgtgtggtagggtttgaaatagtggttttgtgttgactaagtatccagagaagagagcaaatgcctgcccctctttctgtgtgctgatagctaatgttagctgatagctaatgcagaccgctaggcttaaggcctactgtggtgacaacacgtgatatcagtcatgagcatcaaaatgatgctaatgattgtaaccttagaaactctcaattacaaatgacactgaatgtcaaaaccatccctggaaacttgaggcacagtacaatacagtcaggagtgagggagggagtgtactgaaagcgcccagaacaacatctgctacatggttagtactgagatgagcgttcgttagcactaacacgtaaacagcaaaagaatattacattcgatcatgaattagaacaggacaatgtatcctgtttaagtggaagtgtttgttaagtgaaacaatcttccctgaaaatccctttatgacttcagccttgtctaaattaaagagcttagacaaaactaggatgatactagaaaaatgatacttcagtataatattcctaagatagagggcttcttcagtgggcattcacaggcaacctgccactgcagaagacagggatgggggcatcaaattggagccaatggtgaatctccttgtggtatacacaccaaacacttaggataacagctggcctatgtagtacacgctcaataaatgctatctgttctttttattgttaccttgttgatgatatcaaatatattttactgtatagagagcaaatgcttgcctcctcaccattacgtgtctgggtaatagctgttttgttttctctttgtggtggcttttactcctggatctacgaaccctcagtttccaagaacaaagctaaacatccaagtggagaaaggcagaaaagcctttgctggggaaagcgagcgataaaatagtgcctaagagaaaattgttcctaaagctgagttgggccaggcgcagcagtatgaccctggctcccagctactcaagaggctgaggaaagagggtcccttaaatcaagggaggttagcaacaaggcattccctttcagatgcggcagtgtggggcatcagaaatgtttactcagatatattggtcaaaggaaaggaaactttaggcctgcattaaagctccctgtgggtttctgtcccctcctgcctgtcactgctagctccccctgactccagtttcccatatactacagatcttataaaccaaccttcccctcttgacatttgccctgccgccccatagtttatttccttcaaagcatccactaacaactttatgataaacttactcattttgtaaaacgttctgtcattatcgtacattttaattggaacattctggattcagtatctgaatgctggcttgttggttgaacgccattgaagacattacaaaatataaagtctggaagaaagaaaaggttttgaacttcattttctctgtatatgaatatattttcgcatgcgtctttttcctggtgtggagtctgtttctgtttaaatagctagctatccctttgattggacaccgaagaatagagcacctcactgttcgcatattttagcaaatgtattcattttgccattgcaacatgaacattattactctatttccttggatttatgagattgctttctttgtacataggatcttattttgctatggaaaattatcatgggcattatatgaaatgatttttctacttcttattattcctttcttagtacacaaatagacatgatgttttttgagatgcaattctgccttggaaaaatagcttcttttggtaccttcagttttgtggaaatactccctaatgaacccaatgtttttcatttcccaccacaaattgtgtagcagttctattagaaataaatactttacattctatagcacattattatgttttaatttgtcatgagtcattttcaagcttgtatatttcatgatgtatatttctatgcatatttcttgtaaagggttgtgggagtttacttgtgtgtatgtattaatcgtggcaggggtaaattactcttagttaaaataaaataaaactgcatgtttttagagccttctttgcatgggaggaagaaaatgaatacttttgaagtcgttgggtactgcaaatttttttttctttctgaaaactggagcctatttcccaagtcatccatttccagagactgttcctttggaagagagaactggttaacgtacaactccttttcacacttttatttagctattcacagagtctcctttggaagaatgacgagcctcgtgtaagtcgtctgactaccagagaaacactggttaataagctgcagcgttcactggtcatattattcacagcctggttgccacgaggcaattgaattgtccttactgacctgcgtgattgcctgtgcgaccccatccttaacaaataggccggtttctcctgccctgtgtgtgaactaccctaggtagcctgtgtggtgcactggtaagcatgcacgcacatgatttgttcctagatggtttgtctctactgtatgtgatgatcagactggattctgtgcttattcctttaagatgcattgtgcaaatagtatttaagtcgtttaacttcaaaggaatgtgtctacatacaaggtgtaagtcatttaagataatgtggaactacattccagttatttccatatctttctgcattgccctgcatctggtaatgatcctatccataaagcaactttaaaatccaccacgctccattaaacgcatttacgcttcaccgtaggcaattaaataaatttaactggcctatataaatgaagggcttgtgtcttttgtggactataaagtagtttacatgctttttaagtattgcctcaaggtacacctaaatttagatactttgacttaagatgacactcaggaagtttgaggcagtgcattgtaccatgggtaattctctcgtttttttaactgagaagggagatcttttgtcttcggatgtattaagaaaatatattttaaatgatatgaaactcttctttattggagttcaagtcactaaaattgtggcattataatgtggtttaagtaatataaacacattatctgtgcctcagatgttgtgttgccagctaggaagacattaaacggttggaatgacagccgcactacagtcagaatgagtgtggctgtgtcacatgatgggacagatggctcgtgtcttagaaagtgaggaaaagaagcccacatgaaaacacgattttaaattagcttatatataatacagttccgtgagaaagacccagtagatacgaaatgaggagtgtacaccatatatgtgatttatggtctccatggcagttacttcaatgaaattggtctttagtttttatcttttaaaaatatttttattaaatctttgaaaatctcatacactgaactttgatgatattcaccctccttcccctaactcctcccaagtccacaccctcttccatatccacccaactcttgtgtcctggtcagtttttaaacacacgaagtcctatttgtgctgcctgtatgcatgtggccatctgctgatcaagcaacctgggggacacagcctaggagagaaaaacctccccagccccagcatcctcctatggcaatagctcctcagcccaggagtgggacctcatggccacctccatcctttctggtttccttgagctatgcactacatcatagatcctgtgagttcatatgtgcagctgccttgtgtgtctggaaaacactgttttttgtgttaggcacccactgcaaataagatctttacactcccctcttccacaatgatccctgagccttggggagagtgagtgtgacatagatgccctagtgaggacaaaggattccacagtctcttattctctgcatcttgactgttggtgggtctctgtgttaatcaccttctactacaaaaagcagcttctctgctgagatttgagggatgctctgatctacgataaatcacctgaattcagcttactgctgcgtctacttcgtgaggtactaggttctgccctgacttgtaatctgactagccacagttcctgttaacagtgccaggtatgagttccaagttaaggagcaggccttaaatccaaccagagagtggttggttattcccatggtgcttctgctactactgtgtcaggggcatctcttgccagaacattcattctcgtacttctcagggttcacagctgggtaagaatggtgattgcttctcctttggtagtatgcatagtacgttccaactctgtgaaaaccagccaggagcaatgaagtttctaggttagcaccaccagctccatttcttcatgctctatgacttaagtttgtggtggtcaacagtagggtcttactgctaagttgtagggggtaaccaagagagagagcagcctgtaaggtttgctggtctatgggaccctactggtaacagctccaggagaggtaacctgttcctggcaatgagcttattattagtcatcaaatgaaaagataatgaaaatatggagcagttacacaaattttactcaatttggctagaatcttctggtctttcccatcatattccaatcaagaggacaagtggagagagagagagagagagcaaacatgggcatacctcctcaattatccatcttttttagctacagtgaattttaggaggagagttcagctgggaagtatttatgtgagtgagtgtgtgtgtgtgtgtgtgtgtgtgtgtatgtgtgtgtgagactgtgtgtatgtgagtgtgtgtgtgagtgtgtgtgtgagtgtgtgtgtgtgagagagtatgtgtatgtgagtgtgtgagtgtgtgtgtgagagagtgtgtgtgtatgtgagagagtgtgtgtgtgtgtatgtgagtgtgtgagtgtgtgtgtatgtgaatgagtgtgtgtgagtgtgtgtatgtgagtgtgtgtgtgtgtgtgtgtgagtgtgtatgtatgtgtgagtgtgtatgtgtgtgtgagagtatgtgtatgtgagtgtgtgagtgtgtgtatgcctgagtacagaacccagagttgactgatgaccagcaagcaccaaggaccctcctgcctatgtgcccacacacccagcattgaggtaacagacatgcactgcacagcagacttgtgtggacgctaaggaaccaagctcaggttttatacgctgtggcagacactaagccatttctccagcctcagtgttgaagtctggtggatttttacttgaaaatgattttttccataacatatagtctgattatggtttcctctgcagatcctccccacctctccacccacccaaatcccaaatctgtatcctttcttcctttgtttcttcctctagctttctctttctttctctttctcttctttctttctttgtttctttctttctttctctctttcttctagctttctctttctttctcttctttttttttctttcttcctttctttctttcctttcttttattagaaaacaattgggcacctaaaaaataataaaaatgaaataagataaaattaaaacaagtcagaataagataaaacaaacagaaaacaaagagaaagcacaagaaacacacagctgcagaaacagcccacactcccacacatagaagtcctgtcacccaaacagagagttctgaacactgatacgtgcgttaaccatactgttttttcttttacaatttaaatttattttttctaattggatattttctttatttacatttcaaatgttataccctttcccggttttcctccctcctggaaaccccctatcacatcctccctccctccgcttctctgagggtgttcctcaacctacccactcccacctccccgccctcgattcccctacgctggggcatctatcgagcctacttctggctcgttgtataaaactgcctcatgttcattagccacccctcaaggtgtttgaatgttttcttcctttagatctttaaacttctgaagtctccaccatacagagaatttccttctcacccaccctcctcagaggacttcttctgaccaccatgctgtctctatccctttatctgacttcattgtgtttatcacctaacctttaaaactgtgttatttgtctgcctgcagctttagtaaagtccccacaggttaaggagtttctgtttattcctctgtctccatcatacaccacgcggtaagtgctccagagatacggatcaaatgaatattatcaagaagacctagggaggaatgttcccacatgcagttccgtttgatcagttttgttgtgatcagtatggttaccttaatgtacctcttgagtttcctccttccctagaattcctgggctttgtgcccggaccatctactgcaccagagaatcactctctgctctcacaggtgttgggatgcggaattctagactctcctgccgggattgcttagaagtagcgttcactttcttttattagtttcaggcgatcacaattgggttcaagttcgcgttcagtcccagcacacagcacagccacacaaaggatagttccctgcccttcccccacctcagccccatccccttctctactaatttccttgagactgcatctcacatagtttggcctggcctcaagtgctctttttgctaaggataaccttgaactttgaccctcttatctcttcgcctcaagagctggccttacaagtagatggatgccaccatgcccagctgctcagagctgggggtcaccccaaaggctctgtgcgtggtaagccatcactctaaaaaccagcctcgagatctcgtgtttttacaggtatttgtatccttgggccaggcacagctctgtgtgtacagttcctccatctgtgggctgagttccagataccttctttgcagcttcccgtcatgccaaagagcccaggccttgtctgcccagttcagagaacctgccttccatcttaggtcaggggtgtgagccttagccctcggtacctctgacttcttggcatctatgcccatttgcccatccccgacttctcaccctcacctagaactgtttcttccctgataaagattatgctcctgctgagcccggatgtttcctgtgggctttgggtgagggcgagtttccacatctcttagttaagcatattagctaatgatacgtgtcagagttatttattttaacattttgtaagcaatgctcctaaaatgcttgatgcttccatacatctcaaaggactgaaactcaggatttatctttatgagtgtgactagaaatgtgtattctatatctctggttttggtgttttgtttgtttgtttgtttttgtttttgttttgctttgttttgagacagggtttctctgtgtagccttggctgtcctggaactcactctgtagaccaggctggactcagactcagaaatcgtcctgtctctgcctcccaagtgctgggattaaaggcgtgcgccatcactgccccaccatctctgggttttctaaaggaaaagttctttattaattatgaataattcctgatccattgaactttaaatcttcttagaattacatgttttaatttttgtctaggctttcaggagactacatagaatgtaattataagggtaactttaaatattgaaagctattgttgtttgtttttattatattctttatattaatattaatacaaaacctgtgctgactgagtactggttaccttccaagtggttgtgccttctggatgctataggccaacattaattttatcgttactgtaaaatgtatcttatttatttccaagttgaaatgcacaaacttaaatacacaatttcttgtgtttgaagaaataaaatataaaacattgctgtcatgtcacatcaagaaatttactctgttgtatgtttcattcacaaatttatgtttttctcaccagatactaagacgtcttacctgaaatgcgaagactattctaggaagtccagtacagttgaattcttggattcaacagacagaaactactttaccaaattatgggccaaactttcatccaaaaagtcaccagtggtaagggcagggcaggtggggtaaaagtgattatagaagcgtaaaagggttcagggtcacgcctttaatcccagcactcgggaggcagagacaagtggatcgctgtgagtttgagaccagccgggattacatagtgagaccctgtcttaacaatgggggtgaggagtttcggagattattgtgttttcccaaacgattctcttacatatgtgagctgaagacaagattctttctccccctgcaaccgcatccctcggaatagttcctgtgtttaaaattgaattttcaatgtaacttttctagtaccgtttcctcaggctcccagtaaaaagactggcgtccagctcttctgttttgcagtagaaagcaccacaataaaacaaacacagtaaaatgtatatttcaaggggcgagcggcgggaggtgactatgagtatctgggggaaaatcaagtccactccagaagtgtgttttatgacagcgctatataaagcaggcctgtaacgttgtcctaactcagcgctctgggaacatctggaaattggcccatggtaggagtgtctaattcacaatagagcctgtgttcagagtaggttgtgctcattttaatgagtaataattttttatgtaatgatctgggaatgcagagacttaaaaaaattacagttgcagaatatacatgtggtggtttgaataggactgcctcccatagactcatatgtgtgaatggttggcccatagggagtggcactataaggaggtgtggccttgttgaaataggtgtggtcacattggaggaagtgtgtcactgcagaggtaggctttgaggtctcacatgctcaagctaggcctagtggggcacacagtctctacttggctgtctgtgggtcaagatgtagaactctcagctccttctccagcaccatgtctgcctggacactgccatgcttctcaccctgactataatgaactaaccctctgaaactgtaagccagccccagtgaaatgttttcctttaataagagttgctatggtcagggctggagagatggctcagtggtaaagagcactggctattcttccagagaacatggattcaattcccagcatgcacatggcagctcacaactgtctgtaattcaagcaaaacaccacagtgcacataaaagagaggggaggggagggatggctttcacccccgcctttttcactctttctcctgctccttctctgccttttctttttcctcctgtgccgcctctctctcttccttcactcctatttatatccttcctgtttttcctcttttcctctttctctcttccccgtccttccctttctttactccctcttttctttttccttttcttctttttctcttccctttttcctttttcttcatttttctttttttataccccttctttcccccctctttcgcctttcctgtgtctcccctccttcccctctcactccctccctccctcccctccaccatcccaccctttccttactatacttacacaacccttctcatctctnnnnnnnnnnnnnnnnnnnngtttttgtgtttgcgtattagagaaaagcgggagacggggaatggaacgaacagcgacggagcgagaggggggagaggggtaatgggagaggacgagaacgcgcgggggacgagcacagacgcggaagggtaaaaaggggaaggccacggcagacacaagagaccagcgggacagcgcgcgggggaacgggaaaagagaacgagcaaagaaggacaccaagcggaggagccacggcgcggggaagacgcgggaggggacataacaaggggagagaaaacggggggggacaacaaggaccacaagcggggaaacgcggggcgggaggggcgccgaaaacagggacggggcaaaaggctctaaactggccggccgccccgcacttctccttcttggtgtcgataatccacgggggaagcgcacagaaaggcgcaggagagcgcgggaggggaacggggagggaaaaagaaggagagagaagggaggagagaagaagccgacggagagcgagggagaagggaaaaacaggaagcacgagggaaagagaacacgacaccacacaacacacacacaagagaacacaacacaacagaacacacaagaaaaaaaagaaaagaatataaaaagattggctcattgagtagagacacttgtcacctcctggccatctgagttgagcccacatgctggaaggaactgacttgagccagttttcgttttacatgtatgccatggtccacacatacacacaaactaataaatgtcaaaaaaataccccaaagatgttgatattatgaaataataatctttctttaaatgcacatacaattaagatgtttaatataaaaaatctaagtaaactttttatgtgttgtacctcagttataataagaaagacatgaaggctctacaggaagaggctggagagacggctcagtggttaaaagcacttgctgctctggcagagagcaattccattgcccacatgctggctcatgaccatcataattctaggagctcgcacacacacacacacacacacacacaggtatttactcatccacagaaaatagaaatcttaaagaaggaggaggagaagaagggtctaaatggagacaagatgtcctagggccggtagaatgcgaatgtaatgactaacaccagcccatcagactgtggtggcttaagcacacatggttcagcctctggaaagttactaaaagagaattaagagaagcataaattttaatctaactgacaaatagtgtaacattgtactggcagtgctaaccagtacaacaaataaccacaaaataaacagtgtggagttcagaaacagttaagaaatgcacttgacaaagctatcagacattcaataagtatgttttttagtacaaggaatttcagtattatagcaataattttaagtatccttaaaaaagacatttctcagatggtataataccatatgcctttaatcccagcacttgggaggcagaggcaggtggattctgagttctaggccagcctggtctacagagtgagttccaggacagccagggccactcagagaaagccagtttgtatttaggtgatttgcctgtatgtgtgcatgggcatcacatgtatggaatgcctgtgaagcccaaaagagggctggattacagatggtagtggtctgccatgtgggggctgggaaccaaacctggggcttctacgacagcagcaactgttcctaaccacccccaccctgggccatcttcatagctccctaagatatgttttgatgagggtctttaagtaaaaagattaataatacatctgataaaaagatgtataatgtctctacataggaaaatataaaaatatttagaaaaaaaaactaagtggatttatgaattacaagaattaccactatgttcatgtcagctctcttcaaatctacagatatgtgagccagtcaaaaatacccagagctctttgtgaaattgattttaatatttgtatggaaatgctagcactatctcagagagaaacctgtacatgcatgggactgacctgtgacgagcgtggcaggaagaaaatgagagctttgatagaattagctgcttacaaatgagggattacatttcccaccagtcctacaccacacacaaaacctaagaggtttgcaatctatgtagcctacacactctatataactgtgaaaagcaaaacaacacttctaaaagataatgtaagagagattcttatgaccatgacaccatgaatagtttcttaaatataaacacaaacaatgataactcaaagaaaatgtagaaacaccgaattacattaaaattaagaacttctgggcaggggagatagatggctctggctctgaccatgaggaccagagttcagtccctggaacccctatggcggaaggagagaactgacccctgaaagttgttctctgagtgccgcacataccctgaggcacgtatgcatacatactaaataaataaacaaatgtaataaaatttaaattaagaacttctgttaataaaagtgccattaaactttaaaaagacaaaccacaccaagatacttgtggtgcacaagtgacagaatatttatattcacaatacataaagaacccttactggttactaaggacaaagcatacaatccatagggaacctacacacacacacacacacacacacacacacgcacacacacaaaatacctaggtgatcagtgatgttatatggcaggtgtatataaccacaagacaatgcaggttgtaaccatattgagatgcttataagaataaactaaaagtaataaattataaaacagacttataacacatgacagtgaaaactcttaaatgacaacggatgggaggttaaacagtgtatgtagacaacagctggacatactgacattgaacatgcatgtgccctatgcctcagttaagacattcctgacatatgctcaatagaaaggagaggcgtacacatcaggagtacagagtatttacaataatgtcagtcacagctgccctaaactggtaatccagatgtgtaaagtgtcaaatatatagtgaactgtgtacagtaatgtaaatgagcatactttgatttaagcacatttgaaaggcactgactttctgcacttttaactcatatcagcattcaaataatctcacctttggtcggtggtgaccttttcagttgacctccctaaaatggagtctttgccatttggcatatgtactggctaattttgtgtcaacttgacacagctggagttatcacagagaaaggagcttctgttgaggaaatgcctccatgagatccaactgtaaggcattttctcaattagtgatcaagggggaaaggccccttgtgggtgagaccatccctggctggtagtcttgggttttataagagagcaggctgagcaagccaggggaggcaagccagtaaagaacatccctccatggcctctgcatcagctcctgtttcctgacctgcttgagttccagtcctggcttccttggtgatgaacagcagtatggaagtgtaagccgaataaaccctttcctccccaacttgcttcttggtcatgatgtttgtgcaggaatagaaaccctgactaagacagcatagcaggctggttggtgctcttctatgttacctggcacagacctgttgttgaatgtcaagtgacccccatgggctgtgtgaacacgtggtccccaactactgggactgttggggaagccggggaacctttaggaggtaaagccttgttgaaggcagtgggccttggggtgtgtagcctggccccgctttctttcattctctgcttcctgagtgtggctgtatgaccagccagcccctgctcctgccaccatgccttctctgcctgaagccctatctttccctgctatgatgaactatgtccttctggacacataagcccaaataaaccttcttcttccctaacttgcttttgtctgggaattctatcacagtagcagaaaagtagcaaagacaacttagagctgtttttacagtaagcagtgttggttccttaagtgagaggttcaatgacacattgtggccatcggggacacccattgctattggggtggccattacttctgggactctttagaggaaaagacactagggaccaaacccagggccgtgctcaggctaggtaagtttccaccactgatctatagtctctgccctctggtccttttccctggctagatacaatattccatgagttcaacctgatatttctaattaaaattcagagcctcgtgagttttgctttttctattacacctttatctttcttgcacactgagaatccttcccagaggcttctcagagacctaggcaatgataggattatgatagtccgttaaattactcctctgctctatcccacatcatgagaacagcctctgaataacaatactaatacaatcaacccattctgaaaactgaaatgcgctttttaaatgtcttcttttcttctctcattttttaaattgtctttttttttttgagaatgtcatagaaaccattttgatcatattcaccctccccccgactcctccctgctgcatccccccttccctccctaactggttctgagtcctctgctgatttttttttcaaacctcattaagtacagtttgtgttgcccatgaattcttgcatgtgtggtcttcagtggatgtgtggtccacccaccggactgttcctctccggcagctgtcagtggccagtatcctctcatctaggggtggggcgttcattctcacgttccaccatgttgtttaaggctgtgtgacagctacacatagtcggtctgtattttatattaattctaaaatatgtatatacttaaggttcattagactatggcttagcatccagttgttgtatgagtgtattctgtgtacagaaaaagctattgaaaaatattttctgagttcttataagctaatacctgtccgttccacgcgtaggcattgtcttcagagtgtagtgttccttatccctgtcacgggtgcttagcatttgcatgttgagtctccacacctgaaatacccgtccttttctcccagatcttaattcatatcctctctctctctctctctctctctctctctctctctcatccttgtatttcttctgatttagttgtttctgtagtaatatttccccttgtatctctagttcatttttgagttctgccactccatttgtaggcaatttaattataattttatttgtttttttaatgccttgtgtcttttacttatgtctttgtgtttactttgagacagcaggttacagaatttaatctgttctatatgaaagctttgtctgaaggcctggggctcacctttatttttcctctcaggatacccgcatatgaaatttaactaggtactttctgtcgccactacctgagctcctcctcagtttacaccattcttttttctgtgggttttgcccaattaaatttgtctttcattctccttagctgctcttggtgcatgtggtggttggcatgagatgtcccctgtatccgcaggcatctgaatgcttgagcctcaattggatccctctgtgggtctctctctctctctcttcttgtgcgcgcccaactggccaggaagaacgatgctgcaacaggatccttctgcacacgtttattcagtcctgtttcttcttgtttatatctcccttgtttatatctctcccgaaccctgggcctctcactcttttatactctcagttcccatccacgcacagcaggccacgccacctcaccaggcacgcagcttcagctaatcagggcagcagggacacatctccaccaaaatggattcaccagtatcctggtacacctgcgcagctctcaagatgtttgtggcttatatgaggaagtcaggtgcaagtcataagacttagctgcagtccctggcgcctttgggacggccgccacacctcctctctctctctctctctctctctctctctctctctctctctctctctctctctctctctctctctctctctctctctctccctccctctctccctcccttccttcctctctttctttcctctctcctttcttcnnnnnnnnnnnnnnnnnnnncctccctcccccccttctcctcatggagcccctggaaccacaagccggaatgaacccttccattggcaatgatgttctattacagcaacagaagaataagtaacagtgtgggagctggcctcagcaaatagccccagtgaggcagcttcaaatttttagttcattcagttcctccagctatggccgaggtccatcctcacccactggcagagttgggggtgcccatcctgggtttcagctgtgggcttgagggggtattttggctactggttttcttgtagagattttgattttgctgtttagctcctagttttttttattctttgacagtttcatacaagcatgaatatgaatgttaacagtttccaccatcctccatgtctcccctctcatccctcaccctttcccactaaagccttccattttcctaacaagcccatcccttccttccacgtgtgctccgtgtgtgtggcccactgagtgtagagttgcctgtatgcatgcagggaggaagttatggttgctatgtgtttttatgtgcaggccgtgggagatccaaaagttattttgagccttggagtggggagcagttagcacagagtttgagcactgcctagcatgtgcacctgagattctacccccagcacctcaaaatgaaaacaaaaatgcagccctgtcgatacaccattaggaggacttatcttcccagctatgacataatttagatcaagcatcaaattatcatcataataaaaagaatataagagaaattgcagcagtaaatgtttgagcatggtgtgattcagggcaaaagcataatgaattcatatagcattgaataataaccaaaaaggagccagcaagatggtcagtgggtaagggcatttgctacataagcctagtgacctacaatcagtctctggaacccttggaaatatggaaggacagacatttggccgggactcagatcagtgcattgctcagctcttgacagcgaaacttcttgcagtatctgggaacgcagaaactcacaactgacagcatgcagagagcgagagacttcagagcactcggtcccaagtaggatgtcttcatcagcatttctcctcaaggctcagggaactgtgtggaagaaaggctggacagttgtgaaccagaggtggttgatgaccaaaagaaacagcttcttccagacacaacaggactggtgcacatacaaacccacagacgctgtgacagtgcacacaagacccacacaggttcaaacagacagtacagagataggcccgcctctaaccaagcagctgtttaaaactgacagctgctgggaagggggggtgggaatacattttccccaatagaatattgctgggtctatcaagcacactccagggcaggccccatgcccacaagtaattggccaacataaaatgaatgctatgttttgtatgtgtttccttttgagtttttgtatttttctgtcttattgttttgattttcattttttgagatattttgagaacgaaaagataaaaaccataaagtcagatgggtaaggaggtgggaggaactgggagttgaaggaaggaaaagaatatgatcaaaatatatcatatttttaaaaacccttttaaatgaaaaatacgggaagagcaacaatgcaagaagccttacaacctgcacacgtgcactgaaacacaccctgccccctcccttggcatatacatatgtaacagtattaattttaaaagagagagtacataagtaattcttaaaaaaaatattcccagagttggctagtgagtaggtattctatttcaacgcgaagccattagatgcatctgtggagttacttacagcttttcctctgtgaggcttggataggacatcttcctttctcatcttatcacaggctccttccagatctcaacacacatcttcttcttcttctcccctggcctctaagagaccagagtgcatggccagagaaagaggaaggaggaaatgatcttgatagacagagtgtccatccgagagcctgtggccagtgagctcatgagagctccagtgaatcgggttccaaaattaattttaaattcaaacacttaacctcaatttttttttcattataggagcagttgacagtaaattgcaccccagataattttagaaagggaagcatcatgcactccgctgtacagtaaagataattattgagttcagccttgtgctgtgtgcaaggcatgcagtagtgatgtagtgactcaagagatatctggtgtctgggatgcgccttcttttgcagagatgctgagtgtgccagttatgatattaggacagagcagagccactcctgcaggcatatgcttttaataaacacaatgagactcacatcagtgccagtctcaaaacatttaatcttaaaaaaagtttccccaaagacattaaaacactcgacaccaggccacttcccaaggcttactgtaactgactgtggctggtaccctggcatgctcatttgcctccattccttctgcagctttccatgaaaacaacctacagtggagtctggtcatgaaacagaaaatcaaagcacctaggcttatttcagatgaagttattgcatgcggtgattagggtacttcaaatgcactcgctgttaaagtacatgctataatatgcctcttcttaaataacagtcttttatgcaaaacaaataaggacttgctaagtcttctttagtaagaattttatgtctgggagcttaaaagtggggtgacccagtgtctgaatagttgttaaatgggtcaacagtccactggaaggtctgaggagaaacacctgtggtggctgtaaaaaagtgtgtacacttttttcctccacccccccccccacacttttagccctatatttttccatgtccctttttgccaaaatcatgaacccttttatttgaaaaaaatgtcttttatattcctatattgctacccagtgttttttaaggatttataatgatgatgatgatgaaatgcagaagaaaaaaaaaactcttattttcactgtttccaggacatacttaattatggttaaatatatttgttcaatcatttactccatgtgagaagatgaaagtcaactctaccctgtgcccttcagaagtctataatctcgtaagaatgatttaaaataaaactcaaggcctggcatgatagcacatgtctgcaaaggcagcagaggtcactgcaaacctggtccacagagtgagctccaggccagccaggaccagacagcaagaccttgtctcacacaagcataaaacatgtgaccgtgaaatactattgaaaactatcatattctgggcttgggtggggctcagttgcagagagagcctggctttgatccttaccactgcaggaccaggacatgatggctatgatcccagcactgagagaaggaaggaggatccaaagttcaaggtcatctttgactatgtagtgagttgtttgagaccaggctaagatccgtgatatcaatcctgtctctgaataaataaataagaagtaaaattacaaagtaaagaccttgacactattatttgccaaataaaaaattctgaattaaattttagtgtctgcaaagtatttggcttatttgtaaaatttgtttttatcttcccactaaataattgctaattgttttctatgtttgtctgccctgccccccaccccaccccaccccacccccttttccacatcatgtacttggaaacctcaggtaaggagaaaatgattatagctattttgaccatctgacatctttttcacattgattttctgatcatgtgtcttgcccaggaaagagagtctctccacagacagcatgaggcagcccggcaggcgctcatggggaagacgccccgtgatcacacgctcctgtttcaaaggtagtgatttactacactggttgatgcctgggagatcttgaattgatgctccggtgcctacatataccaaatgaacccttaatcaacaatataagcagagatctctgcacccaagtggatgcttgtggtccagtatcaaactctgtctagaagttgtagctcttcatttatatattgtttcaagaggcaccgcaggcctacagctactagaaattggtggttttgctgactgaaaataaaacaaccttcctagtaggtgtttgagtatcagtatcggcctggaccacggctgttcttgccctgaaggttaatcacatcctgttgagttccctgtacttgtctgtcaccactgcccaaacaatgggaattatttgtggagtcatttggtcagtgtttcccttccacaccaggctataagtcccagaagcatgaggaccagggcatccctatcaatccatgaacttttggtcctgggtttaaaatgttttacttagtgcccaccacatagtgagagcatcataggtattactggctataacagctattattaattactgttttactaattaccatgtatgaaaaggcacaactgagcctttttaagtttaactcaaaataaccagatcatgagatggttatatatttcttgttattttctcattaatgtcatgggtttcagtgttctgaatcctcctttctatgtgaccttttagaatatttgagtaatgaccatgtcctggccttttggctgaaatcaagtatggaatgtttgagtaatggagaaagtcccaggttttagaaagttgctaagatcaataaccaaatctcaagaacagcattcaaaaattctttttagtaatgttatgaatgcaaatacctaggtagctgaatcttaaaagccatttgaagtttgtttgtttgtttgtttgttttttggtttttggtttgggttttttttttttttgtatcaatgttgcctttcttgtctgtgatacatgttgggaatctttagtcagtataaatgatattaaatttttatctatttgctctaacatcaaagaaagtataattacttttttccacattacattatctttaggtggtctgattcaaaatgtaaggttgtatgatatatgcaaagttctggtggggaggggtgggcagatggtagctagaagatggtgttcactactacatctgaagttaagtcctgtatgagcgctgagcaacagatatcatgcctcttcaaacccatgatccgagggtttgaaaataagaggtccaaatggactgccaggggcagatggatgctgtggacctctgtgcacttctgtggagttggttgctgtgcacacagcatcactagcaaggctgcagtgagtgcgctgtgatcactgtgatctgagaagtcctacacctctgaataaaggagaagtagtattccataactagtatttaattcagagcataatattagagtttttagaacggttttacttatggaccatttcaaagaattagattagaaacaagaaagggaaataccccttttagtttttctaggaattagcataatgctatatagttagatctaaatggacgagggttatagtggagtacatacacaattctcagtatcagtgattagaggcaggaggactgtttccagtacatatgtgtgtcttcttgatgttaggctgcaatgacgccgccatgcaaggcaagtcctgaagcgagtaatttccctcagcatgtgtagttctgtagaaacagtggtcagtattaagattttgcctgtatgtatatgtgatcgcaccataggatcctttctgttttcaggggtccagtaccgatacctactgtcagtggccaacagtattttgcaacaatagatgaactacagaaaacgtttgagctctctgacgatctctttaaaaccccctctggaacataccctgaaacaaggttagttggattggacagttattttctacaggtttgttaaaatcatggtttccacttgtaagcttttggtttgttaaaatcatggtttccacttgtaagctttggagaaattctgaaactgtgcaggaggcccgcctgtcactaagatctgtgaggagcaggctttgtagagagcatgtgacaccttctctgtattctgggggagggacagacacactaaggcagagcagggggcggtattccatctagcagcagataaaacaagaacttgacagtactgcaggcttcctgtagtaaggcagatccttcctggtagagcagagggtgataggcctccagtctctctgtgctctgactcagctgtgaccttgactcctggcttacctttgtcccccttcaggtgtttttgttgttgttgttgttgttgttaagatttatttatttatttattttatgtgaatatactgtcgatctcttcagacacaccagaagagggcatcagatcccatttcagatgggtgtgagccaccatgtggttgctgggaattgaactcagaacctctggacaagcagtcagtggtcttaactactgagccatctctccagctcccccgacccccacccctggtccagtatttaacgaagttctcttggtttccactgattctgaaggcatccagtagcttttcaacatcatcttccttaatatcgatgtgagccagatcggtacctgtaatttgcaactaacggctctgattagtgcattatcgactgatggctggcattttaaaaggccatctcaaggtctcaatgttctaatatgtcaaaaggcagtacaaaagctgcatacaaccggttgcttaaaattttatttagagcgagctgggaaggtggcttagaaggtaaagtgcttgccacacaagcctggggacctgaatttggatccccagcacccaaaattgagcacagcaatacacacctgtaatcctacaactgagaagacacaggcaagaggatccctggggcttgcttggccaagccatcttgctaagtaaatctggtgagagaccttgtctcaaaaaataagaattgaataaatcaataagtagataagtaaataaatgaatgaaattaaatttgaagaagacgtgcagtgtcagtctcaacctctgacctccacatgcacatacacacacatgcatgtacactataccacacacgtgcacacacaaaaacataatcacaggggttttttaaaatataaatgtcactaagggctggcaagttggcttgggaggcgagccacttctgtgctaggctgatgccttgaatttgatcccagaactcacagaagggtggaatgtgaaacacaactcctccgagttgtctactggcttccatgcatgctccggggctcatgaatgcctgcacacgtgctctccctcacgcacaactaaaaaaaagaaaaaatgaatttgaatattcctgacatgttgttgaagacattgaaaaatataaaggagaaggcaaaactgttttgattacttctgaacatttactgttaataaagaattcacacagagtatcttgaaaaatactaaagcccttaatgaatacataagcaaaagttatacattgtttacaagggtggaggggggaggcttgggactaatggatacataagagaaacagtgttcgtcctagcttgtaattggaaaccagtttcaggtattggtgaattagcaaagcctcttattaattattttaaaggagagagagagagatgaactatgagagggcctaggttttattgggggggggggtgcacaacgtttggaaatcagcttgaacctcctagtttgcctttctgttcctgtggtaacacactgacaaaaagccacttgggaaggaaagggcttgtctcagcctacagatccagataacagtcaatggctgaaggacgtcagggcaggaacctggacccaggagctgatgcagaggccatggaggggtgctgcttactggcttgctccccatggctttctcaggctgcccaggaccaccagcccagggatggcgctgccctcagggccttcccacataaatcattaatcaagaaaaatgctcccatagacgtgctccaggccaatctgatggagaggattccgcagctgaggctccttctcccaggggactccagcttgtaacaaactaaccagcacagacacttacatcagaatccgaaaagctgtacttactatgtatggggccacttacctcgctgtgaaatggagataatttgcagaattgataatgtctattgaagctgctctgacaacatcagatattaatataaagaaagaaatttatatttaaacctatatgaacatgcatgcacacacatgtgcttgtacatacatgcacacacacacatacacacacacttatttctaagctcctgtacacaggatctgtgcttcctcaccttgttttatgtatctgcacttatgtcatgtttgtacaacagctaagaagtttttgctgttatgtacagtccttagtgcacattaagctgggtcacgtgctgcagatactgtttagagccaggtaggtggaggattgtttgcaagctactgactttactctataaaggtaacctgtaaagtcatgggtgtagagtttatggccagtaggagttttgaatctcaaaatcatcttcattttttttccacagcaaggattccaatatttctaagagatattctacatactttcatacttgtccatggtccaaagaacttccctttcagcttccagagggtgggatctcatcgcgcccagggtcagcagggagtgacgaagtcgatggggcattgaaaggtatgtattgttctatattagggctctgcatactgtgataattttcttccaactgttgtgatccttcacaacgattggaaagtaaatgactgtttcaaatcagaggctccccgtgaacttttgtgccccactgttaaaggtgagaaacaaaagttcagaatggttggaagatcacccttggtcacttagcaacttagaattgaagccacaattctggttacctgagtctgggctgggacacatgttctctggacaactctgtgccgactcctccagtgaaagggaagggaagcagagggattcagattgctgcccagtctcttcctgcggttggtggaattctgatgaggtttttgtgttgaaggatctggcgcgatgtctccccgttcactgttttttgctcctttacatccgagtgaatatgcatgcccatgcagagacagaatgaccagtgcacttttcccccagcgccgtgtggctaagttcacaagcaacactgtgtgaaacccttgagcactgtggggagactgaagggctatagggaaaactgggaaggccccaaagtcaggatggatagggacactttccgagtcattgatacaggatgcttaagttggcagacttttccagaacttggaagatgggaagaaaggaaccatttgcaggcccaggaaacgttctgcctgggaacagagagagaaggccctgactgagcccttgctcgggagagtgaccagagcatctcaaaagaagctagaggtcgtagtttgccttggccatgagggcactgtgtggtggtacctacaggaatcaaagacaggctgactggtctctcatctccctctcacttctatctccctacctatcccttccccaaatccacgactttggttttgctttgtgatacatttagtttaaccagagccacgtgtgtaatcacaggattgaaactatcacttggagtctggtggggataccagggggtccagaacggctctcccctttccctggttttgtcagcaggaaatagttcaagataaattgtaaataatttttaaaaacaaaacaacaaaaaaccagccatggtagatcccttgcctcacatacaggattgctgatgctttgtggtgcaggaattctaaacttattttcctgtgtaccaagggactaactgcatgtaccgtctttcttttctcctgatgttttatagctcttcgtgtagcatcatctatgcaggaaaaagtggcccagcacaaaagactgtctgcgattacaataatggacccgggttccaacaccaaacccacccttcctccgatcccgcacggccgcagatagaccagtgctgtgatctcggagctggcgaacagaccagcgctgttgacatctcatctaaacatgcaaaaggaaacccttattctcacagagctcagtcctcccacctgacctggcctcgggtctcagctgtttctcatgcacacaactcatgaccaaagaaagattctaaatctcttgatcaatttacactgtgattctctgaagagcatcttttattgatttttgttttccatgttagttattcttagctttgaaaaatgttatttgagtttttctcttcccacaactgattttcctggcgattcctgttctgagatctcagataccaaaaacctccctacgttttttcattttatgtacaactggttcttttgactttatctaactacgattgtatggttcagagttccaggactatgatgattcacccaaaatattaatgtttttgttctaattatgaaaacatggtagagcaccatttaacttgtgaccaacatcatatctactgcatctctcaaagagaattaatataatttgggggagctctttagtaccgttaaggaataaaaaaaatatatttccttttcgccttttccagactaattatatacctattattagaaatattttgcaacaactttcattatccttgtgatcttaccccatggtgtttacaggaaatactattgtgtacttaagactgatattcatttactatgtgcccataaggctctcctcactgtgaaaaggttgaaacccatccttctgggttggtaagtagcctcttctcctcgcatcgatgaccagtgggaccctctgcataatactactgttcgtgttgactattctttattatctaatgtcaaccccatcttaacgcattagccctgccaataaccttctccataacagagcctcagctttaacatgacccataactatttaactattgtgcctttccttaccttgcgcccaaactggagcagattaaagtctgtgttagtcatctgtctcccacttggacaaaatatgagataaacagtctagaggaggaagggttcgttttggtttccatttcataccatggttatctggaggcaaagggtggggcaggggggacgctgttcacctcaaggtcaccagcaagcagagagagagaatcaagaaaggcccaggaacaagataatagtcttcaagagtattcttccaaggacctaatcctttttactgggtcctgcttactaagtgtctatcattttttgatagcccatcaaattactagcccatggatgagatcagaaccctaagaagtcttgtagaaagccagcttttcaccattgccctttctgcacagggctaggacctgccaaatgggaagcagtattgagctcctcctcctaataccatccagcaaggtattgagatgcatgagggggcctacctcttcctgggatgctggaaagctgttagacatcatttttaaaaaaaatcactgccagtgctaatgataagatccataagttcacattataagcactccttctgatgttcatcttcctgtaatcaaagatattgcttggggaagggcagtttcacttcataattggcaacttggcaactgctggactcttcccttacttccttgccggccttgagcagaaagaccgttcacaggttcctagagagaacggcacaataattccagctgcttgctatggcttctcaaggtgcatccctgatcagcactgttttggttagcattggacttcttgctattgcaaaacttaatgactttagatgatattacaaccattttcaaccaggccaaagggcaagtaattcctgtctgacagcatcaatctattcatgaaggtgggatttctccatctcatcacggctcagttggctctacctcctagcacatctacactggggaataggtttccagcatgtctgatcatagcctgtggtaaggaggatgacctcatgccacagcttaaaccctaaagtgaaggaaacttattatccccattctattccgagcaattgcagtccacctgaggtttctccctctctagcttttcatcttgaatcaaatccagcttccaggaagccacagctgttcaaaacataacgaggtgtcatctggatcctgcaagaactcagtcttgagtagatcctgtttaccagactctgtccctatagcctcatcatttcagccattctaagtcaactgtatcagctctctttttttaaggtaactttagttgtcttcctaaaagtacatcataagccaaatgctccctggtctggggtcagtctcagctgtcctctgctttgacactcaaatagtcacctttccttgactaggtcccgccacgttggatgaattggtggccagtgattctgctgcctggtaaagctgtagatggtaatccaaactatgaacgtcctcaccttccatgccctgcactccaatgggctgtccctcttcctaaagctgtccctcctccattgtggtgctcagcttggtctgtgtatcagattttctgttaacatgaaaaatactaatgcccagacgctatctcaagccaattaaataaaggtgtctggggatggaggctagggtgtctcactggttaagtctccagagcgagtccagtatgcagccaagtttgggagtcagttcactggaatctagaaggagctttctagaatgattttttgtcagaattgtaagatatttttttgccttcagtagtttatgagtggtcttctcaccacaccttcaattagcatcaattatattattagcataattattttatcattactgactttggtgtttgaaaatacatttgtcttactgaataggcttttccccccaatgtgtttgaatatttgtctgcattcatgtctgtgttccatgtgcatgcaaaacctgcagagaccagaagagttcagatcctctggaactggagttacagatgcttgtgggccaccatatggcgttaggaatttaacccaggatctctgggagagcagtcagtgctctaaccatggggccatctctccagcacctagatttactaattttatatatttattagtttttactttttagtcacactactgatcacactcttgttttttctactctgaaatactagcttcctcctatgctcttcatgaacaaatatatcaaataataattatgtagtcctcatttgttacaccgtccgacataccagtccattgtatcaggctgtgtctactttaagtggacttttatgtctgttttcttatgtggtgtttgccttggtgtgtccatgcattctgatttctgaaagcaatactcagtgtccaaggaagctttctgtggtgagacgtgtagaggcatctgtgttgttcgtgtgatggccattggcttaaaggctattgagcgcttggatgtggcaagcctgagaagcgtcacatcattaatgaagtagctgtatgagatggagggctaccatgctgaaaagtctaacactagaaagttcatcagagtttcactctttgggtccctatagttactttcagaaaaaaaattttttagtatattatgaataaatgagctattttagagatagcgttttgttttgttttgttttgtttttttgagacagggtttctctgtatagccttggctgtcctggaactcactttgtagaccaggctggcctcgaactcatctttatcaattctgtgtgctatttccttaaatatttgaaaagctatcagtggaactgaaaaaaaaaatctagtatgtaaaatgttgcttctctctaattaagttttgttaattgcactatctcaatggccagatacatcctttattttttttttatcagtttgctctcagatacatgataacagtatttagtgctgcattataattacgttttggtctcttttttcttatgtgtaaaataggttttgttttatcaattttgatgttatgttaatcagcccgtaagtgctcagcgctattgttgtgagttcatagatttcatctggttttcctatcaaagggcccttttgttccttgttctctgggatggtctggctttgaacttcccttggtaacacttccacccctgctctctcttctctgcccccatcacctctccttttaatctaagtctttgattgcaatttaattttggtttgcctggttttcctttttttaaccaaacccaagtctgtcttttacttcaattatggaacaaggctgcttctttctataaattttaatacaaatcccatcccatttctatcatattgctgtatattttcagatgggtcagagattgccgaggctgaagttttgttttgatggtggtttgtttgtttaattttttttccattccagtgattagtttatgcctttccctgtacacgttgctcttttcaattacagtaatttagaaggtaaattttcccaaccctgttatttgtcatgtaaattaagatgtctttatttcttcttcacagttctaaaattatgcatttaattaagactggtaggatctgtatggtatggcggtgtatgcctgtatcacttgggaagccaatgaagaatgattgggggatcgaggctggcctaggctacaaaacaacttcaaggccagtcagtatcacacaaagagatcctgtttaaaaataagcaaaagctggggacatagttcagtggcagcatgcttgcttatcatgtaaaggccctgggttttgttagggtccgtgaattgttgacgaatggtactccagattcaaatagtatgtaaaaataaagtgtttatttctgcataaagggacccaattccatcgggatggaaggaccccaactgaatttgcagatttagttttaaagccaaaaagaagtacattagggaggggtaggtggtctgtatctttattggtggggtctatcgctggggtctggatgatgctatggtctaaactatttttgcttcatgccaagtaggggtgacagcttggccacaagcttggtttactgtcctttcacaagctggggaggggtacctcttgaactcttggcttaagcctgcagttgtttcagaaactgacttgcctaattctgagcagtagaaactcaggccgggtctcctgaactgttagtttacagcctgtcatggagtcagcctggctcgggccagctcactcctttcagtttgatacatgataccaggagaaaaaggcttatagactcactattttttcccaagtaaactctttaagagctattttatattaatattgcagatttgtattgttttattcctttctgaattttcagtagtttcaatgtttattacaatactaattgttctgcttttctatcattgtcaaattcttttaaaactgtttttatttttatgtatctgtgtacctggtggtactattggtggtggtagtggggtgatggtggtggtggtgtgtgtctgtgtgtgtgtgtgtgttcaagaatgtatgtggaagtcagaagttgatgtcaggtgtcctcttaggttgatctccatcatcttatttatttatttatttatttattcattcattcattcattcactcattcattcatttatttctgagactctctacatagctctggctgtcttggaactcactttgtagatcaggctatcctcaagcacagagatcacctgcctctgcctccctagtacggggaggcatgcctggtgtccaccatactttttgagacagggtctcactgaacctagagctcaccaattcagctgtattagctggtcagcatgcctcagggagcctcctaatccatctcccagtggtgtgaccacaggcatgagcctgctagggatcctgtcgtggctcctcctgttggtaagcacttgagtgatcacctcagcctccactgtctacaactagagccaagagaagaggcatttcagagtatgtctagagaagtccactcaaattctctttccgccatgacagacaagtgacagttttaagcacatttttttttctattcccgggatatgcttacttgctcctatgcctctgtgctcagtggaaagtcagtaactcatggataggatgggcaggcagtcccacactgccatgtggcttagatgcctatatgtccttatcaccatctcccagaaaggtctatagcacttacagtgttacacttcagtgtaaacaaaagaagtattagcaaagaaggaagaaaggtctcacggacagcttcaggtgacctaagataaagttagaaagtgtttgtaggagctgcagtgctgtccttgagaataacttgaggcatccctctcctccccgccctgcccctcccctgcccctatgctctcctacagcaggcaccaaatgaacgtatgcaccacatttagcttgggcattccatatgttctgaacagacaatgccatttcttaccatgtcctctaaagtatagattatataatacagacaccatgattctcctttaccgccactaaagcccttagtggagaggccgtgtcggagtatgcaatggtgcattccaatgatatgctgtgcgaaactgtgtcagattttctgagttcaaatcctggcccagccaagtttgatttagacaggctctttgcttcttcagttgttaggctgagtcatgaggattgatggatatttcattgatagaaccaggggttggggaaagactgggggtggggcggggggtgtaatgaatcaggttagaatagcaggcaggcttccagctccatgtcctctgtcgctgggtcttgaaacagaactaataatcaagtggtgtgaaatggaaaggcaaaaatatttccctgctgattctaagagacacatttgtcacattttaatatctgtaaaaatcggggcacgttcttaaatggatggcattccatggtggatctgacggcactgtttttctttcttggtaggatacaaaatgatggtatatatcataagatcctaggtttgataaaatatggtgtggctaaatatcccaaggaaccagctgtccctcggagacagccgagatctgtgtgggcaggtggatcccgacactgttccggagacctgtgtgggctgtagctgccccatgaaggtccagggatggctaagctaagatgaatgtggtacacacatccagggttggctctcaggagagaagattgtcagcagaagtaagagaccttactagggctagctctttccttagccttctttctagggttcccataatgatgaaaagagaggaaattacatgtagttggaactctattcctctaccaggagcagagtcaaagtcccggcagcctaccaagatcctgcgcatggtcacttataaatacacatttttcccccaccagttatgtaggactgctgagagaccatggccagttgtcccttctatgagggtaccctactgagatgtcatgatattcaagatggccttaaattcattggcacagatgcatctggaggccacatgttgacatttcggtctcccttgatcatccaccgtggtttccagacagtctctaactgaacctgaagctcacaggacttccctgggttctgggattctagaggaggggcatctcattcctggattttacatgggtggcagggatctgagcccaggtccttatgcatggcacctgtactggctacttttgtgtcaactttagcccaggtccttatgcatggcacctgtactggctacttttgtgtcaactttacacagctggagttatcacagagaaaggagcttcaattgaggaaatgcctccatgagatccaactgtaaggcattttctcaattagtgatcaaggaggaaaggccccttgtgggtgggaccatctctgggctggtagtcttgggttctataagagagcaggctgagcaagccaggggaagcaagcctgtaaggaacatccctccatggcctctgcatcagctcctgctttctgacctgcttgagttccagtcctgacttccttggtgatgaacggcagtatggaaatgtaagctaaataaacccttttcctccccaactgcttcttggtcatgatgtttgtgcaggaatagaaatcctgactaagggctggggagatggctcagcagttaagagcactgactgctcttcagaaggtcctgagttcaaatcccagcaaccacatggtggctcacaaccatccgtaatgagatctgacgccctcttctcgtgtgtctgaagacagctacagtgtactgagatataataataaataaatctttaaaaaaaaaaaaaagaaatcctgactaagacagcaccttatttacagaaccatgtctctagctccaagacccctgggtcttgtgcatagaactcagacacacaggagggatgactacgactagccactctcagtcttagaagaaactatgtctgtcttcaagagaaacttacaccacattccttctagaaatgttcagaataagcacttgccaggtaataaattgtcattggctattattataattgtatttgggaagggatgtctgaaagctttgaaataatcaacttactagggagacatggaaatactaccatcctgagtggctggagtgctgaggatgggaaagacccagttagccactctgtgggttgagtgaccctgcaccctcctttctttggggtctgtcccagacgagcctgttatctcagtgaaatttttaacaaggcttccattagtatttttaaattaaaaataagtttttttaaaagcatgcactaagacatgtaagcataaatcttaaaaggaaaaaaacagcccttgagcagtttacagttataaatgaatgaatgaacaggaaaaagaaagaataaaaataaagcaaagagccaggtgtggtggtgcacgcctttaatcccagcactcgggaggcagggacaggcagatttctgagttcgaggccagcctggtctacaaagtgagttccatgttccaggacagccacacagagaaaccctgtctcgaaacccccacccccccaaataattaaattaaattaaattaaaaaaaataaagcaaagaaaacctcagaaaacccacacatctgtacccaacaaacgtgttatctgtttccatgtacataacattatcttcctaacaaaacagaccaaaatcgggaaggaaaatgggaaggcttgaagtccaggccttagctgaggcagagagcagcagcaattcagagaagactgtggtcagatggtctcagcacagagcccaggcagagcccagaggtgagagctcctagggactttcgagagcaagtctaaaccatgtcaggcccgtgagacaccacatgcccaaactccccgtgacaggatggctgggacactgcgtatctgtgaatgcacacaagtgccttacctttttgatgccccccaccctcttctttttaaagtgctcatagctgaaaactctttgctgaagtttgtgattaatgaaaatggccccatctccagccatgcggctagcacagggagctgtataggaaggtgatgagatggttaccggaagaacatctactccgtaagagtaatcagcacagcgcctgggggagcactgcttccaccccgtatgcagcagcctcctcgttaaatgggaacgatgaaacctgagatcggtgtgatgcactaattagaatgccgccatcaaatccaagaggttccattagggtcacatgcagcttacactcgggaaggggagaggtcggcatgttttatattttttcttatttattaacatgcaaacagcttcatattttttttaacccaggctgttgttggcatgagagattagtttagccatttgatgaggtgaatgttaaattagaatcccagccactaaagccccaaatctaattttcaccctggtttataaggttttcttgaaaactctattatcctaatacatgtgtctaatgccccaactcctaaaaggcacagtacttcctaaggattatcaagccaaaaatattctcaactgccacagaatatgtaaattttatatttactgggtcattgaacttaggtatagctatctaatctattttctctgaaattgcagtacttataaatcataccaaaattcttcctctaactgtgaggtttacaaaatactttactcaggccactaaattacctgaagagtaatataggctggggatgtaacttgatagaatggcatgcacacagccctagatttgatccgcagtaccacataaaccatgggtggtgggccacacctgtaatctcagcactaggggaacagagccaggtggatagtaagctggaggccagcaggatacatgagacccccgtcttacaaaacaaaacaaaacaccaaatgggactggatagatggcttggtggtaagagctcttcctcttgcagaggactcaggtccagctcccagcatccatgtgatagttcaagtctatacttaactctggttgcagggaatccaa

SEQ ID NO: 811 - DNA, 4756 bp, Mus musculus
cgcgtataaacaagatggcggccttcgagcgaaatccctcgagatggaaaggcacccgtttcaggcggggtttgggcgcctctcgcattgcagcccaggcgatactgtcgctcacagaaaaacaaagtcagggccgttggccttctttccccctgggtctgaagtcaaaagggactttcagaagcgcctcctcttacctcctccaccagctcatccaccgctctcatgaggcagaagcggagcaagaagagaagcaacaggaggacggagaatctgaagagtcagaggagtccgaaatgcagaatttggaggacaagtatgacgggatcctgagagaggagaccgtggctgaggcaatcactggattggggtggtcaggccgtggcacggagcaggtttacctcaacctgaatctatcgcactgtgagttggtcgacatcagcattctgtgtggctatgtccacctgcagaagttgaatctttcgggaaacagaatcgaagatttgtcttgtgtgagctgcatgccgtatcttctagaactaaatgcttctcagaacaagctgactaccttcttcaatttcaaaccaccccaaaatctcaagtcatcacgtacagacaacgagatagaagaaatcactgggctagagaactgcatcagcctgacccaccttagtctggctggcaacaagatcactaccatcaaaggcttagggacattacccatcaaagtgctttctttgagtaacaacatgattgagaccatcacaggtctggaggagctgaaagccttgcagaacctggacctgtcccacaatcagatcagcagcctccagggcttggagaaccatgacctcctggaagtgattaacctggaggataacaagaccaagcccgagtactggttcttcgtgatatatatgctgctgcgactgacagagttagaccagcagaagattaaggtagaagaaaaggtttttgcagtgaataagtatgaccctccccctgaggtggtcgctgtccaagatcacatgacccatgttgtcaacagcatgtcgcagccacagaggatctgggacagcaccctgccgagtctggatgccccgtatcccatgctcatactaactgggcctgcagcttgcgggaaacgagaactcgcccaccgcctctgcagacagtttagtacttacttcagatatggggcctgtcacaccacgagaccgccttactttggtgaaggagatcgagttgattatcatttcatttcccaagaagtttttgacgaaatgctgaacatgggtgtaagaagtttgaaatattcttattttgagcctcgatatatcttggtggtgcctatggacaaggaaaaatatgagggatacttgcggagaaagggattgttcagtcgcgcagaaatcgaaattgccgtctccagggtggacctttatgttaaagttaatcagaaatacccaggatattttgatgcagtaatcaatgcagatgacatggacattgcctaccaaaagctcagcgagctcattagagaatacctggggttgactgagacagctgctaagaccttggctccaactgcaggagctccctctagcaagaagaccgcctctggggtccccgcacacctggtcccctcccccaggcgcttggcaagactacaagccgatggccagaaaacggaggctttcctggaagtgcagactcaagcagtggtccctgaaaatcaggaccccactctcccacagagccaggagttaactgaggagggcgaaccccctgagaaggagactaatgtacctcagcaggtcagttcttcagcacttggtattcctcagcaggcccaggacttaccaccaaaggtgaaggaagaggatggccagccagccaaccttcctccaaaaataaccaccgagatggatggcccagaagatgagcctggaccgcccgtgccaaaagcagaccagtcttccactcttgcgtctcaagagccgccccagcagcctgctcctgctcccacactcagccctcagcctgctcctgctcccacactcagccctcagcctgctcctgctcccacactcagccctcagcctgctcctgctcccacgctcagccctcagccagaccaggataaggaatccggagagaccaaagtagcccctagcaacccagccctatctgaacctgcacagggagctgacttagcttccctcagtcctcagagagtgcaggatgaaggaactgagtcagccaaccctgcacccaggagttccacgcacactcttccagaagatccttcccacactgaggtagagaagcctactgggggatctcaacgacctctgaaggaggaaacccccaaagcagaagttatgcgggccggtactccttacccagaaattccacctccccaagactcaaccacaaaagtcagggaacagccaggagccttgcttcctagaagcaggctggctcctaccagattgccacagccccagaccttggctcctctccagagccggagacccacacccaagcttctctctcccagcagggaagaggctttggggacaagctcagatcagaccccgaatccctctcccagatcttttccagctcaggatggagaccccagtaagcttcctcccatcagcccttcccaatccaaaccaccccgaaactcgagcccccctacagcccacagcccacagcaaggccaggtaggaaaagccagtgaggtgaagctcccacttatcagccccccagtccaggaacaagcccagcagcacacccccaacccaccccaggaagaggaggcacccacagtccagctcccaactattcctgctccctccacggaaccccagcttcctcagaacaccgagccaaggcctgcttcgaagcccgcaagggaaaagaaaactccgaaagtaggccgtgcctccagtaagaaggttctagatctgcaggccacaccccacagccaggggcccactaagcagaaaggagcgaagaaaaaaaacctcatgcaaaaagagacagctaaagagtcgccacagcagagaaagatgccagttgggaactctcagacagccccgcagctagaatcccacgacaagccaactccaagaaatgaatccgacccacttgacttcaggtcttctccgagccacactgaaccagtgccagcagacccccagaaccaggagaaaaaccacaaagcacacaagccaagaaagaaggcacagaccaatcccacccctaaggacgtggctcagtccacacacacatcccctaatggagaaatgtctgaagggttacctcaaggaaatgaaactgccctcggtgaggatcagccaaccagagagggtcagcccccgcaggaccctgccaagtctgcgcaggagggttctgctcccgtgctgcatcctggggaaagggaacaggctcaaaaaagggaaaagtctcagaagagagaggttgcggggaagcccgaaggcgaggagattgcagcccctagccaactgcgggtcaaagagacacaagcccatagggacaccagggagaacagacagagctatgcccagaggcacagcatacttgtatcgaagcagcaatccaaagaaaaacgaacccgaaaaaatggaggtgtagcacaggacagaagtcctgctgctccccaaaatcaggtgtcagaggaggatcagggtagccggacaggaagactgcgagccaggggcagtcagagtatcaaagtgggtccagtaccgatacctactgtcagtggccaacagtattttgcaacaatagatgaactacagaaaacgtttgagctctctgacgatctctttaaaaccccctctggaacataccctgaaacaagcaaggattccaatatttctaagagatattctacatactttcatacttgtccatggtccaaagaacttccctttcagcttccagagggtgggatctcatcgcgcccagggtcagcagggagtgacgaagtcgatggggcattgaaagctcttcgtgtagcatcatctatgcaggaaaaagtggcccagcacaaaagactgtctgcgattacaataatggacccgggttccaacaccaaacccacccttcctccgatcccgcacggccgcagatagaccagtgctgtgatctcggagctggcgaacagaccagcgctgttgacatctcatctaaacatgcaaaaggaaacccttattctcacagagctcagtcctcccacctgacctggcctcgggtctcagctgtttctcatgcacacaactcatgaccaaagaaagattctaaatctcttgatcaatttacactgtgattctctgaagagcatcttttattgatttttgttttccatgttagttattcttagctttgaaaaatgttatttgagtttttctcttcccacaactgattttcctggcgattcctgttctgagatctcagataccaaaaacctccctacgttttttcattttatgtacaactggttcttttgactttatctaactacgattgtatggttcagagttccaggactatgatgattcacccaaaatattaatgtttttgttctaattatgaaaacatggtagagcaccatttaacttgtgaccaacatcatatctactgcatctctcaaagagaattaatataatttgggggagctctttagtaccgttaaggaataaaaaaaatatatttccttttc

SEQ ID NO: 812 - protein, 1384 aa, Mus musculus
RINKMAAFERNPSRWKGTRFRRGLGASRIAAQAILSLTEKQSQGRWPSFPLGLKSKGTFRSASSYLLHQLIHRSHEAEAEQEEKQQEDGESEESEESEMQNLEDKYDGILREETVAEAITGLGWSGRGTEQVYLNLNLSHCELVDISILCGYVHLQKLNLSGNRIEDLSCVSCMPYLLELNASQNKLTTFFNFKPPQNLKSSRTDNEIEEITGLENCISLTHLSLAGNKITTIKGLGTLPIKVLSLSNNMIETITGLEELKALQNLDLSHNQISSLQGLENHDLLEVINLEDNKTKPEYWFFVIYMLLRLTELDQQKIKVEEKVFAVNKYDPPPEVVAVQDHMTHVVNSMSQPQRIWDSTLPSLDAPYPMLILTGPAACGKRELAHRLCRQFSTYFRYGACHTWPYFGEGDRVDYHFISQEVFDEMLNMGVRSLKYSYFEPRYILVVPMDKEKYEGYLRRKGLFSRAEIEIAVSRVDLYVKVNQKYPGYFDAVINADDMDIAYQKLSELIREYLGLTETAAKTLAPTAGAPSSKKTASGVPAHLVPSPRRLARLQADGQKTEAFLEVQTQAVVPENQDPTLPQSQELTEEGEPPEKETNVPQQVSSSALGIPQQAQDLPPKVKEEDGQPANLPPKITTEMDGPEDEPGPPVPKADQSSTLASQEPPQQPAPAPTLSPQPAPAPTLSPQPAPAPTLSPQPAPAPTLSPQPDQDKESGETKVAPSNPALSEPAQGADLASLSPQRVQDEGTESANPAPRSSTHTLPEDPSHTEVEKPTGGSQRPLKEETPKAEVMRAGTPYPEIPPPQDSTTKVREQPGALLPRSRLAPTRLPQPQTLAPLQSRRPTPKLLSPSREEALGTSSDQTPNPSPRSFPAQDGDPSKLPPISPSQSKPPRNSSPPTAHSPQQGQVGKASEVKLPLISPPVQEQAQQHTPNPPQEEEAPTVQLPTIPAPSTEPQLPQNTEPRPASKPAREKKTPKVGRASSKKVLDLQATPHSQGPTKQKGAKKKNLMQKETAKESPQQRKMPVGNSQTAPQLESHDKPTPRNESDPLDFRSSPSHTEPVPADPQNQEKNHKAHKPRKKAQTNPTPKDVAQSTHTSPNGEMSEGLPQGNETALGEDQPTREGQPPQDPAKSAQEGSAPVLHPGEREQAQKREKSQKREVAGKPEGEEIAAPSQLRVKETQAHRDTRENRQSYAQRHSILVSKQQSKEKRTRKNGGVAQDRSPAAPQNQVSEEDQGSRTGRLRRSQSIKVGPVPIPTVSGQQYFATIDELQKTFELSDDLFKTPSGTYPETSKDSNISKRYSTYFHTCPWSKELPFQLPEGGISSRPGSAGSDEVDGALKALRVASSMQEKVAQHKRLSAITIMDPGSNTKPTLPPIPHGRR

SEQ ID NO: 813 - DNA, 156746 bp, Homo sapiens
cagcactttgggaggctgaggtgggtagatcacaaggtcaggagttcaagaccagcctgaccaacatggtgaaaccccatctctactaaaaatacaaaaattagctgggcatggtggcgcatgcctgtaatcccagctactcaggaggctgaggcaggagaattgcttgaacccaggaggcagaggttgcagtgagccgagatcttgccattgtactccagcctgggtgacagagcaagactctgtctcaaaaaaaaaaaaaaaaaaaaaaaaaactcctacaactcaataacaacaaaacaaataacccaatttaaaaatgggcaaaggacttgaatagacattacaccaaagaagatatacaaataagcacatgaaagatgaaaagatgctcaacatcattaataattgggaaatgtaaatggaaaccacaatgggaaataatcttgcacccattaggatggctgctataaaaaacagaaaataagtgttgatgagaatgtagcaaaatggaaacccttgtgcagtgttggtaagaatgtaaaatggtgcaaccagtgtgaaaagctatatggcattttctaaagctagagtattgccatatggtctagcagctcgacttatgggtatatacctcaaataattgaaagaaggatcttgaagggatatttggacacccatgtttatagcaatattattcataatagccaaaaggaggaagtaacctaagtgtccattgacagaagagtggacaagcaaaatgtggtctatccatacaatgaaatactattcagccttaaaaaggaaggaaattcagacagaggctacaacatagatgaaccttaatggcgttacgcaaagtgaaataagccattaacaaaaaggcacataccgtgtgattccacttatatgagatatttagactagtcaaattcataaaggcagaaagtagaatggtgtttgccagggaacaggggagaaaggaatagggaattatcgtttagtagtaatggactttcaattttggaagatgaaaagagatctggagacaggtggattgcactgcaatgtgaatgtatttaatgccagtggactatatacttagacatagttaaaaggtaaattttatgttgtgtgtattttaccacaatgtttttaaaggctgtagtattaagagcaactcaatacctaaagagttaaaatcaaatttctctaaaatggtttttcttcaaaagaattttgtaaaagcccataaatcactttctgaatgagtttccagtcaagatggactctttagtagcttgatttgctcaggaatgaaaatcacaacgtgacaaagtgagaacttcttgaggacgcctcaataatgaatgactttgaaaaatgccctacgtctcaatttatttataatggaaataccaagccttctcaaagctgtttgtgtctgcaagactgtatatgtaccagtaaataattcaaacacaaaatccctcactttgatatctaaaggcaatgaggggcacaggtcaggcttctgtcttattcttcacatggcaatggatttttgtcctccagaaatgttgctgatgtcctgtgtctcaccagaaggccctgtgtgaaatgactcagggtgtgattctctctttatcatactctttccattttaaacatttaatgtttgatttgaaggggaaagaatttcaaagccactccttgtctacttgtactttttcatgattatcatattatttctatgtacaccctagactttgtagtattcttaatggtttgcatcatcacaaaccttaaggaaggctggaacactttccagacagtggtgcacgaaatggcggaggatgttgaagcagagcatccatgaggcctgcttggctggatgggaaggctggtacagcaacactcagagatgtaaggtttgttctttctctttaagagattccaaaggactttctgtttgctgtggtttaaacatctcctccaaaacacatgttgaaactcagttgccattgtggggtgtcaagaggtgggggcctttgggaggtggttgggccataaggactctgtcctcatgaatggatgatgtttttatcatgggagtgggttagttattttgggattttggcccccttttcatgtcttgtcttgtgccctctgactctctcttgcccttctgccttctgcccttttactgtgagattacccttgccagatgtggcaccatgctcttgaacttcccagcctccagcacggtaagaaataaaattattttccttataaattactgtctttggtattctgttatagcaacagaaaaaagactaagacactgttctttacttagaaacttccctaagtgttacacgctgtgataattttgtcaatttgagtgagacatggggtgcctagatattaggtcaagttttattctgggtgtgtctgtgagggtgtttctagatgagattaacatacaagtgggtagactgaggaaagcagattgcccttcctaatgtggtgtgtttcatgcaattaattaaagacctgaatagaacaaaaaagctgagtaagaggaaactttgcctggcttcttgagctaagactttggtcttcccctgccttcagactggcacttacaccaccagctctcctgcttctcaggcacttggacttgtactggaattgtaccacctgctctcctgagtcttcagcttgccgactgaagatcatggaattcttaatcttcataattgcatgagccaattccttgtaatatgtatgtatggatctatagcctattgtattcattctgtttctctgaagaaacatcttccatcctattagttctgtttctctggagaaccctgactacaaatacacttgcattgtgggaaagatttgcagcttcttttttggccttatagcagcaaagatttgtttattatggaagatagtacttacagtagcaaagactaatatgaaactaatcacttcagtgagagtcagaaaataaagtcttttactaaccattgagtgagactgtaggcatctcacatcctatagacatccagataccatatgtataagttaatttttactgcctttcaaactatcccaaacattagtggcttaaaatagccattgatttggcttatgattcgtggggttgcctgagcagttcttctggcctgagtcatctcaactgatttttactgtgctccctcataaatcatttggcaaggcagctggtaccaaataatccgggctggcttcattctcatgtctggcaatgggatgtggttagccaggcccataagggaagctggtcccagcatctcttgttatcccgcaggctagcctaagcttcttcacagggtggtcccagcattcccaagagcaacaagaacgagcagccaatggccaagcatttgtaccacattcgctactgttcttttggccaaagcaagtttcacggtcaagcccagattcaaggggtagagaaatagactccacctcttaacttggaggagctacaaaagtcactttgcaagggttgtgcatgcagggatgggaagaattggtagctgtgtttgcaatctagcacactgaatcagccaactttacactcatctcctttaacttttcctgtaaccttggaaggtaggcattcgggctggtttggattagatctcaggtctgactctaaatgagtcctgttagcccctctgaatgctagtttgtgtctttttaattctttggaggcttcagagtctcagcactcctctctgagacaagcatcctgatcatttcattccaagcacttatctgcacagatgtcatttcacttaggaggaaccaagtagcagatgcatttggcataatcaccataaagataactttgtgagcagtcatccatgtttataaagcacaccactatgtgcaggagatttttggcaagaaagagggatatccttgtgggagaaaagtaactgaggaagtttggatacaaggtataaataaaagttctgtaaggtgcctaaaaggtacagtagatcacagaaaacagaacctcctattaacctcatgggagagcatcatctgtgtgtaatagatgtcacgtaagaccaggagttataaggctcctgccttccgctcactgttgtcaggacctctacctgtgcccatcttttcttcctttgttttaactctcatctctagattctgcttagacatttgacacaatttcctccttttcctcactcatgtcccttttcttacaggaaggcaataccctcctccttcttccgacttgctgtgagcagagtttatttctatattattaatacagaaataccaaggctactcaaagctgtttgtgtttgcaaactaggacagacttcccagagacttcctacagcacagcacagccagcctcctcccctttatctctaccacttccccttcccagagtgcccacttccttctcctctttcagggtctcactcaagtcttacctcttccctaaagctctttagcaactctctcttgggacagatttgaccccaactgagatttttctcttaactcccctggactggctcgagcattgcattatctgagtccaggattgagccccgtctgccaacagtggtaaggggaaagtgatgccactgctgcctccaattcagttcctccctgaagacctgtaacacaactccagaccaatcaggcagaacctatctcctcttgtatacttttaacttaatatgtttgatgtaggtgtcctgctgctccaacaataatgcaaatcccttgaataaagagactacaactttaactttttctgtatccccagtgcctgaaacagccctctctgtgtagtagggccttataggttgtataaccagttgctgataatgatgacttgggtgttacctgtgctttatatcagagcctgcatgacttgcttttccataaagcagcactgttccacacttgttcttaactagattgtgttgctatttttgaagtgtatgcgctgtggcaggatttcttgaacctttcatgtaactgtcttctatttgctcttcttcctgtttttattattcagtgccactgggaccctttagttattaaaacttgtgtctctcaagcacttgtaccttttaccacctcctgtgattatttcttcctgaatttctcctcgtcttctttgatctcctgactgtcctagggtaacattctcaagtcctcatatcttcatccccaaaagatttcacacagtcccttctggtcatcattttaatcattttgatcttaagtctttgtgacttccctgatgatatccagttttctgtctgctaagataatctgagctagaaattctcagtaatccttatctagtcctgtgttcagattttattcacaacgtgatgcttgcaattcctttgcaacaattcttcattggcttaactttttttgccttagtctctgagcttttaagattatcttttcctggactgcaatttttatctttgatctcaacaccagtatctgatctgggttatctattagtggggcaacctacaaagcacctttgatatctgctaggatggatattatttggctcagtcaacttctgcctagactttatcggatcttattagcccaattacttatgacaattataatctgaatgtagctgattcctgcaaaggtaacacatgcattcctcatctgttgttggcttttcccaactttataatcatgaggctcaaagtgtttgtctaacattttaaagggcccctctccatggtactgggtcagggctacaggtgaaattctcatggctcctaggttttccctccttagcccatatgacaaataaaacgacatgattattagtgtaattgtttgcttaatgtctatatacccattaggcttttatgagataataagctttcttttcttcttcctagaaagggataagaaaccatcaaaggataatgttaattcatcaaattatctcaaatttaaggttctcctccataaagttttactgaagcagttgagtagaagcacagtgttttgattaaggatgtaggctgggaaaccagactttgtatctgagtcctagctttgtcactgtttgacacagtggattgaagggttacatgacctctctatgcctatccttcctcatctataatatgggaataataatattaatctgtaacttgtagggtacctatagggattgagtttatatatgtaaagcacttagttgtctggcacttagcaattactcataaatattaatatggttgtgttttaattgttattattatgttaatactaatggtgccttctattgtctatcttctctcttcatttcaaggtgttctgtaaaaattacagtgttccataaaaaatcacggtgagtttgaagtgctgccatctcaacttgtctgagaagcactgtttgtccttgcacaaaaggggtgtaagtatgtacaggggaaggggacacacattctttgccttgcccaaggtccacactcctggaaaggcattctttccaaatataggcaacagaaggtgcacctggcctcttctttccattctgaatgaggttaggtgctggctccagactgggagaacaactcagttgcacacagaagagtttgaggtaagtaagagttaataataacaccaacacaaagataccatgaagctgaagctggagtcagcaccctctttctgacttaagctctttacccctttggttctccctccaggacagcctatcctggatgccctctcaaaaaaggcactctgagagtatcatcatgtcactcctctactttctccttcctctcacccaaggtggcaaggatccagggctatcacaaaaagaccctgctctccggaatgatcatatcccactgtctttgcccacctcacttcattccctggtcccagaaacctgagatcttcctgcctgctccaacacatacacacacacgcacatgcacacacaccccattctcactcactcactctctcccatttttagtatctcaccagggtcaggttctctatgccttgtgataagttcctgagaaactaattcatacttttggagaaagaagactattaatggttaatttcaggggctttggagccaggaagacctgagttgtaatgccactttagatacaaattttgtaactgggcaattgcttaccatctttgggcctctttcttctcctttgaaaatagggatgtcaatcctctttcagagggccgttggaataattaaacgagatatgtgtatagcccttagaacaggcctggtttacagtaagcaatgaataaatggaagtgattattgatgtttttgtactaatgagaagagtttagaataaatatttcctcccctcaccttctctccctctgtctaattctgtcttctctgcctgataaaataacttgttttatggatacaacgccttgtactttgatgcccagaatcccaaagtagggattctgttagtaaaagtccagcctagtgagcagtttggtgaactagcaagagtaaaaattgagcaacaagaggtctagacactaattcctgctctgctgctaacaagccaggcaatttggggcaagtcattagcccctgaaggctataatttcttctataaaaagaattgggataagatggacttgtaggttccttctgttttttatattttatggttctatatgaaaaggtttttctctgaatgaattcttttattgatacttaaaaaaccttggctgatgtattttttcttctgagacctcttattgcgtagctttatcttgcctcattttttttcacacgcaaaaggggtagttgaaggtgaactgtggagttgatcattctaggtttggatttcagtaccaccacttggcttttggccagttatttaacctctctgaggctcagtgttctcatctgtctaatgaggatggacagagggtagatgtgaagatgaaaggaggcagaattcttagactaacctcaaaggctatagtttgattgtcctgtaggacattaaccagttttgtctataacttggcaaacttatttcagaatgtcttttctcatggactctgaatgcctgattactatcttcctgatttcttcattaattagtgagtctaatagaatctttcacatgtgcttcattctattttttatataagaatcctgtttttaactttttgaaaattattctttgactgccttcagacactctcctcgatagactgacataggcgaaactcactagaaatgctgattaagttattgaaaaaaagaaaaaccactttgggaggccggggcgggcggatcacgaggtcaggagagcgagaccatcctggctaacacggtgaaaccccgtctctactaaaaatacaaaaaattagccgggcgtggtagcgggcgcctgtagtcccagctactcgggaggctgaggcaggagaatggcgtgaacccgggaggcggagcttgcagtgagccgagatcgcgccactgcactccagcctgggcgacagagcgagactccgtctcaaaaaaaaaaaaaaagaaaagaaaaacgatcgagatttgcatttttacactttctgcctgattctttcctatgtcacttagccgaagccaggccctacgagggtaagggtggggaaaattcccttggaggaatctctacttattggaaaaagaaataagcaaaaagcaagatgagcctggcagaaagagatattttgcttgtggcctttacatttatgactagcaagataatgaaggaaggtaattctgaaagctttatgtcagttttaacggtccctcaagcactgagaaagataatcgtcaatggatggtgtccataaggattttttctccttctcccctgacagccattgacaggatcattttgtatttgcaactgctgtcattgaagcgtgcagaaaaggccctgtaaggccagaaggatgagggctacttccctgcaaggatctctattgtcatcactatggcaataatagttactataattttcattctgcttttctatagagtgtcgacgttgtggagcttaaggctatgggatttgggtcacataaaatcacactagcataaaatcatgttttgttatcttgaaagagtattttttttaactgcaaagagagcctgtgcaacaagattaaaataattgccaatgcaggtcacttgactaatataattatttatgggatgctaatagcttttcagacgctttcagatacagtgtcaatttgacagcagttttttctctctctgtttggattgtaagaccactgccagtttttctccccaaggacaaggcttatcattggggggtgggggtggggaatgtaaattaattggaaatcagctctcaggcgtcgtctggtagtttctctttattatctgcaattaaatcataaggacaggaaccatgccttctatttcacttatatgcaccctcatctcctagcgtcgcgctttgcataaatttcagtggtactagctttcctacagactgctttagagacattagacacttctaaagtacgactctgcggaaagagccctttgggaatgaagcggcaacggtggcgcacctgcgatcctatcgtgggatgacaaagctctaagaggggtctcagggtagggaggaaacagctggagacaaagaaagggggtgtagcgaaaagaggtgaaaacaggaaagataagcgaacagaacagaccaaagagagaaaaataacagaagagactgagaaaaagaaaagtcaagtggagcgcccactgccccgcctgcagaaggcgagtacgcgcggaggagactacaggccccagaatcctccgcggttccccttgcctggggtcagtctcctaggcaaccccgctaaacaagatggcgacctccgagagggctctcctgaggaccagagctgcctctctcctgagaggcttgggcagatcccgaactggagcccgatcgttacagtttcgcgcagaaaaagagcgtcagccttgctggtcttttcccatggggcagaagacgaaaggcagctctaacatagcctcctcctacctgctccagcagctcatgcaccgctatcaggagctggactcggacggagatgaggaccagggcgagggcgaggcgggatccgaggagtcctcagagtccgaaatgctgaatttggaggtgtgtcttcccccccaccccgtactccctggctccctcgtccagccctgttacttcagcggcagctccccgatgcacccccaccagcccgaagcttcccacaccttctcaggctctctcgcctccaggaacgcctcttccccctcttttcttcccctgtcttttaccccgttttctcaccccctgcctgaaatagctctaaatagttcctttcttttttcattaacacatttgatttcttatgagtcgagttaacacagcgtcactttgtaagagtgtctagataattgtctgggaattatggctttagctttttcaaaattatactttgacagtattgtgaataggcagagttcatctctgacattgccagcacctgttgcccatggctatgacatacttccacactcttcctcagttctagtcccgtcagcctccctccaggaaaaaaaaaaaaaaaaaatccgcttttgaaagtgcttcttcaaagactaagtgacttaaaagttgaatacattacttctgtcgggggcatatgccttatacaagcaacatgcacacacaccagaaaagagccttataatgttcgaacagccagctcattgtgggaatattttaggatgtggggaatgttcccatcatcccacccatattgactgggatggcggcttcgcgtttcacatgactgccattccctcctttctacaatatctcttctgaccaccacacaattcctcttctttcttatgcttattatggtccttttcctttcttagtccattgttgtcttcttgtccttttccacttctcatcacatcacttcttttctcttggcttctaataaattgctttctttcaaaagcgtaatttaatttgcttcctttctattttgtttatgtttttgagatggagtctggctttgtcaccaggcgggagtgcagtggtgcggtctccgctcattgcaagctccacctcctgggttcaagcgattgtcctgcatcagcctcccgagtagctgggactacaggtgtgtgccaccatgcccagctaattttttatatttttagtagagacgaggtttcaccgtgttagtcaggatggtcttcgatctcctgacctcgccatccgcccacctctgcctcccagagtgctgggattacaggcgtgagccaccgcacccggcctaatttgcttcctttctttcaatacactgttaggttcttctctttgtcttggctgccaggaaacttagattcaatagtttttcttaatttcaaagttttctttaggttttttctcccctttccttttccttggcagtataaattgcgtgaaattcttttcagaagtaaatataatatagagaagtagaatattttcttttcttttttctttctttctctttctttctttctccttccttccttcctcccttccttcctgccttcccctccctccctctttccctccctccctcccttccttcctctttctttctttctttcgttttttcttccttccttccttcctccctcccttccttcctgcctccccctctctcccttccttcctttccctccctccctctctctctccctccctcccttcctccctccctccactctgtctctctttctttctttccttctttctttcttccctccctcccttcctccctcccctctactctctccttcctgccttccttcccccctttcctcccctcccctccccttccctccctcccctccccacccctccctcccctcccctcccttccgtccctcccctcccctcctctcctcttctctcctcttctctttctttcacagggtcttactctgtcacccagactggaatacagtggtacagtcatgactcactgcagtctcgacctcctagtctcaagtaatcctcctgcctcagcctcctgagtagcagggactacaggtgtacaccaaagcacctggctagttcttgtaatttttgtaagagacgggggccttgccatattgcctaggctggtcttgatctcctgggctcaagaaatcaggccacctcaacctccctaagtgctggtgttacaggcatgagccactgtgcccagcctaggatattttcagtgctctcattctgtgatattcttctggtttcccctctttacatctttgcatctattcacagtcaccttttctctttgaggccaaacatatttctgtgttatgcctgttccctttcaccaactcctttcctcatttgtcttatttcttcttattctcccttctctaacctgcggtgtcttctgttactctgattcttctattaaccacttgggttccccttcctttgtaatgtccttctgttcactttcaacatttggcctgtttcttttttcccttcctcataccccattttgtctttcctctttttttacttccttctacatgagctagttcccattagttttgcttaaagttgaccatagaaagctattaattattctattcgttattacttcttttgtcttttgttggtttactttgctatctttaacagtgactgttgcaaaactatagcagtgtttttgcaactttgagatgtttgtatggtttccaccagcttccccccccacccagaggaattcacaaatgaaccaccagtgtactttgttattctaattaacacatagctctttggctagggttcattagcaccattgttaatctgtcttcagtatgccattaacaaaccatagaaggggttgtcaagaactagctattcctttttggcttgtaagacacatgtggaacaggttcattatttcttccatttacattctaaatattaattttgtgtttttattctattttggctttttagtattgcacacatattaatatgctaaataaactgaaacaaagttttaaaaagaaacatttggaaattcatgttcagtgatttattattcccatcttagcctgttattctcagtttattattcccagtttagcacctttgcaatgctatcatggtcacaatgattactgagtgcctttaatgcaatttgccttaaacctcggaagcccttatgaagtgagggaggcagtatggaccacctgttcaaaacactgctgttggaatcaaagatttgtgtttgaggcttgatttagccttttgttagttgtgagatgttgagcaaattacttaacctctctcattcttcatgtgggaattataataatacttaaagaattgtgagaattaaatgagatcctatatgttaaatgcttatcatatattttgatacagttaataatacaaatagtaacttacatgttttcgtctgctaactacagcccattaagtgatttgattaatttagccttcattgaacaagcatttactgaatgattgctatgcagaaagcactcgttgactgtacagagcagaagtttctgggcccaaaaattgatgcatgaaaaacacttcttttcagtccctttatatgggtaataatacctactcctgtgatagttatgaacatgaaatttaataagaaactctatatttaaagttcttactatagtgtctgatacagaatagactttcaaaaaattatagctgcaataaataataacagtaatggtagaaaaagatgagaacatgattgaagacatacatggtccctgctctcaaagtgagataagaatgcgagtaaatcatagcaattcagcatacctgtagtatgtcttacagagatgagtacagctgacagctggattgcagggacatggaagacttcaggggaaggagactcttgcctgggtggagaggtggtgtgtgggcagacaggtggcagcttttcctaccgatgagttacaggtgagaacagaagaagcctcctaggtagggatgagattgtagagggcactgtgatgttgtaggaatatggactttgttctctacacagtggggaactgctctgttggccaggtggtattagattggaggattgtaatactggaggcaaggagatcagtgagaagattctagcaaaatccagggggagtgagaagagctgttatctatcataggaatcagggacagatggagctatgcgttaaggagttggatatatgaacaatatgactggaaatcaggggagagatctcagagtaggagacatgggaatcatcaccactagattctgggaaatcatccaggaagggatgggagggaaaaggccacgaatagaaccataaaggtacagataccaagggtatttaagtggtaggcagatgaagaagcagggaagaaaactgggaaggactggtaagagaagtataaggagaaagaagacctatatgatagggaagccaagagtctcaagaacgtgatgacagggtgcagtggctcacgcctgaaatcctgacactttgggagccagagacaggaagatggcttgaggccagagtttgagaccagtctaggtaacataataagaccctgtctctataaaagaatttttaaaaaattagccgaccagccatagtggtatgcacctgtagtcccagctacttgtgaggctgaggcaaaaggatcactcgagtccaggagttcaaggctgcagtgagctatgatcatgccactgcattccagcctgagtgacagagaaagaccttgtctcaaaaaaataaaaaaaaaagaagatgggaatgggttacgctacaaataggttaagtgggaagaggcctaaaaagtgctcattcattttgcctgtttgagagtcattggagacattggcccacgtggtttttatgaggtggtgaagtcaggaggctaagtgaagttgaagagtagttgggaggcgaggaaaggagaactaaggcataaaaagcaaacaactctagagtagattggttattaaaggaaactctagtttatagctaaaggaacctgcaggactgaagaaagcctctgtaggacagaagagtctaacacacttgtatagctggagtgggaaccacagagaatggtgggttcaaaacacagacaaaagggggcaaaaatggtccctgaggaaagagaagggtgtgggaccctgagtagagagaaggcacagtcttcctctaagacctgagtgagaaacattaggacaggtgctcctaggaagctgagagggttaacatctgagagcttccgttttgcctcagaagtagaagagaagggcattagtggagaagatggcaaaggagttgaggcactgcacagcttgagagttatggagagatgggctagtcaagaaggggagttgaaaaggggctgatgaagaacgggagaccgttcatagcaaagaggcccagctgaaagtcagctttacagggactccaggatgcagagttgtggggtcttctctagcccactcagcagctagggggcagatgaggtgcattcattcattcaacccatgtttgagcactcaccacatgcgaggcactgtttgcctccttcacacttaggcttcagccatcctgaaccttcatcgttctctcaatgggccgtgcttgcttttgcttttgggattttgtacatgctgccccttttgcctgtaatactatttcttggcttgcttttcagccttatcttcccttttgccagagtaactcacaatttgggtctcaattgaattgctgtctctcctaggaagattttgctaacttcttactccaccctggtactgacatacaatgggggccctgctcatagtcagcagacactgcctatctctattataatctttatcaaatccaaaatttgcttgcgtacttgtctgtctcccagactgaactgtaaatcccttatggacaggcaccatatctgttcactgattcaccatgtcttatccattgagccaagcacagtggctggcatgtgctaggtattctatagagatttttttccccctgatgaatgaggaacatgacacagtcctgcctcaatgcagcagttgattatgaacttgattctgatttgtatatggatggggtagttgcaaccagggaacaaggatcagagacttgaagatagagagaaattgaaattgcgtatgggtccaggtgcggtggctcatgcctgtagtcccagcactttgggaggcggaagtgggcggatcacttgagcccaggagtttgagatcagcctgggcaacatggtgaaaccctgcctctataaaaaaattataaaaattagccaggcatggtggcacatgcctgtagacccagctattttggaggctgaggtgggaggatgacttgagcccgggaggttgaggcttcagtgaactgagatcacaacactacatttcagcccaggtgacagagcgagaccatgcctaaaaaaaaaagaaaaagaaaaaaagaaattgcccataggctacccagtagggaagggagtatagtcagaagggaacagatagactctgagaaaggtgtctatctgtgaacagactggagatttgttgtggtcagtgaacaagttcaacaggtgctaggtaggttgaaggataagcaattgtgggattagagagaaacactggggtctgaggtttccagggtggagcagtttagcatgatgactaggtccagggcatggccgtgaaagtaagctgtctggagctgcggcagtaaagaattgtgcatgtgtgcatgtgctggcaatagggtgttggatggccacccatagggattctgaggccactcaggataacaacaggagcttgaaaatgaccaaagatcggaaggagagacatgatactgccaaatgtcaggaacatcaggaggtgtgaggaggttattgtgcagagtgctgccttccccaaggaaaaatggggacagcgtggctcatctccatgtcaatggctaagttgaaaaataagcatccacctgctctaagtgagtaagtgaggatgcagtgtcttcatagttccaggaaatggagggggccagatgaactttaaagggctaggtggaaagtttggagggaaggtaacattccttcccaggccttgtataataaattagaactttatttagaaaagtaaatgtgttttgcctattttgtgaacagcctgattggcataggtgagtgaaacattacgatgtggaatttctgacttcatcaattagtagtaacagaaatcgtcatctattgggaacactacgttgcacatactgtgctgtgagttttatgtccatttttttttctttctccaaaatattaaaagaaggtgttgggaaggaatgactttccctctactctcctagcttttatagctgggtctataaaataaacagacaacaggtggattaacaggagaaaaggtattatacatgtattaattttgaataaatttgtaatatttgtgggggacattgcaggaaaaaacagaagtgaataatcaaaaaagcagtgagatttgagatgttatgtaccatctcaatagaggaaggggaggagggatgcaggccacttaggggaaagtaaatgctttttagggaatgaatagtcccttagaaaaacagatgcggggtatgagagtttgtgacaaagtctgtcttagtgtgacattgacttctggtctcctcccctgggtgggtaaaagtcattcttccttgtttgatgaaaccaccggaggggggcaaatttaggacaactgagtttcttttggaggatctgccttgaggcagataaagggagttcagaaagagcctttccctgtgtttgctgtttttcaagtgccttcagctcaaaataatcaatataccaacatggcatattttacagcgacatgtcctgaacttcttcaaaggtgataacatttcctatttatagctgaaaactaccaggctcagtgaaaactttacctccccaaagtcacacatccaaaatggcagggctggggttcaagccatgcctgcccaattctgaagccatgtgctgcctccatgcaggtggtatttacttccctgaaccaggctggagtgtggtggcacaatcttggctcactgcaagctctgcctcctgggttcacgccattctcctgcctcagcctcctgagtagctgggactccaggcgcccgccaccacatccggctaatttttttgtatttttagtagagacggggtttcaccgtgttagccaggatggtctcgatctcctgaccttgcgaaccgcccaccttggcctcccaaagtgctgggattacaggcgtgagccaccgcgcccggcaagaagctctttatcatagcacaagcctacatgcgtatgtcatcagtacctacagccagagctgcattgttggttcctgaattcatatagaggacttagaaaaagggtattttgccatggttatctatatgctagtcatggctagttatgtcggtgtgactgatgtgatcacttatgttttgtgttctcatgttgatgtcagtgttaatgtgctggtcattatggagttgaaggcagcacaaacataatactgacccacctgttatctcttttgtctgtcattgttggaggaagggcttgtcagggtgcccttggttcttgtgatgtctatagaccaagggccaacctccttatggaaatgatcatcacctttttaaaaatcttgtacattttataaatctagcaacattgactaataggaagtgaactgaaggacctgttttctctaccaatctggcaagaataccagatttagagagataattgccttaatttgatgtaaccatcctttggggtgtgggcaagcagtcaaatgcagtggttagggcagtttgggagaattgccctgggactggacagattgggattttcattccagctctgtcacatactatctgtttggtttcaggcaagttaacctccaaacgttaattcttttgcctgtaaagtggagataagagtaactatctccatgttgtccaaaggattcaatgagttcattcattgagagctgttagtacagtgtctggaatagagaacccctcaatcaataccaccactgatactgctgcttctactgctacaatgttcactcaactttgaatgcctaatgcaagtgaccacctgaaaaaaacagtggcaatgaaaacattgatttggcagatagttatttaattatatgtaatatgtatatgttatcaacacagaatttttttgggggttggtaaattttggagagctcagctcctgggtataaaatatactaaataagtgctggatatgacaagatagattgtttcttttctaatgagaatcttttctttgtctacctttctgggttttttacaggaggaatttgatggggtcctgagagaggaggctgtggccaaagcactccatcacttggggcgctcaggctctgggactgagcaagtctacctcaatctaactttatcagtgagtatgacaaaatctccattggctggctacagcttgacactggctagaccatattcattttcttcagtactcttagcttttgtggtgacagcaaatcttggagcctcgcatttgatggagactggtgacaagagatatttctgtaaatattagacttcaaagagccctgaccaattcagtaatcagccccccaaatttcttagttttcattctcttcacactctatttctttcatcttaagtagtctatattatagtaatcaatgctttctttccaggaggttgaatttgattctgtaaaaccaatcaaagactctttaagaattttctctctgatcagtggaagaaacactaaactttatatctgaatccaagggaacaaagtattttgatattgactttccccactaagtatgtcaagaaataagaggctttgagctataccttactttccaaaagatacctatcattaaagaaaaaaaaatctattattattcatcagtttttaagatttcagtactcatcatagagtagcacaaaaccttggcttcaattttatcaaaagagaggctgtaagagcaaactactgggaatacttgcttctttcctcattttgtctctctgtagtcctagaaaaacaatttaagtcgttgtgcctccttatattgtaaagcattaaatattcattggagatccacagagtaaatttaggtacatatgagaaaaaaaaaacgcacattgaaattttaccatggcaccatgatttggcgaaagggtatgtaattcactataagcctgttctatcttggatttgaatgagtaagctaagcaagaaatgttaaacttttttcacctttgctagttccatgggcatgtccttcaaggtcagcatattaaaacagtaatctttttctattttcactttgtaacattttatggatgactcagccagtcaggcaataacatacagggagcaccctgtatgcattgcactgtgtttgacgctggaatatggtatataattccagcagccagtgcatccccacacaagcccctttcaatcaatattctacttctgtaggtagtgctatgccttaaattgatctaccccaaaaagcaatcctttaaatcttatttcagctggatggactgaagcttaatttattttgccactgacctccttacatttgagatattacacgttgaattactttgacttaataacctgtcttactgaatacactttcttagagttgcctagtttggtgatttttttttcctttatgtcttacttatgttacatgttattttttttactttctcttattatttgtgtacatatcttctctcctaccaaagtcataagtttcttaagggcacaatatagctctcttccatcattgcatttctcatcatgccaagcacaatgccttgtaaatagtaaatattcagtaagtgtttatttattattactgttctagcggccttcattaaacaatcaccattattctatatgagaacgtgcttataatgactcttcattggtttgcttgttttctgactccgccatcacgacataaaacaatcatagaagtctttgttccactcaaccaaattcccctcaacctcatctgaagttgactagaatcaagatatcctggaaagaattttggacaaggattcaagagacttagatactgcttctctataactaacttgctgtgtgatttcaggctgttaacatacctctctgtacctcacatccctcatctctaaattgggaataagctgccctacagatttcacaggtgtgtttgatcagatgagattattgtgaaagagctttgaaaatgaaaaggtgaaagtgtaggtagtattgttattaatgatttcctgatgaggtgtgaattctctttaaaacttcatttaaattctagacatttttttcttctactaggtaaaggccttgtctttattgctattgtgtgatttattaaaagaaaaaaaagactctgttctaacggtctccatgaacactgctttaaattggcctttcatgttgtatttgtttttgctaacaacactaacgttattaagctattattttcttcaaaggaagggctttttttttatggcatctgttttgagatcctattagtagcaggcttcagattttgttctctctcttcttctatacttgtgaaagaaattctggatttctttccatcaagagttattgcaagaaggctgagtagtaacctgataaagcaacattaaagtcttttaccttttgttttctcagggttgtaatttaattgatgttagcattctctgtggatatgttcatctacagaagttggatctttcagcgaataaaattgaaggtatgtaattgtcattctagattgatcactgaattatctgaaaacttaaacgttgcagtatgtaatatggtttaataatgccagacttgatatcactaatttgtgtatcaatttacatattgatcctttgctttccatgtaaaaaaggcaccgataactgctgagagagaaaaaggcacagatctgcaatatgatgatgtggctgagatgcagtcaatgatatttaagactaggagatggaatgttggctttattttttccttttaagagatcgatcattacttcttcaatactccctgaatatttaatgatttcttttcttttcctctgttactcagtgcagatgaattagtcttttttttctttaacagattcttttctttattttgcttttgcatttatattttattacactctttattctgcattttgaaaatcttatttttaaaattaaaaaaacattttttttgagatggagtctcactctgttgcccaggctggagtgcagtggcatgatcacaactcactgcaacctccgcctcctgggttcaagtgattatcctgcctcagcctctggagtagctgggactacaggcacgcaccaccacgactggctaattttttgtatttctagtagagatagggtttcgtcatgttggccaggatggtctggaactcctgacttcaagtgatctgcccgcatcagcctcccaaagtgctgggattacaggtgtgagccactgtgcccgggcctacattttgcattttaaatctgttagctcttttacccttattattgagcaccagggattcacaaatacatatttttcattcttttttgctgtctttatttagttgattctttcaactctaactccacaatttgtagttttatataaggtatttgttatgacaccttgttcacatttaatgaaattagtcctaccattgtcaaattttcttcaaagcttgatccttgtttataattttctgatcttatttgaagttgacagtgtataatgtttttctttagatttctagggaagtgagcaaatcattacttctgacctgctttcttcactgataatctttctgcttgcttcttttgcctgccttttttatgacaaataaatgttgctgatatgtcttctctgtttgattctggggtttttttccccttctaggaccctaataaagtccactttttaacgattaagaaatattctagcccattttcattcttaaaatactactgtttttgaaagactttcaattaacttttttctagttttctaaagctttattatggaaaattacaaagcacaaatagaatattggaatgaatatttgggttcaacagtgatcagcccatctatatacctccctgcccagcttccccagggttattttaaagcaaatcttagatggtcatctcatcagaaggccttttctagtgtctctggcaggagcacttggcctactccatacctccgcggttgtttccatttgctgggtaggaaatcgcggagtggtgggggccttgccaatgctcactgctgacaacaggagcagggagcccacagttacgctccaagcctttctcttcagcccgatcagtcctcactaaccttggatggcacatttcattagttcgtcaactgtttgaaagcctcctgtgtgtaaagtaccgcatatgtttctttttgtgatgacagtctcactggtctcctggtgcaggccaaacttcagactgcatccgaatcacctggaagccctgataacacagatttctgggccccactctcagggtttctgattcggtaggtttggggcggggcctggaaatttgcatttcgaataagctcctggatgaggctgatgctgctggtccgggaccacatgccgaaaaccagtgatggagacacgaggagctcctgccctctggtgggcaaggaggtcactgcactgatagggaccacaggccagctcaagttcaatgtccagcaacccagaccaaggacttttttctgtcttgatatgaaaacactggctatctacagtgtgtgaaatgcactcaccatctctttgtctctagctaagtactagctgctgcttctgcttcaagaaggatctccatttacctgcccacagaaagatcatctttcaggagagtctggtggtcccgtgaagttagtagagttgagaccactgctgacagacatgtagctgagctcagcatggacaaatcgataccacttggaaagcaattacagtttctccttaggtttcctcgaagagttcttccttgatttgctgattcatttccaacaaagtgttaatgtctcaaagtactgtctctcctggaactatttacatttagtaaggaagggcatggtttcgtccagaaaaataacatagaaattggggggaattttctggcttcagtgactattgagaagggaagataccaggaggccccttacatagcatgtcctacccacctcagggcagggccccaactactccaggctggcttccttccccaggtctgcatgtgtctgtgccacttggagaaaggtagaagcacttcgcttggcttcgggtgaggaggctccattctcccactagaggccatccccaggaggttgtaatagcgcatactatgatctagaatctagaacgaggagagagagggaaatgctagcattgttgccatttttaggcagagaaaggacttactagtagagacagggccataacccttactgtgtgacccttcctgattccttccctaattcattcccctacctctgtgtctgctgtaaagtcatagagaaaggtaaaacaatagttcatatcttttatcttttatatgtaatttcattagcactatcctttattagcacagtagttctttacttagtgttcaagattcaaagtgtgtgcttgggataaaatgcaaaactcggatgtacgtttgatccaatctggagtcaaaaatcaaataacagcaatgagttaaatcacttcaaatagttaatgcgatctagtggtaagtccaactgaaacaaaatttaatttacaacaaagagagtttcctaattgtggcatttccactctttatgaaaagatctaatttagttatttaggggctaattatcaagaggattatctaaggcttttgctcttcatccttttctcaaatgctggcaagttttgtagcatttcattgttagtggcagagtgagcgggcatgcggaagaggccgcagggattggttacttggctgcccccaaaatagggcatacaaggattggccacccctggggaagaggattaaattattgactccgagagttttctaccttttttttgtatatttcacatactcctgattttattcctttcactcatatggaataattaagatgtctttgcaactgttataattttaaaatattctgatgtcatgtacactgtttttaatgcctttgtcttgttattttattggcttaccttattctgtatctgtttccctccgtagatttatcttgtgtgagttgtatgccttatctcctagaacttaatgcttctcaaaataatttgactacgttcttcaatttcaagccacccaaaaacctcaaggtagactttatgaataccttaattacacattaaggggtttgcaaaagtgcattaaataagcaaaatagcactcaaatagagaattcagagagaataagatacagaggtaagcaatgtaagtgtctgaaatgaaataaaaaagaaggctttgtgtatactttattttggaaaagggagctggtctgtcagtggataggctttctggaagctttgttcaaacctagtgttcaaaccaacgaacttccctctggtctcctctttccctcatttgaatagtagttattattgccctttttttgttgttatagtggaacaattttttaaaaatattacttggtacattttatttatttaaagaaatgcattttattgtgtatatttcagatgtacagcatgatgttatgggacatatagcggaataacttatctgaaaaattttatatctgaataatctgtaaaaatgtcctaggctcaaactttgcccttttatttatctaactttactttttaagaaaataatgctttcagatctccattcttgcttctccgcacttgcttttgcatttctgaagcagaaataaactacctgtggacagtggtggatggaatagtttgctatgccctagagcagtgagtctgttgcttaaatgcatgcccaaatcacctgtggttcttgtgaaaagggaattctgacccattaggtctggggtggggcctgagcctgtgattgctaaaaaccttcctgatgatgtcatgccactggtccatcggtcatacttaagtagcaaggtcagagagaagtggttcccacactcttctgcacattggaatcacctgagggagttttcagacctactgatacccaaatcccactgcaagagattctgatttaagtggtccaaggtaaggtgtgggctttgggcttcttattttcagagacaagttggagtgcagttgcgcattcttgtctcaccacaacttcagcctcctgggctcaagtgatcctgtcgcccaggctggagtgcagtggcgcaatcttgtctcactctcaccgcaacctccgactcctgggctcaagtggtcctctcacctcagcctgagtagctgggactacaggcacgtgccaaaacacctggctaacttttttggtattttttgtagaggcggggtttcaccatgtagcccaggctggtcttgaactcctggactcaaatgatccacctgcctcagcctcccaaagtgctaggattacaggtgtaagccaccacgcctggcctggacttttaaagagaccatcaggtggctctaatgtgctgacaaatctggaaacgatcaccctgggttttgtgattagtgttgttgtattggactcaaatatttaattaaaaagtcattttaaggaatggacatcaactattgccttttattatctattagttttattttatttacaaaccaaattaacttaaatccaaaatattctatggagagttgcacaaatatgaaaatctgtttgaaatcaagaaacagacattcccttatactgatgagagaccttaattttcaatttttcttcagttttatatcattcccttatcaatagtgcattttttccctttgaaattatagtttttgccaggatgacattcctttgtgcaaataagccgcactaggtgcctatctgtactcagtgtggggccgcatcgtcttgaggttatcaggaattgaatttgcaaagctgttttgattcaccttttgctgttccattcgccttgtctgaagccacagggcagtcattcatggtaacagcatgacccctaccccaggaaaaactttggagtttctccctttcacaccccttccttgcactctcccagaaagaccctacaaatgaacaaaaacagatcatggaccccatctttaaggttctgagctcctggagaattacaagcaaatatattggtcattttagagaagtgtgtaccaagtgccaagctgtaccctgaggtgctgcaagccactgtgagctctgtgtagacctgggaaggaatgatggtggcctcctggtgtatgttttcttttcttttcttttctttttttttaagatggagtctcatgcttgttgcccaggctggagtgcaatagcaagatctcggctcaccgcaacctctgcctcccaggttcaagcaattctcctgcctcagcctcccgagtagctgggattataggcataagccactacacctggctaattttgtacttttagtagagacggggtttcaccatgttgaccaggctggtctgaaactcctgatctcagctgatctgcccgccttggcctcccaaagtgctgggattacaggtgtgagctgctgcgcctggcctcaggtgttttcaatgtattatttaatcctcccaataaagctgtggggctgtcctgatattgtcctgatactgaagcatgaaaggttaggtaactaacttcacctttgctgggaggcagcggaactgggattgaacccactgtctgagaccccatggcccacatctttccagtaagtcaggctcatgtactatgctccgccatcttgagaagctccacttccttttcatttaatatctatgagccttgtaccaccaaccagagagaacatgcatttcctagagcggggacttgtatgtgcactctttttgtatttattagaatgcttttgctcttactaggtgaaaaatgttaatttgacttgatggctactttttccaagctctaggttccaatgggagtccaaacagtggcacaaacccctttaaggtctttcaagaaacctggctgggcacagtggctgaggcctgtaatcccagcactttgggaggctgacacgggtggatcacttgaggtcaggggttcaagaccagccatggtcaacgtggtgaaaccctgcctcaactagaaatacaaaatttagcctggcatgatggtggaagcctatagtcccagctacttgggaggctgaggcaggagaatcgcttgaactgggaggcagaggttgcagtgggccaagactgagccactgcactccagcctgggcgacagagtgagactccatctaaaaaaaaaaaagaaacctaataccatagctacatagagagcatagtattagcgtttgccctgactgaggtgtagttatacagatgtcatactatggcaccagaatgaaagatgttgatgaaaaagtgtcaataataagtaagccctatcatgataagcttattcctagtttattattattctatagaagaaaaaagtgaatgttaaactccatttacatcatgccaaactgacttatttcatagtatgcattttccatagctcccatttgtatatgcatacatttggtgttctgatttttttaataacacttttatttgtacatttctatttcttcatatagtttgctaacttgtattttactaagtagtcctgttgcttgctgtattgcaattgacttcatcagttttctactcttgccattggagttgtttctaaattagtttttagtatttactgtataaagtttttagtacttaaagggtttagtatttaatgtgttgctaaaataatctccataaatttggggggtgaaatcactattttaaagggcatggaaaaattagaatagtgcttattatgtaattgcttgatggttttccagaaaatgattataatgtacccagcaaattatgaatgcagtggttccaaaacttgagtttttctttccttaaaaaaactttttttgtttatcttttgtcagcaggtgaataattaaagttatttaatattgttttttagtcttacatgtttgactaggaacaacagaagttgctgaaaaagctttcctacagtagtcaattttgagaaagaatgtaaagttgaagaggcattgcctggaaataaataagtaagactaggccgggcgcagtggctcacacctataatcccaacactttgggaggccgagacgggtggatcaggaggttggtcaggagatcgagaccatcctggctaacacagtgaaaccctgtctctactaaaaatacaaaaaacaacaacaacaacaacaaaaaacccgggtgtggtggcacacatctatagtcccagctgctcagaaggctgaggcaggagaattgcttgaacctgtgaggcagaggttgcagtgagctgagatcatgccacagcacttcagcctgagcgacagagcgagactccacctcaaaaaaaaaaaaaaaaattctggcatttagagagtagcatgggacaatatatggaaataggaatagaaaggtaaaggaacaggaaacaagatatgcacagaaatgaagtgaatacaggttactgggcagtagagaaaatgaaatggttgtgggtaaggatgaaattgaggtaaatcctgaaggaagaccaaggaaatttaaaataaatgctaaaagtggagagcgtggctgcaggaattgaaagcatttaggttattgggaggttcctgtgcaccatggggaagaggccttcttactatccctcaaagtggacagaaaaggatcccagttagaaaatgattaaatgatcgggtgtggtggctcatgcctgtaatcccagcactttgggaggctgaggcgggtggatcatgaggtcaggagatcgagaccatcctggctaacacagtggaaccccatctctactaaaaatacaaaaaaattagccagttgcggtggtgggcacctataatcccagctactcgggaggctgaggcaggagaatcatttgaatccgggaggtggaggttgcagtgagctgagatcacaccactgcactccagcctggacgacagagcaagactccttttcaaaaaaaaaaaaaaaaaagattaaagacagatgattcttttagccttagtgtgtactttcagtaatgaattctaactctacattcaaaaataccttcttcttgcacagttaattattgtggcaaacatgaaaaatgaaatattaatataacatcttgttctctttctcttgccagaaggcggatttttcccacaaccaaatttctgaaatttgtgatttgtcagcgtatcatgctctcactaaactaattttggatggtatcctttgaataagtaaaggggaaaattttaaaaacaatataaaaattaaagactacatattcaagaattgtattagattacatggactagtaccagataagcaatttaatagagacgtgacttatttaaatgactaggaattggtattcacaaaatgaggataaatattttatttaccaagaaatgaaactgtgagtcaaagcttgtcaagagtatcttacccttgaaaagccaagtaagatagtcatttttccgataaatgtaggcttattcttattctagaaccagagaagaagttctgttgtaattaactcctttctcagtcgggtgcgttggctcacacctgtaatcctagcactttgggaggccaaggcaggtggatcacctgaggtcggagttcaagaccagcctggccaacatggcggaaaccctgcctctactaaaaatacaaaaattagccagatgtgatgggatgtgcctgtaatcccagactgaggcacgagaattgcttgaaccagggaagtggaggttgtagtgagccaagattgtgccactgcactccagcctgggtaacagagtgagactctgtctcaaaaaaaaaaaaaattaactcctttcttcaaatttgctgaaacttgtgtcctattttatataaattcagtatttgaaaatctagatatggtcataaggaaaattagtgattctttattttgcaaaagagttcatgataagttctttttaaatagtaagcttttctagtgtattttaaatatgctttctttttttaaaaaaaaaaaaaaaacaacttttgatttgatttgcaacatagctatttcatgagccaggctcccatgcaagcagagcacctcctttaaagacagcgagctccaacttctagagcctaaggggctaattggagatctgtgagtttaatgagcttgagtctcttcttcacaccagagactgatgttttctgggtagcaggggagccagtaccttctttttctcagtaagtatctttctagtcacctgaggattttgggagacagaatggagaatgaattgattgccttgggtgcctcattcagggatgtgacagcagctagtacacactgcatttgtgataaggctgatacgagggacaacagagggtacgttttcttgaagatgtatcttgtaaaagaaaaaaatcctttatttatatatgatggaaagcttggaacatagcaccactccctttagaacttgtgtgtgaaaatgagcaattagtggacatttagatggtgcttaaatgagcaagttttcctgattatagcctaacagagaaatcagaaagtgaccaatataacatgttttgttgacaaactaaaagcatacacattagcagcatatctctgtagaaccttcacttcatgcttgactatcatgtattttgagtttgcaaagaaatagctggacagtccagaagctatctggctcagacatccatttatctcaggctgtgtagagtgctacacaggaagaccacagcagcagcatcacctggaacttcatagaaatgcagattcttgggctccattgcagacctaagaaatcagaatctgcattttaataagacccccccaaagcaatttgagtgcacattaaagcttaagaaacactggttggtctaggccgggcgtggtggcttatgcctgtgatcccagcactttgggaggccaaggcgggcagatcacgaggtcaagagattgagaacatcctggctaacatggtgaaaccccgtctctactaaaaatacaaaaaattagccaggcgtggtggcgggcacctgtagtcccagctacttgggaggctgaggcagcagaatggcatgaacccgggaggcagagctttcagtgagcccagatggcgccactgcactccagcctgggctacagagcccgagactctgtctcaaaaaacaaaaaaaacaaaaaaaaacaaaaaaaaaattagctgggcctgatggcacgtgcctgtagtcccagctactcaggaggctgaggcaagagaattgcttgaacctgggaggtggaggttgcagtgagccgagattgcaccactgcattctagcctggcgacagagcgagacttcgtctcaaaacaaaaacaagcaaacaaaaaaaaaaaaaaaagaaaaagaaacaacactggtttgtctagaagtcagcagcccctaaactcttgctagccagaaagaattcagcaattagggttccctgaatgctgatgatgccatggcagtctggagtttgttatggagatctcttgtcccccagaaaaacattctatgttttggcatgaaattgccaaggaaaacaactccacagtattttggactcaaaacacagttgaaaacatttctatcaagagagtcttaatttctatatacatttagctttccatgtaaaaactaaagtatcatgactttgtaaatgtcagatataatgaaaaaaggaattagggttttttttttcttgacattagatgtagcaattgagtcatcactaaagtataaaaagctgtaattattacatcaaaaccaatagaagtttggaacatgggtatataattagagtgtaacatggcaccatttctcacctgtgttttaaaaaattcaaaaacaatcattcatcaactattaatgaaataaacttcttagatctcttgcagttttgaaaagatagtaggctagttttgaaacagcatgaaatatacttctttctctcctgttctgtttaagcatatcatattgtgcatgatacaggtggtgaagttttacaagcttttctggacaacagaaagcaaaaatatatctagattataaattaatctcttgaggagaagaaaagccacaaggttagagtgtttttgaaaatattaaaacagtttgattaaaaagagaattttaaaacaacttttatgccagtacagttgaaaacttggatgaaatacaaaaattcctagaaaaatattacacatcagtttggaaatagaaaccctgagtagtcctataactataaaattaatttactataaattaaaataagctaaattaaaaaattaaaaatctttctaccaaaaaagcctagaccccaaattttcaaaacagaccttccaatagtgaacaaattctttcaaacactcaaaacagaaggcatattcacaattcattttaattaggttactttgatatctaagccagccaaggagcactaagataaaggaaaacaacaggcttgtctcactcatgatgtagctgtaaaagtcctaaacaaaatattagcaacagaatctgacagtgtattaaaaagaccatgtattaccaccaaattgggtttttctcaggaatgtatggagagtttaatattagaaaatctataaacataattaactacattaatagattaaagggagtaaaccttgtgatccagagatatagaaactcaacagatatagacaatttaataaaatccagctctcattcacaatgaaaactctcagtaaactagtaatagggaatttccacaaattcatagaggatgtctacaaaaatatttgaaacacactttatcctaattgggtacatgttctaagctttctcctttaaaattgggaataagttaggatgtctgccattgccacttcaacccatcattattttggaggtcttagccaacaccataaaacaagagaaagaaattaaaggtgtaaaggttagtaaggagaacataaaagtcattctttgcaaatgacatgtttatctatagagaatattaaaaatttgctataaagtactataaataatagttttgagagttcaacatgaccagatacgacttcaataaatggaaatctgttgcatttctgtatgccagaaacaagcaattagaaaacaactttaaaaagaaacaccatttataaaaacagcaaaaacaaattttattaaagatgaataagacttgtggggatagggggactaacaaaactctatttaagggtgttgaagacctaactaaagagaaatatatcccatgtccctggataagaagatgggcaaaataaaagatgagaaaaagaattttatggaaaataaatcagagaaggcaaataaacatacgaagagataccagcctcatttgtattccaagaaatgcaacttaagaccacatgagatattgtattacatccattcaattgacaaaatttaagaaatctaaacataccaagtgttggagaacttgtagatccagaagatctttttaccttgtttgtgggtatgaaattagttcaaccaccgtggaaaacaattttatattgtcatataaagttgagcatccaagttcaccatgacctagtacttttattcctatatgtggaaagtttagtatatgtgtacctggagccttgtataagaatgttcatagcagtattgcttgtactagtaaaaaattgaaacagcccaaacacacattcataagagaaagcataagttatggtatagtcacacaatagcatatcatacagtagagaaaatgaatggaatatatctacatgcatgtaaatataatttaggcataaaactaagggaggaagggaagaagagacaactgagcatagttactgtctctgggaaggagacacagggtagatttaagttgttaattttctgctgattgggctgtgggggcactagtttcaagcatgctcattatatttttaaaaataaataaaatcagtcaagcataggtcaatggtgaatcaagtattaaacttaacccagctctatgtaaaaatttaaaaacctgaaaattataaattaatttctttgaaaataattatttaaaattaaaaaaatcagttgagctagtaatactgacagtgtaattgtagtagattatatctaatatctcagaatgaattgttaactataagataccaatttttttattttgttatgctattttgtctttccatatgtggataattgatgattaattgataattatcctaaattgcaatacaataagctttgccaagtttatgtaaatatacttattcttaagaaagagtacagtttattctttacctgtaaacattgactagttgttttttagaatttattttatgatgatagaataatggaattgaaaaattcatagaaatttaattccagacagaattttagagaccatctagtgctaatcactattttattttgtggaagaggaacctgagactccagaagggtcaacaacttgccccagattatttggtaaatggttaaactgagacttctgaattccactgtttttcccatgttgcaattcattgagtaattacaacttttgtcacagaggcatttaaactatgcgtgtttcttttcttggagagattttctcctatagtgaagagcatttttcactggtaaggtgatatagatctttcaggattggttttgattaaagccatcattgcagctctctccactaagagaactgtggtggatttcctactatttctcagtaactgtttgctatacacttgaaccatattttatgattgtagacaaacgaataagagcaaatactgaactagtgaataattcatgtcaagcattgtgaactactgtcagcatcgtcaaaatgtaaaaatatgttgttgggctttaccccagttgtaaagttatgcttaagtgccacagggttccttcattcagtttccccaaggatctacaatttcactttaaaagatttattcacagaatcataaaagtttagagctggaatgcggtatgatgattttgagttcttttgagtttctttctcctgatactggtcttttaaaattaaaatatacgtaagaggattaacccagtaagctaattcattgtaatgtgtagtgatttatcagattatgtttcttcttatcaggaagtcccgagacctgtgaaagaacacgaataatgttaggaggaagggcaagtaacattttgtgaaggtccttaagagaatgagagattggggagataaagatattgaagaccatctatgaactcaaagctctctatggcccaggcttgcatattgactgttggcagtgccaccaggcccacatgaggtgactgtgggagcaagtagaggaaaaagctgttgtatcactgtagaaagttctctttactcaggagcctgattaatttagagtgtctgaaattccttgatatttgaaggagagtgaaaagctgagaaacaggaggaaataatttttctggaatgagcatatttctcaacagagatgttcaggcaactcctgctcctttgccctagtggtgttagtaaccgcaatggtacctgcagaaaccataggtatgattgcagtgagcatctgaattcctcctcctttctgtccttgcagtgctgatttcagaacacgtgactagctgtgggattccaagctagagagtaagctggatgtgccaagggaactgtggttagcctctaatgtcttagaaaattactgtagacacaataaacaagctttcctttttgattcctgatatctcttgataatttcaggattcctgttttctagttttctgatccttgcctgcttcccatgagaatacttcctgaggcagatacccacaagcagtggttttattctgccatgattcagagtatcttcatcttggttggggtagagctaccaggacactttagtactcctaaaataggacttaaacatgatttctgtctctgctaaactgagacagatggccattcgaagttttccttgcatagtttttgttgccaaagattgcctgctccaagggtattttatttcttccatacctgagtgagatagtttaatctcctatttcttatgtttcatattcatattttgttacaatccgtatctacaaagatctggtctttgttctagttccagaacaattatttaagcagcccaaagaaagtagaaccagaaaggatagtattagtgagcataaacatctgtttgtagggctattctggcaggaagctttatgaaaacagatttgaaaatgcatattgaccacaaacagagctatacttcagtctaaggattgaaactgaaaccattgaggaaaacccaagaatttctggtacattttacatttttgtctagtttccttatttacctctttctctggcgtaggtattttcaggcttaatcccagccttgaattttccatttctgtgctattgaccaagaggtagaggacgtgcttccttggcctcatgtaatataatttggtaatggtatcaatgctttataattgtgaggtgatttatggtttgttgctcattcatacccattttctaatttttttcccatgacctaacttttggccttaatggccacctgatattatccccactttaaatgaaaaatctactaagtagtaaagttgggataattacaaataattatggaggcaaaatgtttttgtgatatttatgacttcttccttcttgcttaaaaaaattatttgtttctctgattaacggaaggagatagctggagattagaagatgaccaggagaggctttgaggaagaaatggtttgtctagaatacatactaagaaatggaatggctgtgacatatttacagttatgatagacattgcaaaattgcctctaaagtggctatatcataatgaactctctcagtagtataaaagtatctgttattcaaaaccttttactttaaagtgtttgccaagctgatgggtaaagaatggcagtttatcttaatttgcattctcctgactacaggtgagacagaacgtcttttcatgtgtttattagccacttagattcactctttcggaaattgcctgggcatattcgttgtccgttttttattaggttgtttttttttctattgatttattgtcatttttaatgtattctaggtagaatcttttgtctgctagtatatattgtgaatatggtctcctagcctatcattttcacttatttgtgtatttaaaaagtaatagtaagaaaataagtgttatatgtcaaaaagaaatacttaagatattgatttaatgtgagtgttaaaaaaataagaaaaaagtgggatttggagttatcttgaagaatgggtatggtttagaaaggagcaagaaaaagaaagttcttggtacattccagaactattgtgaaattgacctggcagaaatagggaattctcattggatgatgatgtggatgaaactggataaataagttttgtttatagtgaagggccttagatggcagagtgaggaatctggaattctatgagaattttttaattgaaacatgatattcaatcaatatttaaaaaaaattaatctgcctacagtgtgtagagtgactttagggcagaaagtaatggatatttgtgtaactattgatgttaaaggtgagttaagttggcagaggaatgaataaaaaggaaagaaatcattaaagagatattttaaggcaaaaaaatggcaggtcttggtgattggatgcctcacagattatgagtggctgagaaatggagatgtcatgggttacttgagaggaaaaactgagctttgatggggaaatgacattaaatcctggaaattggtcaaagagattgagaacagagagagctgaacagaattatgactttgaaattgtagtgttaggtgactacaagatggaacacagaaggtaagctaaaattttcacaataaatggaatttaacggatgaagaaagtaaggcagagtttaagcctcattgattttatgattgaatgattttatgacctcattgattgaatggaggtcaatgtagacggaaagaaagggctgttcctttctctaacagggtattggtctttggaccacccatttgctgcagatgacatctcccaggctcttagcccagttatgaggatgataatgcatggtgcatgttgcccctgcagggtgatctggtagtcagaagttctgcctgtgggaacacacatgagtttctcatggagacttaactgatcgagggaaaacacactgccaatgaggcagctatgagccacggtgatttttctttccgtactgattaaatgagtcagatacaatccagcacactcaaaagctatgcgtttttttgagacggagtcttgctctgtcgcccaggctggagtgcagtggcgcgatctctgctcattgcaagctccgcctcccgggttcacgccgttatcctgcctcagcctcccgagtagctgggactacaggcacccaccaccacgcccggctaatttttttgtatttttagtagagacggggtttcaccgtgttagccaggatggtctcgatctcctgacctcatgatgtgcccacctcggcctcccaaagtgctgagattacaggcgtgagccaccgcacccagccactatgcctttttaaaataaaaattgtataaaatatgacatgttctgtatgaaaaaatatatttcaggattaatactcatcctatattgggcatataatcgttctttatttaagctgtggtctgctttgtctagtgatgatttaacactgattctttttttcttccaaatgcttttaataacattttccttaaacgtagtcatggtgtataggcaatgagatagaagaaatcagtggactagagatgtgcaacaacctaattcaccttagtttggccaacaataagatcacgacaattaatggcttaaacaagttaccaatcaaaatactttgtctggtgagtctaacaaaatgctgttctttatagaagtagtagttaatgcttttagtaactacatgaattatgactacttaggattcaaatatataaagagaaaattccttcatgaaatgttattgtcttcagttttgtttgctcctttctttaccatttgtgtgtgtgtgtggttgtgagagagagagagaaagaaagcaatatttcatgctaaagtaaaatgatttgctaatttgttatccaaattcagtattttaaatgatcagcttttttatactgggaaagaaaggtatacttttagtatgtatttaaaaatattttttatagtatcttattggtgaaaataacatttaaggatacttaagcataatatttattgctgttaacactttaactgctttcaaatgaaccacaagatgttttctgggcactgaattttgacagtccttttattttaacatgtgttagtcagtcttccactatagaaaatcaaaaatagtgctaagaataaatgaacaattccaatcagaaagtttaaatttgattatttttcccacagagagcactctttcgaagctgtgtgacctgctgtgtgactatgactcaatttacagaaattcagcaggattctaatagtcccaaagatatacacagtatttttgaaataacaggatagctccctaacttgggggtctacagtattgtctgtgaaatatccaggattctttattctcctttctcctacttcttaccctcttggatggttttgctgttcttcattacatctatcatggggtcagcaggcgggatttcaagccatgaggcttgtagcttgtaaatttcttacaagaactatcccacagggggttgttgaaactgttgcttgaaatgacatcttgggccatgcactgcaactcatgcctgtaatcgcagcactttgggaggctgaggtgggaggatcacttgagtccaggagttcgagaccagcctgggcaaatagccagacactgtctctacaaaaaataaaaaatttgctgggcatggtggcacaagcctgtagtcccagctacttaggagggctgaagtgggagaatcacttgagcccaggaggtcaaggctgcagtgagtcacgatcatgtcactgcactgcagcctgggcaacagagtaagaccctgcctcaaaaaaaaaaaaaaaaaaggaaagaaatgacatcttggattatctgctgatttttgacatatacaatatactatttctgtcttatttaaccatagatcactgaagattggctatgtgttagtttttctttcccttagcttagagctcgaagtgctttcttaaaactcttccaggctgggcgtggtggcttgcgcctgtaatcccagcactttgggaggctaaggcgggtggatcatgaggtcaggagttcaagaccagcctggccaagatggtgaaactccgtctctactaaaaatacaaaaattagctaggcgcggtggtggtcccctgtcatcccagctactcgggaggctgaggcaggagaattgcttaaactcaggaggcggaggttgcagtgagccgagatcgtgccactgaactccagtctgggtgacagagcaagactccgtctcaaaaaaacaaaacaaacaaaaaaacatcaaccaaacctcttccattcctgcagtgagttaggtcaggataaagtattggcatcccagtactgaggatgaacctgagggtttgataattttcctgatctttcatgttttccgcccatgaaggcatgtgagcaaaacataaatgaaaatgcattcaataaattagattgaaaatgtttaagttagaaaagaaagtcaacttttaaaatttacgacaatctgaaggatttttagcagcatgtgtgcttcattttgtggtctgttagaatcttgttcttttctttacatgtcttctctgtattgatgttcccattcatttaaagtggagcatggtaaacagacaaagatataggggtgtgcttaagggaatgagaatgaactcattattaagaattataatacgtagcattttcatcctaagggtgtgtttcaattacaaaataaataatccatgttgatagttctgtctcaagtagcttttagaaaaaggatagaatacttctattttcttagatttggtggattgttcccaatctctgccctcatcacccaagatcaactagaatacacagaatatactgtcattcatttttcttaattttttgataatagaaaggttttcttttccaaagtttaataaaatctataaaatttgtttcaatagtttttaatgcttttatttttaattcatggaatcaagaaaccagtagctttagttactattgaaaataatttacattacaatttagagaaagaagaacaattcaccatatgaaccaactgttaattctcgaatgtcaacttttatgataaatataaggggaaaatgtggttcactaatgggctgttctgtcatccagcttcttagcaagtaatgacaatgcattccaaactttaaaattcatttcgtcacagtaaatgctgcttgtttttttcttccaaaattggttggttgagaatgtttctaatttcatttattcaagaaagtggctttattctaaaagtcttttcccaactaatcattatgaaacaagcaggaagaagcttgtttgtttcagaagctggatgtccacttttaggagagatacattggtttttcagcattggatgaagagtttaactagatagctttcaattcagaaattctgtgattctaaattttttttcagttgtggtttcttttatgacatgacagtaggctatctaattaaacttgtctatgcctcactattctcatgtcatctaccactttgaaagccattagagatactgtcggaagcattacagtctatctaccacacctaagggacttcaaaattctgtgggaagaagtgtattaagaagaattacagtctatctaccacatctaaagcatttcagagttctttagaaagaaatatattgtatataaatttgatatgtggggatattttgaataggctattggggtcttattgcagtatgttaaattaatatggatatgacattaagtttggtgtagttttttttctttcccttttctattatgctttatataacttttttgaactctggacagaaggaaatttgactttactttggcaaatggattatgggtatttttttctatttattatgatatttttcaaacatatataaaaataagaagaatactatgataaacccttgtgtgctatcacttagctttgtagattatcggcattctattaacatgtttttaaaagccatataattatattaatgaacacaaatcttgctcattattgaaatgaaattttattttaaaaataggaagaaaatgagctcttgctatgaaatgtaccagaaaacgtgtaccagggaaaatatagagggaagaaaattattgttattctttttttttttttttttttgagacggagtctcgctctgttgcccaggctggagtgcagtggcacgatctgggctcactacaagctccgcctcccggattcacgccattctcctgcctcagcatcccaagtagctgggactacaggcacccgccaccacgcctggctaattttttgtatttttttagtagagacggagtttcaccatgttagccaggatggtctcgatctcctgacctcgtgatccgcctgccgcagcctcccaaagtgctgggattacaggcccggccaagaataattgttattcttatttgttgttatgggtatatggagattgaggaagaagacaacatttcagtcttaaatcttcgttttattctgattattgaggaagatgcttttgtgtgaattattgaaaaacttggtttggttatctactgttgcataacaagccaccccagttgtagtgacttggagaaataaccatcctattaactaacaattctgcaatctgagccaggctcagctgggaggttcttccactgggcttgctgcatttagccggcatcttagttgggggcttggctcagttgagaggctgggatggcaaggtttttctctctatttagtgtcagggtgtctccccatgtgacatttccttttccatataacctctccacaagttctctccaacacagtagctgcagttcttatgtggtagctcagtacttctgagacacaaaagcagaagctgtcaggccttcttaagtcttaggctgggaactggcacacttctaccatattctttggtgaagctaattcataggtccagcctaggtttaagaggaggggaccacggccaggtgcagtggctcacgccagtgatcccagcactttgggaggccgaggtgggttgatcacttgaggttaggagtttaagaccagcctggccaacatgatgaaaccccatctctactaaaaatacaaaaattagccaggcatggtggtgcgtgcctgtagtcccaggtacttgggaggctgaggcaggagaatcacttgaaccccagaggtggaggttgcagtgagccgaggtcgtgccactgcactccagcctgggctacaaagccagactccttctcaaaaaaaaaaaaaaaaaaaaaaaaaagagtggacagaactgcccaagggcaggaataactgggggcatggctcattggagaatgctaatataacagactactagcaccctcaccacatgagtgattacatttagggtgtttctgaaaacaaaatgtatgtggggattataatagtcaagtggcttcttgtgatgatgatgaaagagttacattaaatttatgtttctagtgatatatctggagttatgctgtcattacacttcaggtgtgcaatgttaaaaccttatattacctgcctttttctttcttactgatttgaatactcatcttgctttaactttaatgaaaatattatattctgaattttccacctggaaaactggaacttctttctggggtatgtgtaggtgtttagagaggtgaatgatggaaatgggatggagggaaggacaagaatgccttcttgattttttttagagagatttgggtcagtatcccaaatgaaaacttgccattacaacttttccttgagaggtctttgagacattaaatatatttttttctgttttagagcaataaccagattgagatgatcacaggtttggaggatctgaaagccctgcagaacctggatctgtcccacaatcagataagcagcctccaaggcttagagaatcatgacctcctggaagtgatcaacctggaggataataaggtagtgttgcacttcacatgtcttggtttcagtgttgacataagaggacatattagagacttagcacacacccttcatttttggtttcttaagggcggacacattaaatgtcagcttagaaatattgttctagcaaaattcctggagtagttgcagaagggttgtttttaaaaatacttacaatcttaattattgaaaatgtgatgattcctaattacattgtttttaaggtttaaactgcaaccacgtgtggatgattttctaaagtatacatgttcattcaaaattttgtgtagaaagatggcagtaggaatgtctgaaatatcagagtaaggaggttggagatataagaatagccattggctggtgttgctccatatctgccatttaaagaaaagtctagggccatgatggggggagtgttgggaagatgttggtcaaaggatacaacattttggttacataaggagtttgtttcagagatagattgtataacatggcgattatcgttaataaaaatatattgtgtttttccatgctgagagagtagattttaaacatttttaccgcaaaaatgattactttgtgatgtaacacatttcttaaatagctagatttagccatcctacaatgtaacatgatgatttgatgaatttcaagtcatgatgttgtacacagtaagtacatataattttatctgtcagtttaaaaatattaaaaagttttaaaaatgcaaataccctaggaaaggcttaaaccctcaaaaataaaataaagagaagaggcacaggaagggagttcttatataccaatctgcatggtggcttggggactgggtttactcaaattttcaggtctggcttaataacgcacactttacttcaaaaaccacagaaactggctttcactcttaattacattttatttttaataaagcatttgtgttcctaatcatggcatattaagttggtaactttagcaaacttcttatgctgtaaggtctacaacgttattttatttatatcgaatactttatcacatttttgggagaatgctttcataaggaagttcaatgtttatttcttcttgaaaatgaaaaattgggctgagcctgaaagggacagttggtgccagctcaagtgagctggggtgttgtggggatcttgctgtgttctgctgtggtggtgcttgtcggttttgtgtgatgagccttttttccaacagacttccctcatctgttaggttgctaagaatcaagaaaagtcagttattagtcctgggaacagaggagttttcaatcacagacaaagctgttcatcttcattctccttgacttgtatattaagttgttttggcaacttctccagttaattctggtggacaacctttgttcactgtaccacgtgtcttaggaagtccacacaatctccatctcatgtggttttagtgtcctgttcatgcatttgccattgaagactgattttcagaaaatttcttacttaaaatgattctcacatatatacagaggctggtgaaagggtggaaagctctcattaaatctcaactcaatgcatctcaggatttaggaaaaggagtaacaataatgataataataacaattcaggtcataaaataatctagagatatttgttgagtacttatgtaccaggcactttcctaagtactttatctcatgtaatccttattataaccctattattattgtcattttacagatgaagaaacaggggcagaaagaggttaagtaacttgcccaaagtcatatatccagcaaatagcagagccagcctgcacatagagaatggtttgcctccggtttcaatgttcttaacctctgcagggtgatatagtgcataaaatgctaatgggcctcccttctgaaagggcctgttgtaatgccccaatacagtgctttctcagcgaaacatcacgtgagccacagatgtcatgtaaaattctccagtagccacagtaaaaagatgcaaagaaacaggtgacattaattttaataatgcattttacttaacccagtagatccaaaatgttgtcatttcaacatgtaatctacatacaaacttattgatgagatatttaaccttctgttgtttcatactaagtttctgacatccagtgtgtattttacacttaaagtatgtctcaattcatcctggccatattttaaggtctgggcagctgcatgtggctagtaattaccatatgggacagcacagatctagaaatacctcataaatagtatgttgttctcttccatttcaagaggcttttcaaattgtatttgacaaactttaaagaaaaaagaggagtatcatcacgtgaagaaaggagtttataattttcaaatgttaaagaggctccatgaaaaaaaagtggccacgtgtcccaaagggggatcctttggcacccatgagctctgtaacaatcacctaattccccgactccccctgggcaggttgaggagcaacccgcaggctccccaaatattctttgagccttcaggaaagttcctcagagaactctacaggactaccgagaatactgtgtatctcggtggaaaatttatcatttagcagaaacataacctagcttctgcttctcatatgattaatctgatgttaagaatattgttttattggtagcacttcatcagtattatgtacttggttttagcaattgaaacattgtagcacccacatgtgatcatttgaacatcttcttaaggccacttgagaatgtttaccatcagctgggaatttggggaccttagttaccctctactctgtagtcttgttagattttatatcatttccagcatttaaaacatatcccaagctgttagctctattataacctcagtcctttcttctagaagcaagatatcagtctgggagtgacttcgaaaaacgctgtcttacttctctaagtctcagtgtcgttatgtcacactgttggttcccaattacttttctgaatttttgtgaggattcacaaggtaatactcataaagcaatggcagcatggagagaacttgaatcctgagtaataacagtgctcctcccagagctccccatctctccattctttgcagtgctctggctttccttctaaatcattctcttgaatgctgacggagacaatggcagctgaagaccattattccactcaatttttgtgctgctttgtatagaaggaacattctttgccgaagactccttgcttcttgttgttcaaagacagatgccatttaatgtccccggcaagcaatgtgcattacccccctcttcactgaaccctggctcacacttctcttcacatacgtgagcaaaaggaactttgggggcattaaacccaatcaggcttctaagtgaatttaatttctctctggatttaagtttgttagattaggcctgtaatgagaagggttggactgggtgagtccttggggcctccaggggctgacaacattgatgcagaggcatgccattgatgctcgcgtgatcagatctcctgctaaagtcaatctccattccacctggccaacatactcctgccctgggatgcaaacaggagggaggaccccttggaggtctttggcctccttacacccaaaggtgatgcccaaggcaggataccctgatctgctcagcaactgctctctggatagtcttggctctctgcagagagtgctgatgggtgcacactttaagtccaggttttgatgctgcttcatcacttttacaaacaatttttgaactctcagaccaaggtgaatgtgactttcccctttgcccctgacccctttcttaatgcctgtatcacagtgatggacttggcctgcttcctggtgccctggctccatggtgatggggtcagcagggatagttaccctttgcctgctttagcactggctcactgagtagagtgccggccgttgaacaggagaccgcaggttccacaccgtctgacttggttaggccagctacgcaggactggctgtcagtggccagtttatgtgactgaggatagagaccagcactcttaggggcagctggtggggtgcagtgctcccttgcagaaggggcgggaatgtgaagtcagccattttcttctgatcctcatgcagatccagcgtatttccacctctggagcttcatgacagctggtgtctctgctggaagcttttccccacatcttcaaataaattcacttcatttcatttaagcctctggcaaactctcatgaaaaaaggcctctgaccccgtctggcctctccagcaccccctccctgttttctttatccctttacactgtttaatttatcattagtacttactgttacctggggttatgtcatattgcatattctagtttcacatctgttacagttcactggctttccaactagaatgttaacttcatgagctctgggactttatcttgttcacttttgagcaatgcctggctcagaggtgtcattgaagaatatttgttttcttggccaggcatggtgactcacatctgtaatcctggagctttgggaggccaaggtaggctgatcacttgaggccaggagtttgagaccagcctgggcaacatagcaagactcccatctcttccaaaaataataataataaaaaaaactgggcatggtgacgtgtgcctgtagtcccagctacttgggaggttgaggcaggaggatggcctgagtctaggagtttgaggctgcagtaagctattatcacaccactgcactatagcctgggcaacatcacgacacccccatctcttataaaaaaacaaagaatatttgttgactgaatgcaggaccctcaggagctctcaggaatacccagatttgcctcccttctatcaaatgcttggttgatgtttgagctgcatgggatgagattctggaatgactgtgtataagaagtgaggcttgagtgtcttcctacagggcagagaagggagatggtgaatggagatcacaggaatggcttgagctgagaggacaagggccttcaatcaggtagcagtagtaaggaagggaaggaaggctggggtctagagttatttctgaggaagaattactagggcagattggaggtggtggatgaggaagaagatgtggctgaggatgactcccgggtttgcagctcaggtgactcaggtaactgggtgacagtgctgccatccagcctccttactgtcatcgagaacccctggttcatggttctttatcttgtcctaaaccttagaggcagagtgtcccattccaacagcagggtggggacatgctgtgccagctctctgtgacagaaggcaagccctggccatggagccacttctcttggaagctaatccttactaagtatagtgggtggaattgtgtgcccctcccctccaaaaagcctaccctcaggaaactgaatgtcccctcatgtggaaaggggtgtttgcagatgtaatcaagttcaggatctaaagagaagaacatcttggatgtaaggtggccctaaacccaatgtcctgataagaggctgaagggaagaagacacacacacacacacacacacacacacacacacacacactgaaggccatgagaagacccaggtgaagatggggcagagattagagttatgttgctgcaagccaagcaaggtctggagttactggaagctggagaaggtagggaagggttctcctccagaaccttctgagagagcacaggactgctgacaccttgatttcagactgctggtctccagaactgtggaaggaagaaatttctgttgttttagacctccaggtttgtggtagtttgttatggaaaccctagaaaacttatatatcaagtgaaactgtatgtctggggaatagaggatgaggtctgaaagttattcttcactatgatcttttgtaatttctgctttttatgttttattgaagaaatttctctataccctaaggttttaaatattcttatatattttcttataatttcaagttttgtttttccatatttagtctttaatccaattgggatttacttttgtgggtactgtgaagtgggcatctagttcccaggtaggaaacaaattgtcccaacatttcagaattctgattaatacttgtaaaatattctattgaatggataagtcaggatttattgagacatttacttattgaaatttatgtttaaaatttgttgtagtatatattcttatttataaatctttaagtgtattttaaattatttacttaggatagattcttggaaataccattactggatataggcatttttaagactcttactatatttcataaagattcatactaattagtgtcctaccagcagtatatgaagttagaatactatattataagcacatcttactacacctttgtgagcaaatatcttttaaaaattatgtcactctggtagagaaaaacagtattttgcattattttatataaaaatttttgattacccatgaggttaaacatttttttgacctgtttgttagacacttagttttctttttagaaattgtctattcatgcccttaactatcatttattttattatcgttcttctgcttttcgttgtactcattgtacttttgaaacacatttgaaagtaatttatgaagtctatcaatatttttctttgtgtctccctttattatttttaaaatttttatgaagtctttctctgttctgaaatctgttaggtgttcacctaaacttttttcccctggtttctttcattacctttcaactcttaatccataatttattttatggtacaattgaaacaaaaattttaatttatagaaggaataagatctagtgttcaatagcacaatgaggtgactatagttaataatattttactgtatatttcagaataactaaaagagtagaattgtcacatttctaacacaaagaaataataaatgcttgaggtgatggataccccagttaccctgatttgatcattacacattgtatgcttgtatcaaaatatcacatttaccccataaatatgtacaactcttctgtatccacaataactaaaaatgtaaaaacttaatttactttttccaatatctaatagtaatataatgataacagctatcatttattgagaactcattatatcctcagccttgtgctaaccaattcccattcattaactcatttaaaaaatagtttcattgaataatactaattttctcactgatacagaaatactttctgaagtatgcattcggttccattgatctgtctgttgattcttattccagtaatgcactcaccatcatcatcaactagttgatagatcctcacagtttgaaaaatatttgtggttcatcttttaagtatacaccattcttatttctcttaagattctactaagatacagaaaacgtaaataaaactatttgtctttagtttagtggagaattcaggcctgcggcaacccaagttctaaccctggccaaatataggaagtcaagcaatcttttttttttttctttttcccccttcttaaaattgtaaaacaaaaccaatactgagaagatctgtttctgaagtatttattctgttccattgatctgtctgttgattcttattccagtatacacttaccatcatcatcaactagttgatgggttccccgcagtttgaaaaatatttttctgcacagatttatgtttaaatgtggcagcgaaaaaaattttaatggttgtacccaattgttttctaagacgacaaatatatatatgtgtgtatatataacatatatttatatgtacttatatatttttatatattcacatatagaaatgtatattcacatatataagtttttttttaaagaaaagactttagtagttccctttagatctggatggtgatgcttagagactatggccttgagggaaatggtaaaagaagaaaagaagaggaagtcaacgtgctttggggatgggggtgtggactatcgtcaataggggcaaaggaggtgagagaatgcgctggactggagtctggggatcaactgtgctgagatgacattcttggcagcagatggctgaacttcccataggaatataacctttctggtggtatttcactgcaagctatttggggtgctgttgtctctactcctgctgtaaaagtctgttatgcacacagccctgggtttgtggcctttgcagagaaaagatgtgagggtggagtcctcggggtaggttgtgcaggagagggagggcgcatgcagggcaagcagtatctgtggcactttgctaattcagtagatgtggggaggtgaagccaggccaccccataccttctcccatcttacctcatcctacccatggaaggccaggaagggaagatgggtccctttcatttaattctcaaaaaaccaactgatcccagctgacatcttgtggtaatataattttgtatgttccatgatcactcagttcatggtgtttgtaacatattaaggaaatctttccatgtcaatcattgtaaatatcactatcttctaaaatgagcatgtagtgttcctactataggactgtactgttacccatttaattacaggatcatggtgttcttaggaattcatacttgttttacttttactgataatgttagactgaatattcttgtatctaatttttttacaaaaaattagaatatagaatatttcacatatagaaattacatattctatataaatttttttaaagaaaagactttagtagttccctttagatccagatggtgatgcttagagactatggccttgagggaaatctaattctttacaaaaaaattagatacaagacgatctctttagtataaaccccttgaagtgggagaactggttcacagcttatgaaacaaatgaaatacatcagattgccctatagaaagaatgcaccagtttccactctgaccagcaatgtgtgcaagtgcacatggccacaacttgttggtgagacgtgataaatgaaggaacacatctcctcttaacattagtgttaggtccaaaaaacaagagcaggccagtgtggtggctcacggctgtaatcctagcacttgggaatgggaagtcgaggtgggtggattgcttgagcccaggagttcaagaacagcctgagcaacatggcaaaaccctgtctccaaaaaaatacaaaaattagctaggcttggcagtgcacacttgtagtcccagctactcgggggtcgggggctgaggtaggaaggttccttgagctagggaggttgaggctgcagtgagccatgatcatactactgcaccccagcatgggtgacagagcaagaacccatctcaaaaataaataaataaataaataaaaaagaataagagcagatggaatgctagaaggaaattaatccgttgttcacaagtttacttttccactttcctgaataatacaatagaaaacaattgatcccttttaaaaaaagataatccaaatggcagactgatggacagtttagtcatcttacggaaaaagatgtgtataatagtataacgttgctctaacaagattaatgtgttcaggttgtagattgcaactctggtgttcacctttcatattgtatctttgaaaatggcatcctttgaacatggtgcatatgtttgtcctctgacttggctttgggtctagtttgcattttagctgtgtattgtggttggataactcaggagtttttggtgacccttctgtaggagtgctttccaatgcatgcagaaatgattggagaaaaatagaaatgaaaaagtgatgattaactttttgcaaaagtgtaatatctacacttgagataaaattgtaattatgctaattacagaatatttaagtaaacctatttgcctttaatttagtagagaattcaggcctgccgcaatccaagttctatttctggtcaaattaaggaactgtcaagcaatcttttttttttctttctgttctcctactttttaaaatggtgaaacacaacctatacagaaaagtatataaaacataagtgtacaagttagctaaagagttcaaggtgaacagtacacacccatcaagaaatatgtcatacaatttttagttttttaccttgaaataattctctgttggaaaaagtgataaagccatatatgtacatgcagtaagaaggctttggccgggtggctcatgcctgtaatcccagaactttgggaggctgtggcaggcggatcacaaggtcaggagatcaagaccatcctggccagcatggtgaaaccccgtttctactaaaaatgcaaaaattatttaggcatggtggtgtgtgcctgtaatctcagctactcaggaggctgaggcaggagaatcacttgaaccagggagtcggaggttgcagtgagccgagatcacagcactgcactccagcctggtgacagagcgagactccatcgcaaaaaaaaaaaaaaaggctttaaccagtcataaatgaccagggtaacagaagcaggattggggaaggaagttggggggctggaaggctaggaatggcggtggggtgggtaaccaggtcatccttgggtgcatttttgtactgtttttctgactttgaatgctattttatttctgccttaaagtgaacatggataagaggaggaaacttactgttccctagctagagaagaagaaagaaaacgtggttgtgtgcatgcacagttatagaaggggtatgcaataattcccttgttctgtgaagttctgtggaattctcattaaaaagctagacagagcaatttttaaaataagttgaatttaaaggacccaaactggcttctattgtattatgttttctattgtctttgtgcatttagtctgttgataatttttttctttgattgaacagattgctgagctgagagaaatagaatacattaaaaatttacccatccttcgagttctcaatcttctagaaaatccaattcaggtgagacattatttatatcagggagggagacagagaagaaagtgggatggtggagggaaactatctaggaattcttcaagaagtacttttgataaaagaatatcaggaatgtgaatagagtttgtctatcttccttctttctaaggaagggtttagtagtacctaaagtgacaattttttttttaagacataagatcttctctcatgactaacaagctgtcacatgactgtcagcgaaggaaagcctgaaactgaatatcatttagttgctctgctggtcatttgtgactcatcccctgtggtaaaggttacaggaaggaggtaataagattgcagaacaatgttctctgacattagacaatgcaagacaccagaggtggagacagaatgtggttcctattctataacaggggaaagaaaatctaagattagctacctaatttacctggatatagccatgaaattgatgtatatgtgaaataattatagaacagaataatacatttcccaggagttcttcacacctctgggactgaaggatcagggagtgtttcaagtccttctctttctctccattgacagatgctttctcccggtctcctcccctctctccttgtctgtttgtccttcattccattcttctacctgtatccttcacttagtttccacaggctcttgactttgcatgtagctcttagtaactttctttttgtttgtatcttgatgaacatgtctagataggtgaaaaacagaaaatacaagaaagatttataaattaaaagctgcccttgggacaggaacagtgggaggcaatttaaaagcatttctggaaaagtaagaggcagggcttaaagtggccagcacacctcagtttcaaatccctgaagggtgtttgtgcatatgcatgaataagcatcacaagccgtttgacacattaactgatttatatacaaaacctctccccaacatttacacctaagctttgtacattcacctcatatacggtctcatctattggactggcgcaaaagtaattgtggtttttttcattcttttaatgacaaagaccacaattacttttgcaccaacctaatatataacagatcatccgctaatatctaatgtctttcccctcaaagaggcatggcttcttactacaaaaactctaattataatttccaaaaggcagataatcctgatggtagggagtaataaggagtttgttttataaatgaatatcattttattattacaaacaaattcataataatacaaattaatacgaaatattgcatataaataataacaaaataatataaaatattaaagtttcattatttgcagaattgagacttgttggagttacaagacagggtttgagtcactggccacgggatcttagatgagacgcttcacttttctgaggcttggtagcctttagaaatgaggataatctggaagccattatcctcagcaacctaccacaggaacaggaaaccaaacaccacatgtcctcacttaaaactgggagctgaacaatgagaacacatggacacagggaggagaacaacataccctggggcctgtcaggggcgggaggagggagagtatcaggataaatagctaatgcatgcggggcttaatacctaggtgatgggttgatgggtgcagcaaaccatcgtggcacacccttacctatgtaagaaacctgcacgtcctgcacatgtatcccagaacttaaaattaaattaaatttttttttcgacagagtctccctctgtcaaccaggctggagtgcagtggcgcgatctcggctcactgcaagctccgcctcctgggttcatgccattctgctgcctcagcctcctgagtagctgggactacgggcacctgccaccatgcctggctaatttttttgtatttttagtagagacaaggtttcaccatgttagccaggatgttctcgatctcctgatctcgtgatctgcctgccttggcctcgcaaagtgctgggattacaggtgtgagccactttgcccggccaattaaattaaattttaaaaaaagaaatgaagataatccacctgtcctgttaatctcaaatctcacagggagattaacaagagtgtacacttgaagacctttataagttacaaggcacagtctgcattgagttaatgtaaggggactgggaagcgtgaaatgcatagtcctgtgagggtgtgtgtgggaatgatgaggtagtaggtgaaaggcccaagctcatgaaaacccaatgctggtgcttgttgatttgggaaaaggaaggcaactgaacagtcctcttgatattttaaataggaaaagtctgaatattggttcttcgtaatttttatgcttctgcgattaacagaattagatcagaagaagattaaagtggaagaaaaggtatgtaatcatgtcataacattaccattgtgttattgggttaatatgctcaaaagctcgtgttgcctgctgtggaagcaatataatcaataaataagacacataacaatatgtacattaattcatttagggaatgtttccttgccttaggatctgttcatttaaccctctgcaaaggtgagtatcaacacaaatgcagtgaaaggcctgatgtcttgctgttagtacagtgaagaggttggctgtggggaacagaagcagcactccacttatataggtcgcagctttatggcagactatcaatttgaaaaactttcctgtttggaaggtgtatgattctatctgtgttacctgaaaaattcatttaacaataaaatgcattataatgtcactctaccatataatcaaaaggtactcaaataaatcactactctgatattttaaatccttaattctgctctttaaaaaaatgattcatctagtcacaaaattccagaataaccagaacttgaatgctagcacctgcctccctgcttttcatactcatggtcactgctttgtcttgctttagtagctggtgacagccaaaatctctactaatgagggatttcttacactggatgcaaatttgagacaggaatgaaaacaggtataaatatgtagagaggcacgtattccatctcataaatgcctttctgaaatcttggttaaaagcagttacagatgccagtctgtcattattctcacactcaaaggtacttattagattcctcttttcctttaacattttgcaaaaggaatacaatttaaaaccatgtattaagtaaagatatggcatatgatagatgaggataatgtatttagaagaatgggaaagacaaggggatgaagaactgtacattatgaagaaaaggcccatatccttgaatgaacaaagttatgctaaatgaggaggaagttttggtagaatttgagattgtgggaatcattcttggtgaaatggtatgaggaaaacattccgcatgcatcaaaacctggaatctacagctataagttttattcctttttcacatattaaaagttggaatgtttactatattcaaagtaatcatgggctttagaggggctgtgggtttttgtttggtggtttttttgtgtgtgtttttgttttttgccattttccctcccaaaccaggcagaataaagaagtaggagatcaaaagactccactcaatatttttaaataattatcatttcttaaattttaggaaaattagagtagacatgaagactgaatactaatgttaatgggtgtgtgttaaattattttgtgtacctggctgcacgtgaacaacatttcattaaggaaaaatccaagctttgtcttctttttagaaacaaaactttttttcccttttacatctctaattctggaaaaggtttcagcagtgaataaatatgatcctccccctgaagtggttgcagctcaagaccacctgacccatgttgtcaacagcgtgatgcagccgcagaggatctttgacaggtacttattagaaatccaaaggccggaattcagggtgagcaagcaaaagacagcctcatcacttcccctaacccctattttgtgacccctttatttcctataaaggctgctttttccctttctctgagggaaggggccaagtctttatttgatagacaatattgtctccattatggtatattattaatatcatgtacttgagtgtgttgctttcttgctggtattttcccaagcatggtgatgagttgattcaccttcactagtttttctggccacttgtatggtggccagcgtgtgccacacaacagtgaaatctcaaaaaaaaaaaaaaaaaaaaaaccaggaccaatttttctgccttaggagagaaacacagaccttaaccttaacagaaaattgtggtaatttatatccattgtaaattttccctcagctgtgagtgaaagctaaatacccttgccaaagactgttccatgaattcacattattagggagtcccttagaaggaagcccagctagcctaaggaaaacctgaaacagtctttgcactaagctgcgataaactcagcagggaggagtcgcccagctcggtggaacacatgaacagagtctctcacctctgaattcgaagacagatttaccatgctttcttcatttctttttaaaacaatctgttggagcagatggccatttatgctctaagtataatgcagaaattctatcaatacccaaaggcattttaaaaatacttgtaaaatctcttggatataaatggcttctcttcttcatgtggtatttgctcctgtacttcacatggctggtttcccacagagagcaaaatgttttattttgcaacccaggacatgatttttacatataatttaataatgtagacgttgacagtttcacatgtttatggtggccctctaggtgaaatgaattatcatttattacatacatctggaaaagcacatttgattcaaaagaggggcatttatctcctcattgtatttctattctagtttatggtattgctagttgtttcatgctttagggtacgtttaaataaaaacatatatcaaggaaatttgcagcagtgtttgataaacacatatgtcttgatcatttctggctgtcaggaaaacaagaataaaggccaagtaggcccagatgttccagggtggagtggcattcattgtggaaactcatggacaaaggaccagtagctagtgtgcaggcctgcaatgcccttcctactctgtctaggccagtacacaactctctgtcagcaccagaagtcaggatccaggagaggaaccccaacccttggctttgggacttgtatgctgccattactggggaatcactgtcccctctcctggtataattggggtgaggatacagtattaaaatgacatggccaaaccttgactctggtctggtagtcattgatagcttcttaccttctgatatgacaaagttctccagactcatctggtacatgtcctgtcccaaatctggaatcagccttttctgcaagaagccccagttttagtgaaaaatagtatttcccaattccagtctgggggttaagatactcattgctaccaggttggtcatttatttagaggccttttagtggaaagagctaagaatgtaactcttttcatcaattcctctgtccatccatccatccatccatccatccatccatccatccaatctatttgtacctacctatatctgttctatctatatctatctgtctgtttgggtagacctatctgtgtctatctatagatagatggattaaatacctcctgaattcttgatatttacaattttgattccaaaactacagttaagcttttactcaacctcctcgctattgtatgggtatttccttttttcccacaccaagaaatctggttctaagggacacagaggaagatgaaattaccaaatcccataattactcatttgaaaaaatcctagattgtaccacagtggtattagaataccagtactaatactaccaccaaaatgattcctgaaaacattaaaaatattttttgcctacaatttacccatttcctcccatgttttttattgtggtaaaatatatgtaacaaaatttgccactttaacaattttaaagtggacagttgagtggcatcaagtacattcataatgttatgtaaccatcaccaccatctatttccaaaacattttcattaccccaaacagaaactctgtacccattaagcaataactcctggttcttctctgctcccagcctctggtaagctctaatgtacttttgtctctatgaatttgcctattctatatatttcatataagtgtcaaccaccccttttagaaaatagtgttgtactatatttatattgtcaaaacatacagccatcacataccgtgctttctccttctttgctgttatttagtctcaattctctggctaactacatagttgttgctcactaccagtagttatattgatgtcccttgagtcactttggttgtttgaagcttgttttctagtattttccttaggaagggatatggcatcagtatcctctgaattcttgcatgttataacaatgtatgccctttatacttgaaagtcatttttgctaaatataaaattcatgatccacacctttttccttgaatatattaaaaatgttactccattgtcttttggcataaaacaaaatctgatgataatttaattttctttcccttatatgtaatgtgctttttttttttctaattggaagtttttttctttttctttaaagccaagtaattttactagactatgtcctggtttagttctgagctgatatttcaggtataatgtgtgccctttcaatgcgtagtgttttttgtttgtttgtttgttttaatttcagggaaggtttttttgaagtatagcctctgttttctgttcctttggttttcatcttcaggaagaagctctcttttgcttattttcaatatttgtcactttctttttcttagttatttttttgaaaaaatatattttgaggtaattgtagattcacatgaagttgtaagaaataatacagagaaattccatataccagtcatccagttttcctcaatgttgatatcttgcatagctatagcagaacattaaaacaaggaaattgaccaggaaatccaccaaccttatcggatttcaccagttttgcatgtgctcttttgtctttagttctatttacctctgtgcaattttatcacatgtagattcatcttagcaccactacagtcaagatatagagcaattttatcacaaggatcccttgtaatactctataatagccatagcacctccctccctctcatcttccctaacccctggaaaccactaatctgtccctgtctctatctataatgctgttatttcaaacatgtaatataaatagaatcatacagtatatagcctcttgggattggctttttttcactcagactaattccctggaaatgcattcgagttgttgcatgaatcagtagttcattctttcttattgccatgtagcattccatggcgtgaaagtatcacagttacttgaactgcttacctgttgaaagacatctggactgattccagttttgggtgattgcaaatagagctgtcatgaacattcatgtccaggcttttgcacatgtacagcttcaggctgcctgctcttggcaggtacccagtggctgttttggggttcacttgctctcagatctgtcagatgctgcccattgcttccctcttcttcctcctgcattgactgtagtaccacacaggttttgtgggtccatggctcttggcgatactgtttcatgtacttatatgtgtttcccataggcttttgctctcaagtttttctgtgggaattcggagagattgaaaaactatgctgtttcattgtttccacagactcttctcagaatctacaccttcatcttcatagaatccacacctcagccatgtggttttttaaaattttatattttattctagattgctacaatttgtgtcatgagtagagtttaaacacattgttcagtgtgttgcaggagattttattatgatgatgatgatgatgatgatttttttgagacagtttcactcttgttgcccagactggagtacaatggcgccatctcggctcactgtaacctccatctcctgggttcaagagattctcctgcctctgcctcccgagtaactgggattacgggtgtgcaccaccatgcccgctaattctgtattttcagtagagacagagtttcttcatgttgttcaggctggtttcgaactcctcacctcaggtgatctgcctcagcctcccaaagtgctgggattacaggcttgagccatcgcgcccggctgcgggagattttattaatcaattcattctttagtccagtcttcaggcttggcagccaaacctacatttgtatatcagctctcccttattaactatcactttgagcaagttaattaacctcattgtacttcagtttcttcatacgttaaaaggggataatgacagaaacatcttcattagcttcttgtgataattaaatgaggtaatggatgtatgactcttagaatgcttcctggcacatagtaattgctcaggtaaattttagctattactgttaagttggctttgcatacctgcattctaattcagtagttataaatatttatcttaactttacagtcttatttaactttaacagtcttatttctttcattgatcagttttggggaggaatatttcactctagccatcaagaaccaataaatgttatatttttcctttaaaagtcatgttaaagtaaatttacgtaagttcatattttaccttatttgttatctatgctttgaatattatttttgacatataatcaatctgtttctggaaaggacaactattcttctatgcagggtcttatatagcaagtgctcatttagccaggttaatggtggcctaatggatgtagttaatgtgctgtctccctgactgcaataggagaactgactctggtcctgtgttgtagcactcttcccagcctggatgctccttatcccatgctgatactagctggtcctgaagcttgtgggaaacgagagcttgcccatcgcctctgcagacagtttagcacttacttcagatatgggtaagtttgtttattggcttgttaagacttggaaattcatccgaattattggaggtatcaatagttgtagtaaaatctccgatattgctaatgttggctattaattttaagcaatttcagaaatgtacaaaacaacttaatatttaagttacactttatagcaaagccaaaagtggtaagtaaattgaatgttcaatagatattaactcttggtaaggacagagcaccatgtgagtgttaatccttgatggtaaattattgataaaattggatcaatgtgattacctggttctggaacgatagaatcttgattcttgtgccattctaatcgatatggtaaagatgattgctaaagtgtactcctggcaatagaagaacttgccatatagcaggaagaaacaaaataatttttcttttttttcttttttttttttgatacggaatctggctctgtcacccagactggagtgcagtggtgcgatctcggctcactgcaagctccacctctcgggttcataccattctcctgcctcagcctcccaagtagctgggactacaggcggctgccaccatgcctggctaattttttgtattactagtagagaaggggtttcaccatgttagtcaggatagtctcgatctcctgacctcatgatcctcccaccttggcctcccaaagtgctgggattacaggtgtgagccaccgcgcctgaccgaaacaaaataatttttcttttgtcaagcagacagtaaacatacagcaatgactcccctgctccctgcttcccccacccaccacaaaataagcaagcaaaccagcatggctcattcatgctgttccccaccttttccataaaaggcttattggcttctttgccacttattatactgtgatatacactgtattttttttaactttaattttccaaatgcttaacttaattcagtctcagcccaaatcaccctccagggtttgaaaatcaacatctttttcattaagcataaatggcatgtgaaggcaggcttctcctgttgccttgcagtatgatagcatgaatcaccgtgttgtgatgtgtggtgggcatatctgtgctcagggacagcctctcctgtctgagcctggaacatgtgccaacggcactggagcgtctttgtctctgacaggtcttcctcttttggtatttcaggaggaaggaaggagaaggggcagcaagtttttctttttctttccttcaggttagcattcaatacacttcaagttttctggagcaaatattttgcttagtgatgtcttaatgacccagttaaaatagaggaacatatccgaaaaactagaaccatccaaaaaaacaaaaaaccaaaaacaaacaaacaaaaaaaccacacacacacaaaactccaactgagtttaaagagttttttagaggctgagactagtggctcacgcttctaatcccagcactttgggaggctgaggtgggcggatcacttgaagccaggagttcgagaccagcccagtcaacatggcaaaatctcttctctactaaaagtataaaaattagctgggtgtgttggcgcacacctgtaatcccagctgctcgggaggctgagacatgagaatccaagattgtgccattgcattccagcctgggcaacagagcgagactctgtctcaaaaaaaaaaaaaagatttttttttagaggttttggtgaatcaaatttagaattgtctgtcatctcttaaactggtttcctcttgtactttttgtgtatggcaaagaaattacttttagattagtggtgcctgtcagtgagctgaggatgtggctacaaagatatataggacagccagaaaaataagtgcaaattatttcctaatgctattacaaaaaaacttccttccctgaagctacacatgttcaaacaatgtaaacactatttcaaacaggtccatttatttagatatttaaaattacatcctttatttgaacaactctaggccacaaacactatggaaaaatttattaatacattttagacacccgaagtaacaaaaataaattaaaagttaatgttagaataaaaatatagagtacattatgtttctgtggatgtactgaacctgttttaaaagataagctgaacgcaatgaatggaaggacaaactagggcaaaagggtatatgctgttttgctaatgcataaatttggaactttttagcaaaccaaagtgacctatgaggaaccaagtttctccagttcctttcacatctctgataccagttatgttgcaaatggttggtagcccagtcctgtttatttctctgtgatatgctactgctaagacatactttgttggatatgtttttagagatgtttattgactcatcgtcaagatttggagccaatctgcccttacattcttatctggtgaggcctcccagttactcattttcattgaatcttttatttccctaattagaatgcttatccatcatgcttgtgattagttgatttaatgtctgctttccctgcttgtctgtagcccattgagggcagggcgcatgtcagccttgttcaccattgagttctcaatatccagtatatgtccagacacttaatatgtgtgtgataaatatttgttaaataactgactgactgattgagtgaatggttggctgaattaatggcatggtgtgcaacagatcatataaatgactgtaataagaagcatgggtgatcttccccaacctccactgatggagctatgcagagatgaatggattcatccacttgttcattctttcaatacatatttattgaattcctctcttgtgctagtccctgagggtagagcaggaacaagactggtgaggtccttgccttaatgaaatttgtaatctaatgggagactcagaccttagataatcagtgctatgtgaaatttaggtggaggcacaagatggcaaaacagaatcctaaaattagcttcatgctcctgtactgttacctctgccactgctatttttctcttctggctggaattagtggtgagtagaaagacactcctaactgcccccctcccaactacaaactcattcatccacctccctcagagtttcagaagcaccatccaactgttcactgtcattctcatgaaggcagaggtcaaggtttgttcagtggcaaattattctaagaatttcatcaaggcacggataaaagactatgcatcggatggaaaaggatattagatagctagttactttatccattgagaaagtaagctactgctaccattatatgcagcaactttctagttaaaattaaaaaaaaaaaccaaagcacattcgcacattctcaaggacaagtcattgctcttgtttagattttcttttctattattctttatccaacataagttttattgatttttaattatgtgaaaagaaaaaaggcgtgcatagagagtctcatggtgaaacataaaagcatttacaaaggcacttgctccaccatttgcttgaatcatttctttccttccttctcatttaattttttcctggcattttacttcctttctaaattgcattgacccaagatcaagacattcaatgaaattttcacatgctaagttgcatatccagatatataaatattgaaaacataactcagtcacataacaaatattggtgcggctgagagattttgctgtagttaggttttgattttactatttgttcttggttttagaaatatgttgaatgttctttctttaccagtattagttatgggtgacctggagatatacatttactttcttcaaagtctctctattgatttccagctgagcaccccacaaatcagtgacttcctggaaaagtgccagataatgagggcaacccaaaacaatatcagcatgcctgtttatcttctagatttaaggccatgaaagtgatctgaatggccctgaaagaaaaactttattctttcttagatctctattttatagccatctctattttcataagcttctcatgatgttgactactaaacatatttcatttttagcattataatagagtaaaataaaagaccacagctatttagttacatgagatgatatgagctgtagcaacctaaatgcagtctcagctaaggtgtctgtttatacacatgtgacaaatttgtagaatggttcatttattcattcaatatttatcgagcactgtgcaaatgctatatgctggtgatgaaactgtgaaatgaacaggcatggttcttctcctcctggcagcttacaaagtagtatgagatttaaacaggtaaatactaacaagatagtttgatgggtgctatgatgagggaggtaaagagcctctgagatagaaataaaagagaagtaggaagtggggcttgagttgagggtgtattctaggcagagaggacagcatatggctcagcttgaactatcaagggagatggcagaagataagactggaaggacagacaggggtccggtcataaaggatttctaaacagggaggggaatggcgtgatcacatttgcattttagaaagcgtatcctgttggcaatttgggaaagggcttagggaaggaagtctggagacaagcagaccaggtagaatgtagtgacgggtgatgatagcatgagtcagaaaatggtgtgtagttactgaaaagtgggcagagtagtggcttcatggagtttgatacttagatacagtatgtgctggaatcttttgtgtggaggatcacttaaattgtgtccagcaagctattgacatatatttgcattgggtattcagaccaatttcatttacctcccagattcctctaggaatacctgggcttttgtggctacccattgatagagctcacttactaacaatgtgatgtgctgtaatgtgcttgaattcagatgtgctcagagccaagcctctgcctaaatatttgcaataacaagttcattatttcctgaggcaatctggttcagaattaagcttctaaatctgcatgcgtctgaatgacacagaaaaaaaaatactacttcctcatccacctgctagctcttcttagatatcttttcttcctgttacatttccctggatattttgggattccattatttagcctggctttccaattccttttcctcttgatcatctcctttctgtgaacttggtttggtagtagcttcagtgacacctggccatgaattggcacccttagacttttaggaccagagttggagtctggggttcatctctaacttagtccttttctgtgttaagtgaaatcacagggattgtggttcccattacaaaccataatttaactagcaaattaattagtaaataatgaatatgtggaaagatttagacaagggaaaagaagaattttgaaagtcctggctcgagcaaatttctttgtctagaatttggtatcatttttcttatgtaagtttagtgaaatgttgccttcactatgaagcattttctttttgagatgttcatatttgggcagcatataacacggtgaacatttctatatgtgaaaattggatgatgaattaaaaaaacacagatcatcttaggttcttcttaataggaagtctgcagtggctgcaggttctgtcatcagcattctgcacatcagtggagccatgtctttatttacctgcctagaagcttcaaattgctcctttgttttgtctttctttgaggtattcagaagaaattcttgccactcaattcctttgttgagaaatgtaagttcagcataatgtgtaaaggctatgctaagggtttgctgcaagggtgccaagctattgatttatcttccctgactgtcaaggacaccaatagacagagggtgtcaggtctctgctaaggcatgtgaagaaatgccaatgtattcaaacaacaaaacaaatgccacagtgttttgacagccttctcttagaatgtactctctttcctgagtatataatttaaatatgatgttaagaccttaaaatgtattagtacagttaattcttaagtataatggaaagggagcagtggtatgaattataaacatttatttgtctttgactttgcaacgaagagcctttcgaggttggaactttactctctgaattagtatgatattaacaagaattgacttttgagtcatcctggcgttgctacttagtaacattacttaatcgctgtgcctccagtttcattatttgtaaaataaaaataagaaataatacctagcttatggtttttgtaagaaataaatgaaataacatgtcaagtgtctagctagtctcatctcttattttattttattatttatttattgaaacagggtgttgctctgttgcctcggctggaatgcaatggggcaattatggcttgctgcagcctcaaactcctgggctcaagtgagcctcacacctcaacctcctgagcagctgagaccacaggcacatgccaccacacctggctaatttttaaatttttttgtagagacagaatctcactatgttgcccaggctggtcctgaactcctgggctcaagcaatcctcctgccttggcctcccaaagtacagggattgcaggaataagctactgtgcctggctctcatctcctattttaaaactacagtaaaatctaaaaatcagtttgcatttctgcacttaacagtggaaggcagaattatatgaactcaagagtcctggtggttgggaccaccatattcttgtaggaccaacactggcctgctgtgtgaccttagaggagttatttttgtagtcatctataaaatggagttcttagcagctgttatccacttctcctgtttcatttttcattcattttacaaaaatttatcaaatgcctactatgtgccaagcattgggaatgcagtggcgaataagacatggtcctcccctttaggattcatatgttctgctgggaaagataggaaaaaaacagataaatatataaaagaaagcagttctggggatagacagtagttgagcggtaagcagttctggggatagacagtagttgagcggtgtggtgggatggggaggctatttcagacagtggagagaaaaggcctctttggctgagctgagacttccattcagcattggcaccatggattgccacaggaggtttatacacagtgttgatatggaccaagcacagggcacatgagatagatttgccctcaggtggtggaggggatgggccctgaacatacaattggaatgcaattggcaaagacactaaggctgtggaaatataaagagatgaataatccagccatagaggtcagggaaggatttttggaggggtgacatttaaactgagttctgagaaacaagtaggccagccaggtggaaggagagaaggacagcctgtggaaaaggctcatagattaaacacgaaagcaggtgggtggaaaatagttgagtgataagtattgatttacttcttaaagtattattacatgatggcagaggaagtggttcagaaggtgataagtaataatgagtaaaaatttggtatggataatccaaattttgtataatctttatagatgatagcaactgaatataatttagcacttcgaaaccaacatattcttacaactgtattactttatgatttatgatttgtggattaacttcattttttaaaacataatttatattgaaaccttttccattttgaatttcaagttagaaatggactaggtgatctgttttatgatttcagggcctgtcataccacaagaccaccttactttggagaaggggatcgagttgattatcattttatctctcaagacgtttttgatgaaatggtgaacatggtaagaatgtttgcctttgtttttattgcacaagaaatacacgttctctggcaaaaatgttaggaaatagttataaataaaaaaaggaagaattaaattttgtgcttgttatgagaggtgagtttttatggggttttttttttttcttaaagtgcttaatacgtcattcttcacatgcttttttattttatggtcttggagaaaatattgtaaatttccaataaaaatgaatgagtaggcattttaaggaaatagaactaaagcagtatgaaaaattcttgtgatctgtgcttatcagttgctgctactgttattagtcagatttactcaagaaaaacagttcttacataaccgatggcacagaaatcttgtaaattaagtatgtctggggatttgggtattctgtccagaaagtagtctttctgtgtattatctgtggtgctttctaattgttacaaccctaagcaccatttcagtatggcgtgtcccatttagttggcttgttctggacatgttaccatggtcatgttcctgtttgagaagttctcagtcctggaggccaagcagttcactaatgcagatggcagcccttgctagaagatgggagatgatccctaacttctttgaggactatgtttttacaaggtcaaggtaattaccatgcattagtctatttcacaggcactcagaacaatcttgtttaagttttgggtttttgcatttgtttgttttttactgaaaccctgacaatctggttattgatagtaactcaaaacactcttgtctttgaattcattttcttcaaaacaacttatatgttccttcttggccttcacatacaaagggaaccctcataatcctcgcatgttttatctgttgaaagtgtatgctaatgtaaatatgtatctgcccatgacttcagttaaactgaaggagtagctcatattttcatcacgaccaatgaatctgtaaaccttttgtttttacttctccatggcccttatttttgtttatatcttcattgtttctatcaccaagtaaatcctacaccactttcttttcttttctgaagtccactgaactatcagatgagggactcatctgtgtttctgcttttgaaagattaccatccaactggtgattcccttatagctacatatcctctttcctctttccccttctttttccttcttccttcctctgttcccaccccccaaataatggacctggcttattcttcattgtacaaaatcatggaacatttcagcataggctttgcagtttctatgagtttaattttgaatggccaactctatacatggtgcctgttttctggacttctcttgtgtttgtggagatatacaagtgagaaaatcctatgatccctaggcaatttttcctctaactttgtcaaaagaacatcttggaaattctttataattttctctcctagggctatattttggcagttcagtttaattgattaagagtactctgggactttatgtttctaaaagcctcaatagagatttgagaagttatcttgatattagtaagaagcattctcttaggactttttaagttgaaagacaactaattcccaaaattaatgttaatttatcttgttagagtatgaggcaatttttttctcacgtcagttcatctgttctcagtaccccatctgctctctggtgtttcataccttatcagatctgtaatctagtctggttcaattcctagtctaaaaagtcactacacttctatactatatttagtcttagaattttactacctctacagaaatcctcctgtgtttgagaagtacttatttttactgcttctgataacatatatatacatttcaggataatgtaattttcttgaacttgaattgtgcctctgatctcttttcctttaatgtaagcttgagactgtttgatgaagagagacaaacttagagatgacaaacttatgacacattgtcagctttgccaatcacccacagacactcagccttctgttcacagaacccccctctacacagcagccacccagacagcctgcccgccatcctccattacagcaggcccactgacggacagccttggcacacccttactgtggacagtcacacctttctgctctgacacgtacaacacatagacctgtacaccttcccccacacaggggcctcctctatcccatcagacacttcccccacaacacacaatcatccccctaacatgcccacagatatgagaacccttttaatggacacatacacagtccccacagaaactctccctctcctgtagaaataaaaccacagaccctgaggtttctggagtatgactattgctatttattaggaaatccatatgcagcaagaaaccaaagtagcatcaccagccagaatggggtggagggaaaccacttaatcccaattcttaacaaacttgtaatggggtctcttttatacctatgtactatgcaagattcctcccaactctacatctctacatctttctagaaaatgttttttttaattatccacagtagaaggtccttgtacataaacaataaaaaaaacttacagtatatatctgaaaaggaattcaagtatacattttgaaaacagcgagtcacagagtgttagtcagggttctccagagaaacagaatcaataggatgtgtatatgtatagcaagagatttagggttgggctcacacctgtaatcccagcactttgggaggctgaggtgggaggattgcttgaacctaggagtttgagaccagcctgggcaacaaaatgagaccctatctcttcaaaaaataaagaattagcctggtgtaggggttcatgcctgtagtcccagcaactcaggaggctgaggcagaaggattgcttgagcccaggaggtcaaggctgcagtgagttatgattgccccactgcactccagcctgtgtaacatagcaagactccatctcttaaaagaaagagatttagtgtaagaaattggcacacatgggttatagggactggcaaatccaaatctgcagtgtgagccgggcagccaggaaatcctaatgggttcaccttgcccgctgcctagacagagccgatttttcaagatgagaattgcaatagagaaagaataattcacacagggccagctgtgcaggagaccacattttatcattactcaaatcaatcaccctgagcatttggggatcacagtttttaaggacaacttagtgggtggggggaagccagtgagccgggagtgctgattggtcagagatgaaatcacagagagtcaagctgtcttcctgtactgaatcagttcctgggtaggggccacaagatcagatgagccagtttatcgatctgggtggtgccagctgatccatcaagtgcagggtctacaaaatatctcaagcactgatcttaggagcagtttagggagggtcagaatcttgtagcctccagctgcatgactcctaaaccataatttctaatcttgtggctaattttttagtcctacaaaggcagtctagtccccatgcaagaagggagtttgttttgggaaagggctgttatcatctttgttttaaagtgtaaactaagttcctcccaaagttagttcagcctgtgcccaagaatgaacaagaacagtttggaggttagaagcaagatggagtcagttaggttagatctctttcattgtctcagtcataattttgcaatggaggtttcagtggtgcagatgaaatccaaaggctgatctttttgttctattgaggccttcaactgattggataaagtccacctatattatgggtggcagtctgcttccttgaagttcaccagtttaaatgttcatctcaccccaaacatcttccaagttgacacataatactaaccagcagatgcaataaacaagataaagtgtctatctgaaaggagagccagacatatatatatatatagaaaaggagtcacagtatttgttccaaataacaaagaaagtatgacattgaaggagtaaaatagtaaggatatttattgttgagtttttaacttttggaatatataacataaacttcttttgattatgggggatgtggatcttcctcatcacctgcagcagacacattgcccagagacccatcccccaacctcaaaagacaccctacgccttctggtctctgacctgtcttccctgacagacagcccatccccgtaccctcacatctccagaacatctggggccaagacacagggtagcaatagacccaactgctgctgttcttaatgctgccaccgccatttgatgggattcaatgcagccctggaagttttcacttcattgtttatttcaaaatcacatatatgagaagtcactcttgccaagatcatccacgtttttattccttctgttgtcatcagttacccagtttagatttgacctagtggtttaatgaatatagtattgccaaagaaaaaatcacagacaattttaagagacatctttttacttgccccacccctccttttttttttcccaagggaataccgtttttggaagaactgagcttccagaatacagacagaggcatcatttatagttcaaatggctatagggcagacaccaattctgttggatgacatttggggcagtttcagtagaaagctatctttatgaggaaaaacaggatgggtctgctttttcaaagcttttaggatgtccctgtaattcatggcctcccagaattatctgtaattcatggcttatcttggtaatgcaaggcttttggaaatggaaggcttttctgggttgcctggtgtgctggcacagctgaaatggcggcagtaaagggcaggccattagttttgttctctcagtaatgaaggttttggtgcgggtttggcaggaagtgggtaagtaaacaaaatagtctattttaccatatgctgcagtgccttaacactcctcaacattttgtcagcaaattatttctaaaaacctattttttttttgtcagctgagaattctgaataaatttctctgtcacagtttgaaattaagtttcatttaccccattgtcatccttatatagttgctaaaatttgtaaggtttttgaaattatttagaataagacatcaaatgatttgagttatgtaaattccatgatggctgctgttatatgaaaatctttgttcttctcgaattccaggggaaattcattctaacatttagttatggtaatcacaagtatggattaaatagggacaccgtagaaggtatcgcaagagatggtttggcaagctgtattcatatggaaatagaagtaagtgttttcattcaaccaattaatgtgtgtgtagtttgtgtgagtgtggtgtgtgtgtatgtgtgtgtgtgtgtatatatgtataaactttttactgatacataattgaggtacatatatggggtacatgcgttaatgtatatacatatttgaggttggggaggggtatacaatgcacaggcaacacattgccaggcacaagataagatattccgtttataattactatggggggcaagacacatgaaacattaagtgacaggagttcggttacaatacaagaaattgcacagatattgtgagtgaaactgccactcgagctttattttctgttatttcctcactaaatgctcctttttctttttagagcatggcctctgtttacataaaaggttgtagataaagcctgattcttagagtgtggaactggttccccatcccctcaggacaatggcagccccatgtggtcaactttgttccttccttctgcatgagatgtgtgggctgtgctgccatttaactgcagttgctcactgggtgtaatattttcatacttctggcaatttagacctgtagatgtcaggagatttttctctctaccctgataccctgtcttcccccaacaatgatctataattagagtatatagaagcttctccaaaattaagatccagagtaaaactatgaatttcccactcatttattttttaaaaatatagctttattacatacttggaaccttcaaaaatagttgattgttttttcaagatcctttaactgagcagtatgacacttttggaattaaaaaaaaagcaattataaaactaattcaattagatcaaatatacagaaaacaaaacctaggcaaatcaggtacataatccttcgatgtcaactctgaatctttcttttttcctttgtgacttcacacagtaggagactgcaattcccttttggctctttgtgttggtataagtgttcctagcttacacatttcttccagctctttaactttcctgacgtagaatatttccaatcttacttctcagtgattaattggttttgtatctttaaggaatgttttctttgtttctataataactagcaaaaataaaaggtcttttctaaaaaatttcttcatttgacaaggcagaaacaaaaattaatgcatttttgagtccagaaactctccatcttttgtgtctatctttcactgtttttctccctgggagttcactcttcctcatttccaggaggttgagtctataatccatgcttgattcccctgattctccccagctgaagtatttttccagactgccctggtcattgactgtttcagaaattgttttggaaatagcctgtatttcttccaactgaatttttaaaacaaagactttgaacattgagtgaaactgattgagatggacgggactttagagtccatttggaatggctctttcatttcacccgtgaggaaactgatagccagagaacttgaaggatttgtgcggcgtctacaggagccagagagctgcagttgtgaccaagccctccagactcacagaccagtcagttccttacacagttccatgctgtgatctcctggtctgcaggtgacgaggagcttggccttcccaaccagggtgctgatttaggtgcagaaagggtcccaagatgatgacaaaggggtcacagaagagccttttctccctggtaagatctctatctcctggtgctccacagaacccttttgaaatatagaattgaaattacctttctgtaataaagttgcaatattgctatgaatgtacctattttatatccagcaattttctaacagtcatattcattagaatgattaattaaaggaaagccaggtggagtgaattgtaatatttccaatgacaatttaaaacttgatgaagagagaaatgtaatccaatcttgagatatttatagaaaaatagtagctaactatacagatgaaataaattcttcaatatattaataatactacttcttatacccatgttgtcagatggctccaaaatgatttctaaatcatgtatctgtttccaatttattatcttccttttaatgcacagggtgtaagaagtttgaaatattcctattttgagcctcgttatatcctggtggtgcccatgaacaaggaaaaatatgagggatatttgcggagaaaaggattattcagtcgtgcagaaattgaatttgctgtctccagagtggacctttatattaaaattaatcagaattttccgggatattttgatgaggtaatcaatgcaggttggtaattttcagcaaagttttgtttttgaaatgtaagattactgaattaaaagtttgtttcatggggataaaattcttgggtaaaagctatttttcttgtaacggtgaatcacaaagagctgcgaaaaggggtaagaatccaagaggtctaatcttccactgttttaatgagagcattgtctcaattatttcttaagattgtagctaataagatttggtgtaaaatgagcctgaactaagttcattttttaggggacattgtgagaacaaagttaaattatatataatttgaaatacacatttaaatttctagaaaggcatatgaaactcaggtaatttgattataatctacacgtaggttaaaaacccaactactcaaaatattataacttaaaaatgtatgtgtaaaataaacattttcagaaactagcttagaaatgaccatttaatttaaagcaatagttcatgggagaatttatcaaaatatgaaaatttctatatatatatgtacatatttttacacatataaaatttctatagatatattctagaaacttttatatatatatatatatatatatatatatatatatatatatatatatgtataatttttttttttgagatagagagtctcgctctgtcacccaggctggagtgcagtggcgtgatcttggttcactacaacctcttcctccgcctcccaggttcaagcaatagatctgcctcaacttcctgtatagctgggattacaggtgcacgccaccacgcccagctaatttttgcatttttagtagagacagggttttaccatgttgtccaggctggtctcaaactcttgacctcaagcaatccaccctcctcagcctcccaaagtgctgggattacaggcgtgagccaccgcacctggcaaatttctatatatttttaaagtgcactatgttacacagtcataaaaaggaatgagaaaattctctgtgtctagatagggaaatatcttcaagacatacagttactgaaaaagacaggtttacaatatagtatgccataatttatgtaaaaaaattgtgcaattgtattttcttgtgctacataaaaaagttctctggcagaatcctcaaaaaaactaataacactgattacctcttagggggaagggaaactagatgaactagatggacaggggacattagttgaaccatatgaaattgttgatattcaactattttgacctatgaaaacagcaatgtcatatggttcaaattattaataatagtttttggtctctgaaacatgttaaagtattacacagttgaatttgttttctattcctgcatagaaattatcacacttagtgtcttaaagcaacacccatttattaattcacagtttcgtagattagaagtctggtacagcataggtggattttctgctcagggtatcaggaagctgagggctcatctgaaggctctggggataagtccccaaagctcattcttgttggcaggatggagtttcttttggttgtagaactgaggtcccagtttccctgtgggctgtctgccaagaattatcctcagtttctggaggttgctctcaggtctcatccacgtggccccaccatcttcaagccagcaccagcacatcgaatcctccttgtgatctgagtctctgacttctttttctgccaacagctggagaaaactctccttttatgtggctcatgtgattagggtgggcctgcctggataatctcccttttgattaacccaaagtcaacccgttaataaccttaaccacatccgcaaaaatcccttttgctgaatgtcacacaatcgtggaggtggtatctcattgccttcacaggttctgcccacacttaaggggaggagattgattatacaaaggtgatgtgtccttagggtcatcttagaattctgcctaccataatatatataaaattaaatgcagtaaacaaatcattaccaccgatagttgaacatcaactgtattggatgtgatcctgttgctttaaaatgtactctctttgctgcagatgatctggatgttgcctaccaaaaactgagtcagctcattagagaataccttggattgactgaggaacctgccaagagtttggctacaactgcaggtactattctatcatttttgtgccaggatttttttttttttcatggaaaggaaaacaaatctgagttgctatttgggtactcatcacttgggctaaagctggttctcttttattcctgtacttcttctggggcaattgtccccaaaacaagcagcatgagtcagctttctggacctgtaactctgcttatctccatggtcatgatggacctccaggtactgcccttcaggaacaggctaggcagtgccttggcggaggtaatagataagggttaacctcatggttcagaactcagccttccagaggtttcattccttagagagctgagatgttgttctacttgtcgagtttgtatttagtctgagagttttctttccccttttctttgcgttaccccagtcctcaaaatactgtgctgcggaatacagtggcaagagccctagtcataggatcaatgttcctgatcctagccctgtgctctcttgggtgagctccttcgctgttcggagcttcagtttactgttctgctacatggacctaatgctccttatctaatgctcctcatcaccacatggatggtgagcagcacatgatgtagtatatgtaagagtgcattcccttggaatccaggaactctaaagccctaagttagaattttggtacatgaattttgagatgtatttaaaagtctccctttaatccacctcacaactattaggatggctactataaaaacaaaattaaaaaaaaaaacagaaattaacaggtgttggcaaggatgtggagaaattggaacccttgtgtgctattggcaggagtgtaaaatggtattgctcctgtgggaaacagtatggagcttcctcaaaaaattagcaatagaactgtcctatcatccagcaatcccacttctgatctacctccaaaagaattgaaggcaggatctcaaaaagagagctgcacacccatgtttttagcagcactattcacaatagccaaaaggtggaaggaacccataaaatagaattttatttgaccttaaaaaaggaaggaaattctggcacatgctacacatagatgaaccttgaagacattgtgccaaatgaaatgagccagtcacaaaaggacagctattgtatgattccactacatgaggtatctagagtagtcaattcatagagccagaaagtagaacggtagttgccagaggctagggaatgggagtggtttaatgggtacagtgtcagtttgagaagatgaaaagagttctgaggatagatgatagtgacggtggcacagtgtgaatatacttcatgccactgaactgtgtacttaaaaatggttaagatggccgggcgtggtggctcatgcctctaatcccagcactttgggaggccgaggtgggcagatcacgaggtcaggagatagagatcatcctggccaacatggtgaaaccctgtctctactaaaaatacaaaaattagccaggcgtggtggcatgtgcctgtaatcccaactactcaggaggctgaggcaggagaattgcttgaatcagagagtaggaggttgcagcaagccaagattgcaccactgcactctagcctagtgtcagagcaaaactccatctcaaaaaaaaaaatggttaagatagtcaatgttgtgttatgtgtattttgccaccatagtaagttttaaaactttcccttgatggactgaaccccattcacacactgcatattgtgaaatgttaacctgagaccctggctgctttgcaagtatgttcagctttgtgttttagcggttgtgactttttgcccaaataggattttgtttaccaggttgcatcctggcagactgaggcagggcaggtcatgattttgccagacttcaaaccaatgctgttttgtaattttgcacacttttcccaggttgagggcccctggtattttggaatgaggtcaacgtgaaactggtaaaaatcaacagataatggctgagaatttccttctccatatgtcttataggagatgaagtgaccagggtatgacctgctgactggaatgttcctggagaaagtttgacctgtcttaaaataggaatggaggactggaggactgtgctcagtctacaaagtggggattggggaacattagattgggagcatgtcagtgtatgtatccagccctgctcagaatctctgcactgggcgtcggttctttagaaagccatctctatggagaagggctgtgagtgtatctaatgaggcttctgtagctcagtagaagtttctcttgagaaaatctggctccccttgccttaattctttgctacccaagcaaccttctgatctttaatttggtcccatcgggtggacctgctcctgtcggggctgtaccctacgttacccaccctgccctgatccctgagccaggcttgtctccattgtaaattaattaattggtgtactggcttttaaatcagcctcttgtgggtttggataaacatgaatcagtcccctgagcctgaccagctctgagtaactgagaacagtgtgtttctcaatctgaggttgccactgactgggggggcttgaacaagactttgcctcaacagccagtgagagtccgtctctgtatcttttcttattctacaactatcaagaacactggctattgggtgcagttgccatttggtaaattaatagaccagataatgtgtgcatagaaaaatagactttgattctaacgggtataataaaattttatttatttggactaatgaggttaggcttggctgatttaatgaaaagcatgaattactgaatttgtaaaaatgttttagctttcagttacattttataactgaaactgagccatctagttactgactaatagaattccaactgtaaaaggtaggtaggcagatttgtaattaatggatcaaatcactagcctcaaggcccctttgtttttttggcatgtttagtattttgaaaaacaatgtgttttctgaagccaaccactttatcttatctagacaattaatttgctgaggaagttactttttctacttgtgggtttaagaataaacttgcacattgtagaggccagacattattcaagtgagtatctaaaaagttctaaggaacatggtccttattaacacacatttaatggtgtctctagtgggacaagaagtagagccagtgttcttcctgagtctcagggctgtgaagaaggtgccaaggaatggggaccagatgtttacaggttcagtgcacaagagtggagccaaccatagttaccttaaaacaagtgtcagtgtgtccagagttggttcctgccagtgggttcgtggtcttgctgacttcaagaatggagccgtggaccttcgtggtgagtgttacagcccttaaagatggcaaggacccaaagagtaagtggtagcaaggtttagtgttaacagcgaaaggacaaagtgtccacagcatggaaggggacctgagtgggttgccgctgctggcgggggtggccagcgtttattcccttatttgtccagggaatggacatgttccatttgtgtcctatcagagtgcccttttttcaatcctccctgagattggctacttttagaatcctgctgattggtgcgttttacagagcgctgattggtgcattttacaaacctcttgtaagacaggaaagttcctgattggtgcgttttacaatcctcttgtaagacaggaaagttccccaagtccccactcgacccaggaagtccagctggcctcacctctcatcagcactccccaggaagggacccagagtcccagcagagtcaccatcatgtgcccagctggtgcttcacctcattgctcctgctctgagctgggtcactctgattttaagttctataatttagatatatgtgtataaacacattactcacataaatgggacctctagaaataaaaaacaatagttttagtataatgaattttttaaaaaataattgagctgtcaaaaggaagaaattgaaataaaaaatatttatgattctgtgaaagacagctttgtctgcgcaattaggaaactggactggaaatatgaagccttggttttctattctaaatctaaccaataaccattaacttgattcgagaagtaattttgagctcccatttcttaaaataaaaacctatacataatgtcatggtgcactattagaatccggctgtctagagctgaggtttttcccaattggattaggcatcagtacaaacagaaatcttatgaccaacagcattgtttttcttaaagtggtaatcctgtatcaatgcaaacagaaaagtattcccagatatctgaagtagtaatacataacttgatcttttgtaattttatgttgctaatttataactaagaatacaagctgaatttctactcttaacaatgagagtggaacagagtgataaaaggaagcgcaaggtttatcagttctgagtacagcatctttcagcctggacccagaaatataaactttcactaatgggtggattaattgaattttcacttaatgcatgtataaaatactaactttaggtacacagtgattataaaccctgaaatcttcagatatccccttaatttaaaatacatatcagcctggtgcggtggcttacgcctgtaatcccagcactttggaagcccgaggagggcagatcacgaggtcaggaggtcgagaccatcctggccaacatggagaaatcccgtctctactaaaaatacaaaaattagctgggcgtggtggtgcgtgcctgtaatcccggctactcgggaggctgaggcaggagaatcgcttgaaccagggagtcagaagttgcaatgagctaatattgtagcactgcactccagcctggtgacagagtgagactccatctcaaaataaataaataaatacatatatatatataatatatgtatgtgtatatatatatgtgtgtatgtgtgtgtgtgtatatatatatagaattgtcttattttccctattgtaatgtggataacatttatttctaatacccaaaggcttaaaaagcacaagtaaacaaaatagtttctacaaaataaggtaaaaactatattcacaactcagtattaagggatgtctttccttccatttgtctctaaacaacctacttctgggatagtcaatgcttccagcaaagcttttagaaagctgtaccaactatcaccctgagttcttgctatatagatcataaaataaaattgtatttgcaaatcattaatctgactaatggtagaaagaaatgatgatggttatgataagtcagacagaggagaactgagcagttgactagtccgtaaagttttcctttatctttaataaaaggcctggtatgatttgccaagttatgtcaattgttaaattgtaaaagtggggaacacatccttatatatctgattacagaaaaccaagagagattaaggagcaaaagaagctttagcacaggatttcattgttcttatatttttccatcttttaaaattaattttatattttggttaaaaagcataccttaacataaaatttgccgttttaaccattgtaagtatacaattcaatggtactaattacatttacaatgttgtataaccatcatcactacctatttccaaaatttgtcattaccccaaacagaaactctatacccattaatctattactcccctcaactcctggtaacctcgaatctactttcttttctctatgagtttgcctactctcgatattttcacagttttatttttcaatttaaccttgtttcttgtctaagctagtatttcagtttataacagttataaactagggagttccaaatgatgaacaggacaccccctcagaaactgcaccaagagggaagcctttctttgttcccacctgtcccgccctctccctagagaacaccggtttgatgggatgcaaagggtgcgtgtccagaccaggggctcagtgagaacccagcagtgcaagctcatcctgcgtcagtggaggggatcgggggctgggagcctggtttgcctctggggaatggatcactccaaggtcacctcagaggtctgatttgggttggagtctctgagtatcagatctcccccaaagtgagctgagactagcttcttcaaggctgttccagtctggtgtgccacctctgactgctccacatttcagagctatgcccttaggactggggtaagatggtatttgggcccccagaatccgtctagtgaacaagcgctcactgaacaagtgcctgctggatgatggcgtctgtgagactgtcccagagatcagtcactctgagaacttgccatcaacaccaagttgacacctctgtgtaacaccagcattgctagtggcctctgagagccatttttgaaggcaaggtagatgtggaagcccaagaggaggcctggggatgtgagtgcgggaatagcagcctggatgggggtcctcaggagcagctgttctgagccatggtgccttgtgattctgtccggccgattctttccttccttcttacattcatcacccatttcctcagttcctgcccctttgccaggtattggtgaacagacataactcttcacagagctcacggcttatataagagggctgccgttaaataaggaaacaaacaaatgggatttcatctggcttggatgtccatcctctagtttctaccatcaaaaacagcattgatctctaagttggtaaaaatttaaagtctcattcacttggaaaatgtctcaccacccacaaatctggatgtaaattttggttctatgaataagaaccagacataaacctcttatgtttattcattgaagtttatgttttcagttgactaaaattgttctaagttccactaaatgagagaattatagacacttagtatctccaaggagaagggaaggttaagttctcctatatgtgtaattttattcctttcaagggcctatgtgcatctaacaggggaaagatgtttttcttattaatttctaagcagttagttaacttctgtttatagttaatttctttttatattaaagcaggagctcccgctagcaagaagactgtctctggggtgccagcacacctggttccatctcccaggtgcttggcgaaactgcaagcagatggccagatgacagagcatctctctggaatgcaaattcatgccaagcacctagaaaatcagagcgtaactcctgcccagaaccaagagctggctcaggatggagaaacccatcaaaaagagctttctcctgacagccatctcaatcctgagctccctcaacacctcagttcatcagcactgggtcttcctcagcaggcccaggacctatccctaaacccaacggaagaggatgtccaacaatcagatcttcccctaaaacaaatagccactgagacagatgtccctgagatggaagccagtgaggttgggcagtctcccatcaccccgaccctggtgcctcctgtgcacccttcccctccctcgtcccgcagccctcagccaggccaggacaaggagtcaggggaggcccaggtaacccctactggccctcctctgtctgaacctctacagggacctggccccactcccctcagccctcagagaattcaggatgaggaaattgagtcagacaaacttccacccagcagttcccaccatgatcctccaaaagattcttcccacactgacttggtgcagaaacttgctggcgattctcagcaagctctgaaggaggaaacctccaaaccggaagccatccgagtcagtatccctcacccagaactgccacatccccaagacttagcaacagataccaagcagccccaggccaggggagccccggggaccttgcttcctagaagccggctggctcccactcggctgccccagcctcaggtgctggctcccctccagagcaggaggcccacacccaaactcctatcgcccagcagggaagaggctttaggaacaacctcccatcaaaccatgacggtctctcccaggcttccaccaacccgggaagcagacaccagtaaacttcctcccatcagccctccgcactcaaaaccaccaccaaatctgagcccccaggcagcccacagtcttcagcaagtccaggaagagaaggtcagtgaggtgaaactccctcttatcagtccccccagccaggagcaagcagaacctcgcatcctcagtcccgcccaggaggaggcggctcagaaagtgaggctccctcgcattcctgctcctcttccggagccagggctgccccagaactcggggactcagcctgatccaaggcctgcaaaggaaaggaaagctccccaagcaggcagctcctccaggaggaagattccagacatgcgggcctcaccccacaaccaggggccacttcagcagacaggggctagggaaaaaaagctccccaaccagaaagggacggctagaggactggcacctctggaagaggcaccacctgggaaccaccagccagccttgcagctagaaccccacgatcagccagctcccaccatggtgcccgacgatcccaaccccagccctcctcttgtttcttgtctaagctagtatttcagtgtgtaactgttacaaattaggccatctgagcaaccagagaagcaaagtccatacaccagaaattcctgagccgccccacgccgagccatcacctaagacccccaattacaagaagattaaaaaaaacataattccaggaaaaggacccataccaacctccccacaaatgacctggcttggaatgtagatgtgtccaaacaagggccatcttgtaagagagagatttttggagggttatctcaagaaaataaaactcccgtcaatggtgatcagccagctcaggagggccagccctcacccgggagacctctccagagggaaaaggcccctgcggagtcgctacaggatagctcggctcctgtggagcatccagggagaaagggacaggttcatcgaaagggcaggtctcagaggagagagattgcttcgcaatccccagagcaggacagtgagcccccaacccagcagcctgtcaaagacacaccagcccatcaggggagaggtcaggccagagagagctctgtccaaaggcacaatgcacttgcttccaagcagcaaaccaaagagaagcgaacctgaaaacatggggcagtgccacaggacaaaagccccgccactccccagaaccaggtgtctactgtggagcagggcagctggaagggaagactgcgccccaggagcagtcagagcaccaaggtttaagccatccctggagccaccagctcattaaggtctgggaaccccgaggcagcactgtcacagaacgaccagctatggctgggtcctgtgagtctccacactggcttcctcctgaacccatggtcagcgtaggtggaggggctgttcagcactgtccaaaccttggattcctagaaggcagccaatctgcactcctgtgcctcttctgctgttgccgtcacagcctggaagagcagttgttgcagagggatgcagctctatcagctgctgccaccaaattgagccattctggaaggctggtgtcagcaagtagcctttgtgtccagacacgaatccaacctgagttccaactctggctgaagcagggccatattgccattaagttttcttctcttcataaggaaaattcgcttctagacttctagaaaattctctcacccctcttgcattatcgaggagttccaaagcaaaaagaacttttgagacaggaagactttgctgttcctggaggttccaaacctacagttaacttgtgggaatcttctgtagggaagaagacatattttgcatgcatgactctgtgatcaaatgcttcagatttgtcttggcaatatgttgcctgaaacttacttttgcttgaaatgtatttcaaaatgaataccttccttctttctctgaatagaaatctcatgtaaattagctcatgcctttattatgccaaaccatctggttgaatcaattaaaagaattaatggggagaacatttaagtgaatcagttgttcgtttatctattcataccatcaggattctttcgctggcaaatgataggagtccactctaagccagcttctgtgactctattagaagggagtagaagatttcatatgaacaaactatgggaagggcagggctacagcaagtctcagagagactgggggccagttgtggaacataaccaggactctagtcatctcctggactctggtctaggactctcaccacttctcttctctgtttctttctccatgttggcttcattctttggactacagatgactctatcagtttctgcacatggtgggaaacatggttaccagcagctctcaagcccatatctgattttacctctggaagctcccactactgtaaagggattaatttgaatgaatgttcattaatcctaatccaaagaaagtcttgttggcctagcttggtttaggcacttgttcttaaaccaatctactctggcaaggaccagggttaccttcagacatacctattgaacctactcctatgtatggacactatactccacccaaaaagaggataattgtgactgaaacggacaactcaagatgtgactcttaaaaagctgcaagatatctattgagcacttactgtgtacacagcagcatgctaaactgtatttggtatctcatatttaaaaatgtaactgatgactaaatgcctatgtaaatgtctcttacacaaaagagaggtgtctatgaaactatgaatttcaaatgttatttcaagggcagtagaggaaactgatattttagaaatccaggatatagaaatcctcttgcaaaatgaagagcttatataatgccagtaattgccctctgatttatctgatttgtccatgatgaaaataatacagtaattgtagaaaatatatcatttgtttatttttactaaaagtgtatttatttttactaaaagttcattcatccaacaagcatttattgagcacacgctatgtgccagacagtgatggttgctagataaggggaagtgatgaggatacttcaagaagctttgtcttttatcaaggaagacagagagttcattatattaataacaccatgtgattagggcagctgaaggccccacagcgtgttaggctacattttacatcctacagacaggaaaatccatttgttaacttttccagatgtcataagaataccaaggaaggacactgaattcggcctgggatacaaacattggatcaggaaacactcctaagagaaggtcagccttcagcttagtcatcgcggttgcagaatagtcagcagactgatggagaggggaagttttcttagaagaaggaaccacgtacgcctaagcagaggcacgcgcaggcatagcatcttctaaggacccgaatgccaggagagatgcaggtctatatagatccaaagtgctttttgtgctacaccgaagagcttggaaacttgatctttaacaatggggagctgctgaatttgtatctaagaggcatctgtctggaggggatatagaggatgaatttgaggagagcaatacaggaagcaggaggagtggcagggaagttattgctgtagtccaggaaagaaggttaggcctgaaataaggctgtgggggcaggaattgtcaaattaggtaaatatttagattgcatgtgggagagggtagattgtgcaagacaggaagaaaattaagatcattacccattttctgtgaggtgggtgtggggcactttagagttgtccgtgtctcatttaggtgaagaattttcgaaatttaaaattgcttttagaaatgtataattttcctcttcgggcgcctgtttctgaggctcctgaaggcatttggggttgcatttccattagggtacaaaagggaagcgataagccaaattttttttatcacttgtttgtgtttctgttattgctttggtagtatatgttcctaatgtctcagattcagtggaactggacaatattttgtttgtggtcagaggaaaggagtggaaaagagtatcaacaggagatttttagtgctattattgattctcttggtataagggaaacctctgatttttacacatagaataacaatgtttaaaaattgccattttccatctatatttacaaggttcctatcattcccatttgatatgttgctcagcaaggtgatctttataggaacaaaaaaacattgtggcttatagtgactacattagtaataccatctttagctcctttaaagaaaagtggcacctaatattcaaatcaatggagataatattgccacttggcatgaaagccttcctcaaatatttaaagagctaaatcagttatttccaaaacttcaaaagataattgaacaaagggcatgattgggaaattcacagaagaggaaataaaaatggccaatagatatgtcaaaaagtatttaacctcattataagttgaaacaggatagactttttttttttgtactgaattggcagatgaaaaacaacttaatgcctattgttggcgaggctgtgggtaaatgcactttctatgtctcaggagagaaagtaaatcggcacaatttttctggggcacagttttacaattttctgtcaaagccttaacattttgtatatcttcagtctagtaattcgaatctgaggattatcataaggaactcacttatgggcaaggatgttcatatcagtgttttttatgataaaatctagaaataatctagctatctaatgggattttagaaataagttatggtatagctatatgctggaatattatgttgtcattataatcatgtcatagaagaatatttaattagaggaaactatttattgcgtagtaagtagaaagcaggttaaggaggtagagccagtatggctctagttattagctctggattatggattatgcataatttttattttcccatctatgctttttagtattttttaaattttctacaatgacctatgtttattcagaaaaagttatatagaattaaatttaaacacacacacacacacacacacacacacacacacacactttgaagagctgtcatgagaaagcaacagccttacattctattttgatttgacatcatgaactttctaagagttagaggtgatttgcagaggaacagactggcttgctccagaagttagatgctgtgttatgggaatcttatagaaggtcttcatatgttgggtgatttagttggactggctaaaatgtaaggttcattttatgatctaagatccacttactgcagctgactccatttgcttgttatgaggaatcctgttttattaaatgtagtgcttagaaaattatatgtacttagtactccttagatatgtggctttcaaagttttattgaccaagatccataattagaagtatacatgttacaatatcatgacccagtaaacacataaaacacctggcaaaaaaaaaaaagtgtcataaaacacctttactatggtgatagacaactctgatattttctatggcgctgaatttcaatttttaaaattctggttgtggcctcctaaattgatttcacaattttgtttgcaacctgcagtttggaaaaccctgcactgagtgccctagaggtttgctttgatgctgtccttacttggaggcctgttaccagacttccccccagctctggttgccttcaagtgaggttggatgggttgacatcatttatgctgaattcttctctgggacaaggatctggtgtattggcagttatgttctttgtcaatgtgggggctcaggataagatacatccaaaatctatatgtatacgttttatataaagcttttaaaaaaaaaaggcacttgagaacaatcttgatcagcttacttccttgccttttgctccatgacaagcccgaaaatcatcttattaccataaaaagatccaccaagttccacttcagataattgcactatttatatactatgtagcacagtacgtctgtaaatgaatttaattgcgtagtccaatttgaaagacataattctagaaatcacttttctgtattgaccaggcattcagagaagaggataagaagggcctaaccatttctttgtgttgatgacagataaatggtgttagaagatcaaacctctaatcttaaaactgattatgagagtgcagtcatgatttgcaaaagctgaagactttttattacagattgtaaccttagaaattcattattgcaaacaacactaaaattcaaaataattcttgaaaattccatttgcattacaatctagccatgtgaccttgggcaagttacagagttctaatgtataaaatggaggtaataatagtacctacctcagtatttttatggggattaaatgagttaatatactgaaaaccacccagaacaatatctagcacacagtaaatgcttctatgagtagtgtttgttcgtattaacatgaaagcagcaaaaaaatgtttgcattttcctgttcattgaaagaggatgatactgttcaaactgggtggaaatatttggtaaatgagatggtctttgtgaaaatccttttttaaaaatttgataaccttgatttaattaagtaacttaaaattagaataatattggaaagaaattgcagttgagcaaaatattacaaaaatcaagaggttcttctatgggcattcataggaggcattgcagtttggagaagtgagtagggaaacatcaattctgagattattatgaatttccatgtgatacacacataaaagacctgtagtaacatctggcacatagtacatgctcaataaatgctatctgttatttttactatgatttcattattgataaaatcaagatcatttatattctgggtttcagattggttagataggaaatgctgtcaagtcacttgtccagatagtagatattttcttttctttttgtggctcaattgagacaaagaccagcttctacaattaccagatctatataccctcagtgtcctaggataaaaatagaaaagcaaagtgaagaaagacagagaatgtttttgctggagaaagtgaccaatgaagtaacatctttgaaaaggttattcttgaaggataagcccttagcaagcaaagatcatgcttagggtgtgggattgggtggcaatcccatcagaaatacagttatttgaacatgttagttgaaggaaaggaaatctttagcgtatattgaagcttcctgccaatcattgctacctcttttctttcccaaaatctgctatattaatacagatcatatatagcaagtttccactcttgaaatttacctgttctatgtgttttatcttctttaaagtgtcaagtaactacttcattaaatactcatccttttttttttttttttcggaattctgggccttattgctctatgttttaattggaacattcttgatgcaaggcccaaatattgacccattagttcacctccactgaagacattacaatgtatgaagtttactggaaaagaacgtttttgtactttatttgctcttatgaatgtaaatgtgtatgttttcctttttcttgatatagaaattgtttttgtttaaataactaattattcctttgattagacactcaagaatatagcacttcactgttagtatagtttaataaatgtattcactttcccatatataacatgactatttacaacattattactgtatttccttggacttatgtgataactttctactctaaaagtttattttgctatggaaattatcatggatactatgcaaaattattatttttctagttgatattattcttttcttagaagcacagatagacaagacttttaagatgtaattctgtcctagaaaaatagcttattttgccacctttagttttgagatagcacttcttaatgaactaaacttttgtcttaattttccactacaaattatctatcatattaaaagtatttaaaattcaatagcagattattctgttttcttttaagctcttttttatgactacatatttcagtatcaagacttacagagattttaattttacaggtatttacatcatatgtatatatgcatttaatcattgtaggtatgaattattcttgttattttttcctttgtttaaaaaaaaaccctcactatatggttttgttgttgctgttgttgtttttagatggagtcttactctgtctcccaggctggaatctagagtgcggtggcacaatctcagctcactgcagcctccgcctcccaggttcaagtgattctcctgcctcagcctcccgagtagctgggattacaggtgcatgctaccatgctcagctaatttttatatttttagtagagatggggttttgccaatgttggccaggctggtctcgaactcctgacctcaagtgaacgcctgcctcggcctcccaaagtgctgggattacaaagccccatttgagtggggaaaaaataagtgattctgaagttgtctgtgcatctcaggacttttatttaaaaattaaagtctgtttctaagtcatccatttctaagtgctttcaaagagagatcaactctagtgttgatacattttttttgcaaggttttatttaaatgtcaaaagctcattttgaaaagtaatcagtcatatttttggacaggagaatgactaaattgccttgctgtataagaaatcttattaatgtagaaacacttgtcattaaaatagagatttttgtttttcaaaatatttataacttgacccccaaatggtaagttcatcactaattattgacctggctacatgcctgtgataccagatcatcaacatcttctatttttaactttcctttttgcagtaaatggccctatttagtctgtttgatgatacaatgtgaaatatacatacaaatcttttattcttaggtacatggcctctactgcttttgttgtttaggttggattttatgcttattgttttaaaatgttttatacaaatattgttttaatttgtttgatttcaaatgagtatgtctaacataaaagatctaagccatttagaagtaatttgaaacatggttccagttgttccagatacttcatttatattttcctgcatttgtaatgatactaatccataaaataactttaaaaatctgcctgggatcattaaattcatttatgcttcattgcaggtatttaaataaatttaactagcctatatactgaagaacttggttctttttgtggactgtaaagtagtttatacatattaaaatgttgcctcaaggttgactttaatttagatagcttgaataaaatcacattaagaaaatttgtcacatggtattataacattggtaattatggttttttccttaaattgggaagtaagctgttttgtccattgatgtactaagacattagacaatatattaagaactctatgaaagtctttattgtaggagttcaagtcgttaaagcggcagtattacaatgtagtttaatagtaatctaaacacattatcttcacccaaaacgttttgttcccaagaaatcattaagacactattttggaattacagctgcattgtgtcatcagatggaacttgacttatttacaccacagtacaggcaacttatgtcttagaaaactggaaaaaggaacccggacacaaaaactatattttgaataaagttttatgtattatgtaggatctattctatggaaattatttcagtgaatatagcttttgtttctttaaattttatcttatttatatggttccagttcatctagtctttttcctaatgcgctgtacttagagtgacatcaacaggacaagggatttttccaaaagataaattagcacaggatgcacctcctttgtctctctctctctgtctctctctctctctgtctctctctctctgtttctgcctcagccacactgaattctttactgtgatgaagttatattaaggatacatctatgttcttataccagccacttttcctgtctgatctagtttcccccagatgcttgaatgctgttcttctttatgccttttaatatttgttcaagatgtcaccaccttaggtggacttcctctgaccaccatgccatctctcatgctgtcccctcatccagcttcctgtttcttcatcacacttgtcgttacttgatattatttaacgtgttatttgtccgactccaatattagaatgtaatccccacaggtcaagaactttttatttactgctgtatccccagcatctagagcaccagtcggcacgtagcaggtgctcaataaatatgggtcaagtggcttttatcacagagattcaacagagaatgtttctgcatacagttgtctcattttgtcactttgtgattaaacacagtttctttaatattcctttctatattgttctattacctgaaattcttttgatatagtcctcgcccatttgttgcatctgttcaagctccctttctcaagacaggggctaggtggaactttagacttccttaccatgattaaatagttttacttgtctgcaacaacttttaccttgtgttattggtttgggattgccacacagtttgggaggagttcaagttcagattccaaaccaaagtagagtctgatttcctacaggtgtttctatcgtctggttaggtaagaatctgtccccaggcaaagtccctacatctgtggactgacatttccagataccccttttccaacttgtcaacttatcaaacagtccaggtcttcttcttctttttttttttttcttttgtcgttgttgttttgaggcaggtctcactctgtcacccaggctggagtgcagcctctacctcctgatctcaagtgatcctcccaccttagcctgccaattagttaggattacaggcacacaccaccacatcaggctaatttttgtatttttttgtagagatgaggtttcaccatgttggccaggctggtctcaaactcctgggctcaagtgttctgccaacctcagcctcccaaagtgctgagattacagatgtgagccattgcacctggccaagtcgggtcttgtgtgccaagcatgcaggggctgtggcttccccctctcataccatgtattcaaacctcagcccctgatgccctgtgacctcttagcatcaattcccactcctctgacttcgagtcttcactacacttgtagtgcctagaaaattttctttcttagtttccgccttactatctattaaaaacaaaacaaatttatgttatatattagtatttttttcatctttgggtgggggtagctttccacttctgctcagtccatcatattgactgaaggtacatgtggatatcatttattttagcattttaaaagcaatactcctgaaattgttgatgctcccatatagccaaagctatttactcctagccctctgtgaatgagcagtaataaaaatttatacagtattcttatattctaggtctctgaacattctaacatcttaaaggaaatattagatattatttatgaataaattctgtgaaacagtgggctcatcattccattctatttcaaagcctcttagcattgcatagtttattttccttttagccttttggactttcatcaaatgaaaagtcattataagggtaatttttcaattaaatatctagaagccactgtttttgacatgtcttacttcttttgattttatttataagcctgaattgattaagtattgggtatattcggaggatatatctattaggtattataggctgattttattattatgagttattttattctaagatatatttttattttattttaaagttgaaatgcgcacattttaagtatccagcttgttatgtttgggcaaataaaaatataaaacatttctatcacttcagaaatttcctttatgacttttattttaaactttatttttttttcctaccagatgttaagacatcccacctgaaacctgaagcgcatcctacaaagtatatttcttcgaatatgggtgatttcctgcattctacagacagaaactacctcattaaattttgggccaaactttcagccaaaaaaacaccagcggtaagagaggaatagaaggggtgaagccacaactgagctctatacaatgtcagacaaagaggggatttaatattttgagactaataagtttccccaaaattattctctcactagtgtcagctgaagacaggattttgactctttgtacatccctgagaatagacactggttctaaaagtagaatattcaatatcagattctgtgagtacctttctcctgggctcccagtgaaaattctgacattcaaatcttctattttgtaagaacagaaaagcactacaagaaaattaatgcagtgaaagatgtatttcaagggaaaacttgctttgttgctagggtataaatttgagtattcttgggctgagcctgaaaagtgagtccactcaaagagtccgtgttttataacttagcacttcttaaaccagtcgcatcacttagtcccaacttatttctctgaaagttttgagaaagcagcatgcacaggagtgtggaatgcaaaattggcactgcattcagattaggttgtacttgttttccatctgtaatcatttttatgtgatgatctgggaatacaaagagacttaattgcaattgcaatttgctgcagaagcaacagaactttttgttttggttgtcaattccttgtgattccttaaggctagcctgtttttgtttgttttgttttgtttttgttttgtttttttttttgagacggagttttgctcttgttgccaggctggagtgcaatggtgtgatatccgctcatcgcaacctccgcctcccaggttcaagcgattctcctgcctcagcctcccgagtagctgggattacaggcatgcgccaccatgcctagctaattttgtattttcagtagagatggggtttttcttgttggtgaggctctcccaacctcaggtgatctgcttgcctcggcctcccaaagtgctgggattacaggtgtgagccaccatgccccgccaaggatagcctgttctaaacaaataggtgcatcaagtcagaaccattggcagtgttcagtggtcaaaagaatcagactgattactgattacttcaggcaaaaagtcttaggctggggcatatacagatatagtatgctatatacattttactcttactgagtcacaatagttgttgggtgttctaggtgcaagaaacagtatctccctgcttctatttcctgcatgtggtagccctccctctcctggctggcctcttccattcacccacaggctttgctcccactagcttgagcactactctcatgcgccatccagccctgactgtcctaggcctcttggctctgtgctcattcttcccggcaacttccttccatctctttaattcaagtcgctgaaggcaggagaatctacccagcccagcttgacttttcaagccatgctgtggtggtcatattagcctgcctgtgtggtcacctgtggcagggcagaaggcacgacctgtggctcaggctgcggcttctcagaggcagcagggggtaggtgggtgcccactaaacatctataaataagatgaatttgttccatgatactgagtgtaggaaagtcatatttatccaaaatcaatgaaatctggaattgttcccatctcaccaggatttctgggaaatcaaatgtcgttagaaatggggatcacttcccatatttggattaagttcaagaatcccgagagttacacaatcctgggaaattgcagaagggcctctagcctcataaccaccatggttgacatggagatgcttttcatctaaggcactgaatcccattctgagccagtggccctggtattctccatatcctactttttcctactattagtagcttttttcttttacttttttcttttgtagagacagggtcttgacatgttgcataggctggccttgaacgcctggccccaagtgatcctctcacctcagcctcccaaagtgctggaattacaggcatgagtcaatgagcccagctaactagtaggtttttttcttatacctacccctgagatcttgctatacctggggtaatgggtagaagtcaacaggtaaggctccctctgcatgaggaacctatcactctttgtccttccagtcctgggaaatccagctctttccagatcagcccacagctttctctcctgcccttggtattccagccttcttggatggtgtggcttgatgcttcttggactttcaaatacagcatcagttctttaatgtccccttgggacatggaaatccagagtgcaaaccttcagaccactaaatcctgtccatctttaatccttggtgataagactgcaccctgacaatcagaggcagcccatttcccaggtgggctgtcctgatgcacagctggattcacactgataggcagaagcacatgccattgacttgcacccctcttccacttaatgggtattcatggtttatttaaacgtgtttagggatcatgtcctttgcaggaacgtggaggccattatccttagtaaaccgatgcaggatcagaaaaccaagtaccacatgttcttacttataaatgatgaggacacatggacacatagaagggaacaacacacactggggtctatcagagggtgaagggtgggaggagggagaggatcaggaaaaataactaatgggtactaggcttaataactggatgatgaaatagtctgtacaacaaacccccatgacacaagttcacctaacaaacctgcacatatacccctgaacttaaaataaaagctaaaaaaaaaatgtccaatctaaatatcacctgttagaaaatgttggggcctaattaaagagagtgctggttggctgggcgtggtggctcatgcctgtaatcccagcactttgggaggctgaggtgggcagatcttgaggtcaagagattgagaccatcctggccaacatggtgaaaccccgtctctactgaaaatacaaaacattagtcgggtgtagtggctcgcgcttgtggtcccagctactcaggaagctgaagcaggagaatcgcttgaaccagggaggcagaggttgcagtgagcggagatctcgccactgcactccagccaaggcaacaagagtgaaactccatctcaaaaagaaaaaaaaaaaagtgttggtcaagggcaataaggtactaagggctggggacaggggaacagaactggaaaaaaaaaaaaaaaaaaaaaaaacccactctgtgctcctaactgtgattcagccgtaacattttaatataaaatgaagacagtatggggaaactggagagaggagaggataaaaaggcagtgtgagagtggaaggggccaccctggtgatgattggtgggggaaaggacccaatatcccaggccacctgttactggaaacagtttcatgaacttttacaccagattgctccttgcctgcagtgcccctccctgagaaactgagcagcccccataatccacagcatctagaacccagtgtggagcatgtgttgtgtccagtgtcagcactgtggcatttactgatccctgatggtagtaatttgcagagccctgaggttctggtgcctttgcctctcagtgctagtagtttaggtggaaatacaaatgtaacaaggtagtttcatagaaaagcaaatcaaactccctcagaactaacagattcactcttaagaaattagggcaaatataatactgaattgctcttgtcatatatgtgggtgaattcacctaagattatgtttggtgcctcatttttcttttaaagattatgaattcagtgctcttggaatttgcaagtatttatcacattttaggagatctcataggttgttaaccttttgcacagctggtataatgctgcaaaacaagcaacatacctttctgagaccatcacaacagaagattccgtgagacattatgatgtgtgttagagaacacacactgcctttatgcagcatttataatttagaaagagcttttgtgtaggttatttcacatacccctcactgcaaccctaagaagaagttgttgttttttctcatcttaccttcccaaggtaaatttccatgtctttttggaactttttagtggatggaagaaagtaattgcagctgtctctgtcaaaaacatttatcttaaattatccaaaagaaaaaaggcatttttgtgctttttggtgtcttaagtgtacattgaatgtgtttatattttcttttgcaaactattatgagggctttgacagtgatggacaaggtagaaattcccatctccaatgtgtgttgtgtgtgtgtgtgtgtgtgtgtgtgtgtgtgtgtgtgtgtgtttctggttctgtttctgtttctctgaagcaccattcccacttatgttaaagattgcattctttctctcccgctcaaatccacctcaaaactcactgtgtacatgaggccttctctataccgcctctgtaatctaatattctcttcccttggccatcgcatgcaatgacatgtgtgtaagttgtgattacaaaataacgaggctggttttgtgtgtgtcttaaggaaaccagtcttatttcttggtagtcacatatggcacatgtcataactagctgggtaagtacatgtttatgtgtgtatttcatctatgttcatttctatttccatttaactattggcttcttgacccaagagaaaaatgcgctaacttttgaataatgtgacagccttgccatctactgggtaaccttacaaaagccacttacctgctatgagatgccatttcctcttctgtaaagtacatacagagaaataataatacctatcttacaatgtcattgtgtcagatgcacatgaaacttctttgtaaatgattgactacagaacaaatgttgtcgctatgtcagtgatggtaggcagggagtgaggaaggactcaggccctcagctgtacttctttatattcaagaacagcagctctcctttgggcgatcatcagcatccctgtatcaccaagaaccttcagatacctgaaaagtggttaattggacttctgcttccactaaaggcagacctggtaattcagagtaaccttcctgctgagaacaactagaaaatctggattaaaaaaatatctacttgaagggatcagagaataaacagaagagtgaaagtttatctggccaggcattaggggaggatgatcctgagaggtgaacctggtaccagaggccacttattcctatggacttttgctaattgaggtagacatggttgagggctgaattgacactttgagagtcttgtggaactaggacaataacatcgaagtatgaggtccatcagggaagtaaacttagcgaacgatgctttctttaggttggtaactgaaagcctgcaaccttggagtaaaggtgaacaaaaagaagtcaggacttcataggagccacagttaaagtactcttatttctgaaattatattcaaaagatcccagatgtccctaggtccatggcagaaaaaatatatataaataatgttgtaaatacactgtctaatgcataatgaaaaataaccaggcacataaggacatgggaaaacatgaactaaaaataacagaatccccagatgataggaaacaggcctacaagagccttcagattttggcagcattaaatacatattttgaagcctccaagcattgatgttatcaaagcaagactttaatgtgactgcatttataatggccaagatataagacaaaaatgtaaatttcagcaaaagtggagacaataaaaaataactaaattgaaattataaaacctggggggaaacagtaactgaaattgatacccaattagacacagctaaagagagaattaatagactgaaaagttgataagaaaaataaatcttagaaacataacaagatgggaaatatagtggaagagtgaataagagacataaagcaaacatgagaagttctaacatatgttattgaatcctaaaaggagagaagaagtggaagagaaacaagatttgaagaaataatggttgaaactttatggtcctgataaaagtcatcaagccatagattaaataaatcttgaaaacccaacttagacacatatttgttttgaaatcatattgtactaaaattaaaaacaaaggaaaatacctaaagagcagtcataggggataaaattactttcaaaaaaagtaataacaattaggttgacagcgactttccaaaagaactcatgaaagccagaagacaaagaatatctttaaggtgataacttattgccaacctagaattttggacccagtgaagatatcatccaaaaatgaaggtgaattaaaggtatttctagacaaagaaacagaatttgtcacaggaagcctacatgaaagggaacagtagagaattttcttttggcagaatgaaaatgatttcagatagagagtgtcatagatagagaaaaaaatgaagaacaagacaaagggtaatacatgagtaaatctgaatacatgagtaaatctaaagagttgctgactatataaaacagcaatggctttaacaatacatggaattaaaatgtataaaattaaaatatggggaatgaagggaaaaaatataaatgtatttaacaccattaactgtacatctataaatggtaaagatggtaaattatatgtgtatattttacctcaataaaaaatgtttaattaaaatatagaaattaaaaatgaaactaaatttatgacaacaattataataagtcaagaagggtataaatggagatgaaatgttctagaatccttgcatttgaagtctaggaagagggtaaatgtaataatatcagattatcaaattttgatgagtcaagaaaacatattttaatctctaggatgatactaaaagaagattaggaaatgtattacttttaatctaattgggggaaggagtagaataataaataagtaattcaacatggtgtcagaggtcatagccagtgcaataaagcataaacaagaaataaatagtgtaaagcttgaaaatagttaataaatgcatttgacaagattattagaaacataaaacatataaaaataaatttctatgtaatagcaacaattttaaatatatttagttttttaaaaatatattttcaggccaagtgtggtggcctacatctgtaatcccagtactttgggaggctgagatgagaggatcacttgatgtcaggagtttgaaaccagcctggctaacatatctactaaaaatacaaaaattagccaggcatagtggcacacgtctgcagtcccagctacatgggaggctgaggcatgagaatcgcttgaacctgggagactggagttgcagtgagctgagatcgcgccactgcgctccagcctgggtgacagagggagactccatctcaaaaaaaaaaaaaatctatctatctatctatctatctatctatctatctatctatgttcagtaacatccaaagtgtcaaatatttaaaaacaaattaataaaaggtgtataatgcctctattcagaaaaatgtaaaacatattttctagaaaaattaaagacctaaaaagtggagagatagaccatgtttatggattgatggctccatattccatattatacaaatgtctgttttcttcaaataggtctatacgctcaaagcaatccagtcaaaaacattctcacatttttgtggaaattaataatctgattttaatatgtatctgaaaatgctggtatcaccactaaaatagacaagtaaaataaataacagcccagaaatagatccatgcacacatggaaagttgatttatgaaaaaagtgacactgctgagcagcaggaaagtgatgccttttgtatagcattaattagatataaataggaacaaaattagatttaaccctgatctcacaccatatataaaaattaaggtagattatctataaaatgtgaaaagcaaaataataatagttcaaaaaataatgtaagataatatttttatgatcatggggtcaagatttcttaaatgtaacacaaaaagcattcattatgaaggaaaaatctggaatattacagtacattaaaactaagatctcctgttaactgaaaacacagcatgaggaaaaaaaagacagactacagagagtggggagatatttgccgtaactataaccaacaaagtgtatccgaaatatataaagaactcctacaaattattaagaaaaaaataggtaacccataggaaaatcccttcacaaaataatatccagatagcccatattcttatgaagagatacccagccttattattaatcagggaaatgcaaaatataatcgcaatgagatactactatgcataaactaaaagtactaaaattataaagactatcaatatgtggggcaatggaaactcttataagagaactgatgggaaatgaaattggtataccttggaaaatagttgagcattatttactaaagttgaacatgcagataccctacacctcaaccgtggtattcttgtgtatatacccaatagaaatgactggttatgtgtaccaaaagatatgtgcaaaaatgtttatagtagcattgttcataatagtcctaaactagaaattcacatgtccatcagcagtagaacagctatgtaaatttttgaatagtcatataataaaatacgtacagtaatgtaaaccaacaaacttaacttcttggttgtatttcacaaacatacagttgaactaaagaattctaactaaaaagaatacgcgctatacatgcaatctgattccattaatatacaatttaaaacaggcaatattaaaccacagtatttagggaagcacatttaggtgataaaactataaagaagaagtggttactgtaaaagtcaggagagtgcttatctccagagggggaaaatggtggtaatagttgaaaagggtcttgagggacctggagatgctggcaattgtttgtgaggtttacgaggccacctggtgaactggaatgctatttgttctgttcattagctggacaagctgcagtgagttagcaaaacccactctgggattgggtaggattttctgagggctgtagtttgaaaaattaagagcaatctgtaaggtgaggatccaagggtgatgctgaagcccaaatcacccagagtccaacttgatgatccatctgaaggatttgaagagagtgaggatcatggcagtagcccacattagggggagacccagcttactaccccactgaacataaatctgagaaaagtgaaataatgagtcaaaggaggtgtggccatgtaagaaagtagtgtctgtggtctgtgatagtttattggcagatgagttccttctgtcattgctattgatcaagcttagaaagagcctttgctctcatagccatcatctccattcccatattcaaaaggaccttcctttttttcctttctcccttcctttcttccttccttctttgtttcctccctccattccttccttccttcgttccttccttcctcccttccttccttcctcccttcctccctccgtccctcccttcctcccttccttcctcccgttctccctcccttcctcccttccttcctcccgttctccctctcttcctcccttccttcctcccttctccctctcttcctccctccgttctttacttcctatcttccttttccctgcctccctctcttcctccctcctccctctcttcctcccttccttcctcccgttctccctctcttcctcccttccttcctcccgttcgtccctctccttcctcccttctttacttcttatcttccttttccctgccttctttactttctctctcccttccttcctttctttcatttttctcttccttccttcctctcttcctccctgcttccttcccttcctcccttcccatcccttcttcccttcttttgccttcttcccatttcctcacttatttatttatctacccatcctatatttgttgaattcttatcatgtatgtaggatattgatttgatttttcaatatcagcagacatttcctgatcagaccctgctgcagacactagaacaatatgggcctggtccctgtccttatagaattaatattctagtagtgagatcttctggtctacttgtactgatgggataaggtcagtgtatccctagccctcttactactaccttctttctttgagtagaaaatgggctaatggaatgtggaaatccccagtattactgacttccaatatactgacagttgtttttaatttattttttttttttgagacagggtctcaccctgtcatccaggctggagtgcaatggcacgatctcggctcactgcaacctctgcctcctgggttcaagtgattctccggcctcagcctcctgagtagctgggattacaggcacgtgccaccacacttggctaattttttgtatctttagtaaagatggggtttcaccatgttggccaggctggcctcgaactcctgacctcgtgatctgcccaccttggcctcccaaagtgctgggattacaagcataagccaccgcaccaggccctttatttcctattcctaaggtcactggaggtttcctctagaacctaaataatttgtctttgttaggaagaaatgcccaagaatattattttttactcttcaatctgaacaaaatctgctaacatcacatttcttgattgctactccaatcatttataaatatacaattctttctataaatgtgatcataatttaatatgaatttagataatttaataaaatatccaatttactcattttctcattccttgcttatacaattctttgttgctttatttcttctctcttcctatcttaaatggtacttttctgaatgactcccaaagcacattaatttgaacatctctaagagaatcttagagaactgtaaatgtaattttaatcagccttacttcataaacacttaaacatttttctttgcaggtttgagtaaaaaaaaagtgcacagctcttttcttactgttgcaaaaaatatataaccaaccctatcagtgagaggtttttatttttgcaacactcatgtataggttacagatgtctaagtgtctaagttcttttgcgttacttgccagatattgttatacttcagtctccctccctgatagtaacccaatgctctttgcatggttggctccctggaaagcatacatgaaggctatgctgacttagttaaggcttcttgctctggatttgctattgtgactaggtttttccttctagaagaagcttgacttcctttacctccatcatatctgtttctgcaaccagctcctccaacacctttacccctgaagcaagccaagtcactgagagccaattctccagaaagaaaaattgctgaatgaccaattcattgagagacaatttagcaaatatgtgtgtacagcagacaaggccagtacaatcctgtaagtactaactgtatgaaggggaaatgagaaagtggacctgtggtgacaaagtattaggcacttgcatccaccaagcaccatttcctttcaatactcttaggacccaggtcagctcagggaagaggctgcttgtccaagtatcacacagcttaggaatgtctattttgatttcagaagaaaaatgccttcttttactcaggtgcatttttcagtattaacacatcaatgtgaatcttttttattttattttattttgagccagagtcttgctctgtcacccagggatcaacgtgaatctcgagagaagacatttgatttccagtatctttgccctctgctcttcgtgtctaatttgaactcaggatcctcacggctctaaacaaagcttgtccaacccacagcctgccggccacatgtggttgaggacagctttgaatgcagcacaacacaaattcataaactttcttaaaacatgagattttttttgcaatgtatttttttagctcatcagctattgttaatgttcgtgtattttatgtgtggcccaagacaattattcttcttccagtgtggcccaggaaagccaaaatattggacacccctgctctaaactgtttcattttcaatatgtcttttgtcataaaaaagcttcagttaggttcataggggcacagatcagcatctcaaagctgttcttctgctcttcatgaggccaattcccaatatccctttttctaagcattatatgaccctcagataccacagtctgctgcagtttcccagtctcttggcgatgtcacacactggtcttcctgagatgagatactccgctttgttcatagatggtttcccaacatctagtgtggttgtctgaccgcctgcatggcttcaataaattttgctgaacctacgaatgagtaaaagtgaatggacaaaggaatgatttgtgatgtactagaacccttcctccaaagtcgtcctttgattcctttcttcattgttgtttccaactggtaggtgggcagggaatagattatataatgactatcttactgtatctctagtcctcctaaaattagcatcatattccttcttgtgataaatttgttcttctaagaatagatttattgtctgagccatttaattaaatctttgttttccccctgcttctcttgttccttttcagtctcctttctctttttctttccaatttcttgatattggaggatctgagggctcagttctttgtccttccctttctttcttttcccttcccttctctcctttttccttttcttcctttcccttccattatttccctatctacactcacttcttccaaaactgaaatactgattgttgccctaaatcttactcttatttgatgccaactctgtatctgcagttatcaggccaaaaactttgtactcttttctctcccaacccaatatccaatctgtcaaaaacttctactggccctaccttcaaattattctggaatccagaatctgcccactatcctggtctactcttccattatttgtcacctagatcacggcagccacctcttaagtggtctctttggttctacccctgcccctataggctatttgcaaacacagaagacagaatgatcaattgcaaacctaggtcagatcatgagccccctctgctcaaatacctgcaattgcttccatgttgctcagtgtctttcagtttcctgcaaagtcctccatgatcttgttcctttggtgtctctgatctcattcctactactcctcttcctacctcagctccactgacactggcaagtgattgtacctctaacccaccagcactcctgccttagagccattgcactaactgtttcttctttctggaacactctttccccagatagccacatggctgactccctttcctccttcaactattaactcacattttaccacctctatgctgtctgccctgaaaccctaatttatactgcaacctgtatctcctactctgtgtccttccttggccctccctagccccttttccctgctctgctttttcttttttgaaaaattcgtatcaccctctaatgcattaggctatttgcttatctattatgcttgttgttggtcttcccctgttagactataaatcctccaaaggcagaaatcattgttactccctgatgtattcattattttatacaatgctaggcacatagtagtgctcagttaatacttgttgaatgaatgaaggaacagggggaagtatagtttagagcactgtcatgtgggcaagtcacatgtcttctctgagtcgttttcttatctgtagagataatagtaatcaagtcctaggttattgaaaagattaaaggggttagttgacatcaatttcctggaatatattaagtgctcagtaagtgtcaatattatatttttatttgctaaatcaagacaatgctagaacaaatgttatccgcataagatatcacatttttagtaagatattaataggtaagaagcacagtgacattttaatttttcctcaagtcccaatcttctacctcatatttaagttctatgttatcaaaatacaatatattttcttaccctttcttaaattattaaattaaaaaacaaggaaaataaatgtatagattattataaggcaaacctccttgtcaccactccccaagttgggacatggaacttttccagtcactccagaagcccttccatgagccccatcctactctccctccctccaaaggtaaccatcattctgactctgtagtaaccaattccttatattcctttttggttttattgcacaagtgtgcatccttagattctagtttagtcttatctattttaaaataaataatatatatttacagtatcttttaatctacaggttctccacccagccttttcttttctttacaagttcctgttaaaggactctgtttagactgtagcatctcccacaatttgggttttgccagttgcatgcttatggtgccattcatcatgttcttctgtccctgaatttcctgcaattggcagttggatccagaagtttgttcagattcagggtctgttcctttagcaaggcagtaagtagtggtatttatttttcattaaaaggtagataacatctgtttttctctttttgtgatgttcttctagcagaagtttcctacacccataggcgcctatagggccatacagatatccagctctgaaaagtaaaaacaagcttattttctgaacagtttatcaggtactgtgtcctttcagtggctggaagattttaacactaagaggatttgtagccagaaatttaaaagaagctagcagaagaaatttcttacacctactgttattatattagctgttgttcaatacctagttcaattaatatgctggggattgaaaactgatgattttgtaattctatcatttcattttcttttattagctggaataatactataaagagatgcttctttcatctctcatcagttcttacaggatcagcaggctaaatgcttttctctttctttttttttttttttttttttgagactgtctcttactctgtcacccaggctggagtgcagtggcacgatcttggctcactgcaacctccacctcccgggttcaagtgattttcctccctcagcttcctgagtagctgggactacaggtgcctgccaccatgcccagctaatttttgtatttttagtaaaggcagggtttcaccatattggccaagctggtctcaaactcttgaccttgcgacgcgcctgcctgggcctcccaaagtgctgggattacaggggtgagccaccacacccagctaattcttttttcaagataatgaattggctcccttttattctctgaaggtgaccagttaatattaaattatcatttatggtcattatgatcttcatttaagcatatttgaaggataccacccaccgcattttttatccttattgaaattcatattatcttacctttggctaatggaagccttttcaagttggcatctgtgtcctttaacatgacctgtggagtctttcatagctgtctttctgtctgttatgacaagataatccatgatttcttgtgctttccctgtcccagacctggaatcagtcttttcttcaagaaatctgggtttctttaagtgagaaatggtagtgcaagaacacattgttgttaccagggatgttcattactattggggtggttgtcatttctaggtcttttatgtggatagataaaatagttcataaattcagttagtatttccaattcaaattcaggactttcaagatttttacttaagtttttttctattatgtatttctctttcttccacactgagaaccctaattctgaaagacacaggagatgatacaatctcccattaaattactccgttgatttatcccatcttacacacagaacagtctcagaataacagtactaataccaccagcacccataatgaaaaccaaaaaatagttaaaaacattttttacaaatgttctcccccccattatttatggattcatagctacactatcaaagcatagtcattgaatactctccttttgtcttagttctcaagtatgtacatacttaatactcatcattagaccataggtcaacactgctctagttttttgttgtctaagcttattctttactagatacaagagggattatgggaacaatatttcctgagttcttgtatgtggataacagtgtgtgatacacttgtactttatactggaattgtagtttttatcattaccctgtttccttgttttgtttattttgtcaaggatgcctgttgtctgtatgttgagtcttctttatcttaaatattcatcattttctcttgagtccttttttacctgtattcatttcttttttatttaaaattttttagcctgctcacattctatttttcttaaaccattgtttgttatgtttattcactcttgtatttcttctagtttagttttcgtttctgaggtgggtttttttgtttatttctaattctttcctgagttctgccacctagttcatgagtttttaaaattgtaatttatctgttccttgatgttttgtgtcattttcttaatgtctttcgtttattctgaattagtagattgcagattttttttctggttttatatgaaagctttcattgtctgttagaatgttactctcctcctttttctctcacaataactttgggattccactagatactttctgttgctcatttttatgtgaaattagttttctcagacttttagaagggagcacaatcccttcaaatagtatcaaaatacatgacagctttcttcctgggatttcctggctctgttcttctctgaccccacccctttggtctaggccttctctttcttttgtttctgtttgatccattctaatacatttttattccactcccatcaccttctctgagtgcggagcctgtcttagcaaggggccccagggggtcagtttcaagaattcacggttgacccagctcctttagaagttcctatgacttctggaggttccaagatggctgaataggaacagctccagtctgcagctcccagcatgagcgacacagaagatgggtgatttctgcatttccaactgaggtaccaggttcatcttgctggggcttgtcagacagtgggtgcagcccacagagcagagtggggcatcgcctcacccgggaagcgcaaggagtcggggaattccctttcctagcaaagggaagccatgacagatggtacctggaaaattgggacactcccacactaatactgcacttttccaacggccttagcaaatggcacaccaggagattatatcctgtgcctggctcggagggtcccacacccatgcagcctcgctgactgctagcacagcagtctgagatcgacctgcaaggtggcagcgaggctgggggaggggcatccgccattgctgaggcttgagtaggtaaacaaagaggctgggaagctcgaactgggtggagcccaccacagctcaaggaggcctgcctgcctctgtagactccacctctgggagcaggacatagctgaataaaaggcagaagaaacttctgcagacttaaacgtccctgtctgacagctttgaagagagtagtggttttcccagcacagagtttgagatctgagaacagacagactgcctcctcaagtgggtccctgacccccgagtagcctaactgggaggcacctcccagtaggggccaactgacacctcatacagccggatgcccctctgagacgaagcttccagaggaaggattaggcagcaacatctgctgttctgcaatagttgctgttctgcagcctccactggtgatacccaggcaaacacggtctggagtggacctccagcaaactctgacagacctgcagctgagggttctgactgttagaaggaaaactaacaaacagaaaggacatccacaccaaaaccccatctgtatgtcaccatcatcaaagaccaaaggtcgataaaaccacaaagatggggagaaaccagagcagaaaagctgaaaattctaaaaatcagagcaccttttctcctccaaaggaacgcagctccttgccagcaatggaacaaagctggacggagaatgactttgacgagagaagaaggcttcagatgatcggtaataacaaacttctccaagctaaaggaggatgctggaacccattgcaaagaagctaaaaaccttgatgaaagattagacgaatggctaactagaataaacagtgtagagaagttcttaaatgacctgatggagctgaaaaccatggcacaagaactacattatgcatgcacaagcttcagtagccaatttgatcaactggaagaaagggtatcagtgattgaaaatcaaatgaatgaaatgaagcgagaagagaagtttagagaaaaaagagtaaaaagaaatgaacaaagcctccaaaaaatatgggactatgtgaaaagaccaaatctacgtctgactggtgtacctgaaagtgactgggagaatggaaccaagttggaaaacagtctgcaggatattatccaggagaacttccccaacctagcgaggcaggccaacattcatattcaggaaatacagagaatgccacaaagatactcctctagaagagcaactccaagacacttaattgtcagattcaccaaatttgaaatgacggaaaaaatggtaagggcagccagagagaaaggtcaggttacccacaaagggaagcccatcagaataacagcggatatctcagcagaaactctacaagccagaagagagtgggggccaatattcaacattcttaaagaaaagaattttcaacccagaatttcatatccagccaaactaagcttcataagtgaaggagaaataaaatcctttacagacaaacaaatgctaagagattttgtcaccaccaggcctaccttacaagagctcctgaaggaagcactaaaatggaaaggaacaaccagtaccagccactgcaaaaacatgccaaattgtaaagaccatcgatgctaggaagaaactgcatcaactaatgagcaaaataaccagttaacatcataattacaggatcaaattcacacgtaacaatattaaccttaaatgtaaatgggctaaatgctccaattaaaagacacagactggcaaattggataaagagtcaagacccatccgtgtgctgtattcaggagacccatctcacgtgcagagacacacataggctcaaaataaagggatggaggaagatctaccaagcaaatggaaaacagaaaaaaaagcaggggttgcaatcctagtctctgataaaacagactttaaaccaacaaagatcaaaagagacaaagaaagccattacataatggtaaaaggatcaattcaacaagaagagctaactgtcctaaatatatatgcagccaatacaggagcacccagattcataaagcaagtccttagagacctatatagagacttagactcccacaaaataataatgggagactttaacaccctactgtcaacattagacagatcaatgagacagaaagttaacagggatatccaggaattgaactcagctctgcaccaagcagacctaagagacatctacagaactctccaccccaaatcaacagaatatacattcttctcagcaccacatcacacttattccaaaattgaacacatagttggaagtaaagcactcctcagaaaatgtaaaagaacagaaattataacaaactgtctctcagacaacagtgcaatcaaactagagctcaggattaagaaactcactcaaaactgctcaactacatggaaactgaacaacctgctcctgaatgactactgggtacataataaaatgaaggcagaaataaagatgttctttgaaaccaatgagaacaaagacacaacataccagaatctgggacacattcaaagcagtgtgtagagggaaatttatagcactaaatgcccacaagagaaagcaggaaagatctaaaattgacaccctaacatcacaattaaaagaactagagaagcaagagcaaacacattcaaaagctagcagaaggcaagaagtaactaagatcagagcagaactgaaggagatagagacacaaaaaacccttcaaaaatcaatgaatccaggagctggttttttgaaaggatcaacaaaattgatagaccgctagcaagactaataaagaagaaaagagagaagaatcaaatagatgcaataaaaaatgataaaggggatatcaccatggatcccacagaaatacaaactaccatcagagaatactataaacacttctatgcaaataaactagaaaatctagaagaaatggataaattcctggacacatacaccctcccaagactaaaccaggaagaagctgaatccctgaatagaccaataacagattctgaaattgcggcaataattaatagcctaccaaccaaaaaaagtccaggaccagatggattcacacctaaattctaccagaggtataaagaggagctggtaccattccttctgaaattattccaatcaataacaaaagagggaatcctccctaattcattttatgaagccaacatcatcctgatactaaagcctggcagagacacaacaaaaaaaagagaatttagaccaatatccatgatgatcatcgatgcaaaaatcctcagtaaaatactggcaaaccaaattcagcagcacctcataaagcttatccaccacgatcaagttggcttcatccctgggatgaaaggctggttcaacatacgcaaatcaataaaggtaatccatcatataaacagaaccaaagacaaaaaccacatgattatctcaatacatgcagaaaaggcctttgacaaaattcaacagcccttcatgctaaaaactgtcaataaactagttattgatgggacatatctcaaaataataagagctatttatgacaaacccacagccaatatcatactgaatgggcaaaaactggaagcattccctttgagaactggaataagacagggatgccctctctcaccactcctattcaacatagtgttggaagttctggccagggcaatcaggcaggagaaagaaataaaaggtattcaattaggaaaagagaaagtcaaactgtccctgtttgcagatgacatgattttatatttagaaaaccccatcgtctcagcccaaaatctccttaagctgatgagcagcttcagcaaggtctcaggatacaaaatcaatgtgcaaaaatcacaagcattcctatacaccaataacagacaaacagagagtcaaatgagtgaactcccattcgcaattgcttcaaagagaataaaatacctaggaatccaacttacaagggatgtgaaggacctcttcaaggagaactacaaaccactgctcaacaaaataaaagaggacacaaacaaatggaagaacattccatgctcatggataggaagaatcaatattgtgaaaatggccataatgcccaaggtaatttatagattcaatgccatccccatcaagctaccaatgactttcttcacagaattggaaaaaactactttaaagttcatatggaaccaaaaaagagcccgcattgccaagacaatcctaagccaaaagaacaaagctggaggcatcacactacctgacttcaaactatactacaaggctacagtaaccaaaacagcatggtactggtaccaaaacagagatatagaccaatggaacaggatagagcccttggaattaataccacacatctacaaccatctgatctttgacaaacctgacaaaaacaagctatggggaaaggattccctatttaataaatggtgctgggaaaactggctagccatatgtagaaagctgaaactgaatctcttccttacaccttatacaaaaattaattcaagatggattaaagacttaaatgttagaccgaaaaccataaaaatcctagaaaaaaacctaggcaataccattcaagacataggcgtgggcaaggacttcatgactaaaacaccaaaagcaatggcaacaaaagccaaaattgacaaatgggatataattaaactaaagagcttctgcacagcaaaagaaactaccatcatagtgaacaggcaacctacagaatgggagaaaatttttaaaatctacccatctgacaaaggactaatatccagaatctacaaagaacttaaacaaatttacaagaaaaaaatcaaacaaccccatcaaaaattgggcaaaggatatgaacagacacttctcaaaagaagacatttatgcagtcaacagacacatgaaaacatgctcatcattactggccatcagagaaatgcaaatcaaaaccacaatgagataccatctcacaccagttagaatggtgatcattaaaaagtcaggaaacaacaggtgctggagaggatgtggagaaataggaatgcttttacactgttggtgggactgtaaactagttcaaccattgtggaagacagtgtggtgattcctcaagcatctagaactagaaataccatttgacccagccatcccattactgggcatatacccaaaagatttaaatgatgctgctataaagacacatgcacacatatgtttattgcggcactattcacaatagcaaagacttggaaccaacccaaatgtccatcagtgatagactggattaagaaaatgtggcacacatacaccacgaatactacgcagccataaaaaatgatgagttcatgtcctttgtagggacatggatgaagctagaaaccatcattctgagcaaactatcgcaaggacaggaaatcaaacaccacatgttctcactcataggtgggaattgaacaatgagaacacttggacacagggtggggaacatcacaggggtggggggcagggggagggatagcattaggagatatacctaatgtaaatgacgagttaatgggtgcagcacaccaacatggcacatgtatacatatgtaacaaacctgcacgttgtgcacatgtaccctagaacttaaagtataataataaaaacaaacaaaaaacaaaacaaaaataaataaataaaaagttcctatgacttcttatactcaaacactactggaatgggaacaacccctcttctatttcagctgtggttcccagattgccctgctttgcttttcagtgaatatttttcagctgtcttggcattcccctgtttccaggtctttcagtcaccatgctgcttccttcagcttccttctgcataaacactcacatcatgcaggtgttgtggctatcatctgacttcctcctgcatagatactgataccatgcaggtgttgtggttatgaaagccccacctgtattttggggtttgaggagataccctgtcacctggtttcgttgtaagttttttgacatgtttttgatttcgctatttagttgctatgtttatttttatgtggaattctagaagatccaaaaagtatgctgccactaccactgtcatcttctcagttataataaaatataaattaagcataaataagggaaaaagtaagggcggtatacaatgaaatcacagtagtaaatggtgtactactataaagtgattcccagcaaataataaattcacgggagagtgaataacaacaaacacaaaaaataaagtaaattcacagcagacttggttaatatatagttattttatagtaaagtcaagctatttagatatattcatggaattatttaaacctgtagtttttaaatggtgaaatgtaaatagggcttgttcctttcttctctcattacatcctcccctgactttcccaatacaattttctcctcatcttgtttacatagaaacacagagctcagggaaaaagtaaaatgattttggtaatcaagtatccaccagagagtgtgttcagtgagcccacgttagcgctcatgtgtcatggtctctaaggaacaatttcaaaagcttgacctagactttttcaagctaggaacagttgacagcaaattctaatccaggttataaaaaatggtaaacattattcactctttatattatcccccccaaatttatactgttgtacattaaagtggtttgttgaggtcctgctttgtgctaaagtctgtgtgctgtgtgcaggggatacagcagtgacaaaagggattctgatctctctgggatatgacttatttccagagatgttaggtgtgtcagtcttggcatcgctacagatcagttattgtgatgcaaaaatgtttttacaatcacatcaacttaattcttaaaacttgatttttaaaaacttcccctaaagacacgcaagcaaacacttgaaactatgctagcccccaaggctaagacaggtgattaatctggagttgtggtttcaccacctttcactatcgtctgtcctttcccttgcatgcttgtttgttatttcttgtgaaattttaagtgaatgccaatttatagtggagcctggtaatgacataaaaatcaaaacagcaaggcttatttcagattaagttactggaagcaaaatacatacaatgcaaagattaatgtattttaagtgtacttgctgtttaaataaataccattataaatcctcttgtcagtaagtcttttatgtaaaacaaagaatcacttgttaatttatcttttctgtaaattaagaactttatgtattaggtttgctttaagggaggaaatccagtacctggacagttgctaaataggtcatactccatcaggtgatctgtgtatcaatgcatcctctgttatttataaaacaacatgtgccatctgggttttatttcctccttgtttgttgccttttgccaccagaccataaaccttttgaatgcagagactatcttgtatgtatctgtatccccattaaatgcttactaaagaatgatagtgatatttgtgaaataatgagagaaagaccgcccccataaatttttcctatttccggatcataattaaattttggtggctgtgttaattcaatcagttagctactatatgtgctgagatctgggaagactaaaaagaccataatagtctgtacctttgagaagtttataatctcattagaaagataaaaatgcacacataaaatgtaaataaaaattgccatattattatttagatgtcaaatagagtttatatattatattacagtctttataaatatactttggctttatttataaagttggttcttttctttttcctgagtgaatatcaattgttttttatgccttttccccctttttcttcccacatatttgtcaatctctagtaccaaagagaattattatagatgttttaatcatctgacatttttaacatcaatgcaattttctaatgacatttcttacctaggaaagagattctatacacagacagcacgaggcagcccggcaagctctaatgggaaggatacgccctgatcacacactcctatttcaaaggtagcaatttatcacatgagcaactttagattgatttcctagtgttcaaatagatcaaatgaatcctaaatcgtgaacataaacagagacctctgtcctaaaatggacccagtgtttcagcagtaaaagcagttctagaagttgtatttccttttcatttgtatacatttttaaaaggcacaatatgctcatagctactagaaactgatgattttttgaagattgcaaagaatatttctttgcaagaagaagacgggtgattaatctggagttgtggcttcaccacctttaactatcgtctatcctttcccttgcatgattgtttcggttctttttattgtttgtaattttaagttatctattgagaatctttaatcaatataaataaaattacatttttgttcacttgtttgctgccatgtcaaaacagagtgattaattttcttcatgttggtaggctatctttggatagtcagattcaaaagacaggctgtgtgatatatgcaaatttgtatgggaggttgggaggatggtggccaggagtgagacactgtcccccagagcagctgaagctgggcctaggtgaccactgcccagcagaatgccaggcctgttcgaacactctggacagagaaactatgcagttttaaatatgagttccaaatgggtcatcacaaaggcagatagatgctttgaatttgcctgcatttatatgcaactgggctgccttgcacatagcaactctagcaagtctgaagaacagcagggtttattcacgaaaaatggctaatgattctttttctttcaagtcagtctgagggaacagacttgcatacagcacatatgaatagatgaaaaaggatattttatgctagagtttagttgaacgtataatggtagaatttttagaaatattttacttggataccatttcaaagcattagattataaataaagttggaaaacacctatttttaacttttatagcagttgatatattgctagcccttgcataacaaatggactagggaatctccaggaagataatttgcctatattagtactttaatggctatggaatattcacagcaatgaatatttacttaaccttcaaattagaatgtaatgatgccaatgacttagacaagctctgatgtgcatgtttctgagtggatatattacattatttcacatagatctcattggcatttgcgtttatctgggatatttaggtatacatgtgtgtacacttggtatctttacaaaatcctttggtttttttttttttttaaatttcccattccaggggtccagtaccagcacctctcaccagtggtctacactattatacaactttagaagaactctggaaaagttttgatctttgtgaagactattttaaacctccatttggaccatatcctgaaaagaggtgagttgaggtgttttgttggatggaattggctattttctgctggttagttaaaattatggtactcatctctaagcttcagagaaatcctaaaactgggaagcagggccctaactcccgctgtagaatttgaagggagtagaccctgcccctctatggagggcccaggcatataacctaggttcaccattggaagcttttatctgggaccttgaatcttgagggagtgatagaaagacacaggggcagttagaggctattcaagtcaccagcagcagaagaaccgagatttcagaggaagagcacagacatccattgtggtaaggcaggcaatgatgttctgctaatctcttcctgtactgtgattcggctgtgttcttggttcctagcttacctttgttcccgcctcattttaaggccaggttctctagtttccattaatttcataaagtaccccatagccttccactaattccctttttaatattcaccttggccaaagagtgtctgtatttgcaaccaaccattctgattagtatgacgctgtatttcaaaatgtttaccaatggaagtgcaatacataaaaggccatttcagggtctcagtgtttaatatgtcatagtgtggctcaaaagctgaaaatgtttacgctgagggtcccatatagaccacaacagagcctccattgctgattgtagcactgtgcttttgagaacattctactacattttgtttctccttcagttgctcctgtcactgcagctgaccatctcgctgtaggtcttgaaaacaaatttacacaaagatctggctggttgggtcaattgccatctactacggggtgcctctcttgggtagagatctctaaccagggccctcataggttgctggctggtctatagattggctgtccctatgtcaggcacctatcctttagccagtattctgtggtcagaccagtgacagcgaaccaagtggaaaactcttcagaagggggctgtgggtatggcagtctctgtggagcatccaaacgcatggcaatgtaatggacatacaaagtgaccggaagaaagctcaccaaaatgtgaacagtggctatttctctagaattaccagttattttatttttcttctttatccttttttcctgtaacacctaaattatttgcacagggatatatattttatttctgtatcctaaaaaactattaaaaatccctaagaatttaatgaaatattcaataaatgagaaagtaaaaggatttacaccaaaatattatgttattatcttctagtgataagattatggccagtttttgtttttttgttcaccccccgtattttcaacaatgagcatttttataatttttgaagcattagcataactttacaaagttattttagaagtctgtcacagcaaagggatattttatgatggtgatatatcataatgagaatgaaaacttttaaaatgagcaatgctttcctttatttctgagttttattgttctgacacttgggatttccttccataattttgatgatgaaaaatagctgtcccctctaaatggtcccctctcagtctgcatgtttcactagagattagagaccctagcattataattagttaattagctttctgtaaccgtgttgaaactgtgatctctgaggatttgtttgagctctgaattgttagtacagtgaggtaggcagatgggaatacagcaaaaaagagaaaacaaaatggcctaatgggctgcagtaggtttacacgtcatctcttcccatggtaaaaggggtcaggcctgtggctcaagtctcacacttcacccgtggtcatgcatatgtcttttaactccaccacattctttcttcagactttcaatgagtattcatttaatactttgacacaaaggaaaaataattgttgaaagacagaacttgctctgtgatgccttttttgatgtgtgtcttatatgcagacatattatttcccaaaacatatgtgttatggtttgagctgtcccccattcccccaatttcatatgttggagtcctgacccccaggatctcagaatgtgaccttatttggaaatagggtcactgcagatgtaatttgttaagatgaggtcatattggagtagggtgggctcctaagccaataaggctgtccttgtaaaaaggagaaatttggacacaggcacacacatagggagaataccttgtgatgaagactcagattggggtgatggggcagaagacaaggagcaccaaagcttgccagcaaaccaccggaagtgatgagagaggcccggaacaattctccctcacagaccctggaaggaatcagccctgctgacaccttgattttggactttaggcctccataactgtgagacaatcaatttccattgtttaagccactcagttcatggtatcttgttatggcagccggagcaaactaatacgacctgtataaaaatccagtgaaatttttcttttcacattctttctgtgttccctttaacatgctacatagttatatgctatgtatgtatttaatttatatgttatacatataagctactatcgtatgcactatatctttatcactttgggttattgcatttttcgctaaaagatggaagaacatctttatgcatctatcatttgataaaaagctctatcccataaaacataaatgcatctactgctatatttagggcaaaagactcagtctaggtataaatctaaagagaagatcccatgcataggttaataatgacactttcccaatgcaggaagtagaggagagatttgtctggtgactggaagagccagatgttggcaatattggtctcagtttactcttctctagcaagtgcttcttgggcaagctcagtaaacctaggtgggagcaagagattgggaaacaaggtctcctaggagactttgctctgtataaagggagcctaggcctggtgcagtggctcacacctctaattccagtactttgggaaggcaaggtagaaggattggatcatttgagcccaggagttcaagaccagcctcggcaacatagtgagactctgtttataccaaaaaaaaaaaagtagctgggaatggtggtgtgtgcctgtcgtctcagctactcaggaggctgaggtgggaggatggcttgaacacaagaggttaaagctgcagtgagccatgattgcaccattgcattccagcctgagtgacagaccctgtctcaaatagataattaaattaaattaaattaaattaaattaaattaaattaaagggacctaacattctggcatagaattccaaaagctgtcgtccaacaaaaagaagacagtcccaagaactcagcccaagatggtaagatggacctcctccttggagcaagcaattagacttctctgccacttgataacaagtaactgacacttctaagcagaatccttagggtgcagagagagtgccccatcccagaatacctctatctgggaatgttggtgccatgtagccctagctgtagttgacagacatctgaggtccaagtagtaggcaggtgcctatgcccagcagcacatgggctttccaggagagctgggtttggattcccaagtgcaccagtgctgtggcctctgcttgccattcaaacataatacagacaatgtgagtgctgcacattagctgtgtcaccctcagtatgcctatatcaccccattcccttacctcctgggtcaaggacaggcccagatgatagctaattgcactatgtttttcaatactagagccctgaactcctggggatatctcattaagactggctcctacccttttaatctctgccacagtcaatatcatcctagtaaacatagatgccttcatttaaatggcaggctttaccttgtatagacccaattgcatcagcctttcctattgccaggtacgaatctaagttaaatgtggagtgtgaacaagtggagttcaacttgaacttgatcctagaaatgtacttctttgctgggatagggatcataacattggaactacagaaaagaaagtatcatcacagccacctactaggttctgcagcggaaaattacctatgaatttttgacgttttaatcaacctttggccaaatcatgaaaagacagaactatgaatacaaagcttaatataatcaactttgacagtgaaaagcagacccgtaatgacaaagttgaggaggtagaggtggagggtcaattttattagctgttgttaatgaaagaagaaatgtagttttaaaatatgatatatgaagatgcagatctgacagatggaagaactgagaatagtgatagaactatgtagggggagtgttataaagtgagttaagttcttccgtatcatagcagaaatcctatctattaaaagatatgtttaaaattgatgtcaggcctgggcggcgtggctcatgcctataatcccagcactttgggaggcccaggagggtagatcacttgaggtcaggagttcaagaccagcctggccaacatggcaaaaacccatctctactaaaaatacaaaaattagccagatgtggtggtgcacacctgtagtcccagttactgaggaggctgaggcaggagaatcagtgaaacccgggaggcagaggttgcagtgagccaggatggtgccactacactccagtctgggtgacagacaaagcctctctgtataatttgacttaattttaactatatagagacagcacgttgattaaaatgttaatgataaatttttggagagttgagaaaaagtttgtctaggtccaaatcaaatttaaaagaaaaacagcaagctttacacaatacaacaaaagggttaatattcaatacgtgaagagttcagacaaattggtaagaaaaacggtatggtcctcaacagataaatgagcaaaagacatacacaattcacaaaaggagtgtggggaggagctaatgaataaatataaaaaataatgtttaatcttgcttgtgattagacagcaattttaaataatatgccactttttgcttgttgaattagcaaaactgattttttaaaattattttttaaatggtgcaaacagaaagatactgctggagagcccagattttgttggaagataaaatttcacaatcttttggggagcaattaggaagtttatagcaaaatcctaaataatatatttactattgacctagttatcctgcttctgggaattgatactgtcttagaccattcaggctgctataataaaataccatagactgcgtagctgatagacaacacacatttatttctcccagttccggaggctgggagtttaagatcaagtgcctggtcagggcccacttcctggtttccagatgccatcttgtggcattgtgtagatgtgtcctctacacaatggaaggggtgagggagctctctggagtcttaaataagggcactaatcccaccatgagggcctcaccctcataacctaagcacctcctgaagaccccgcctcctaatgtcattaccttggggatgagaatttcaacataggaatttgtggggatgcaaacattcagaccctagcagatactaataaattaacatgtggaaaatcatcatatgcaaagatattcattatgacagaaaaacttggaaataacctgaatgtcaaaaaataacagaatggtcaaataaagcatgaagcatatacttgatggactattatgcagcaattaaagatcagggttcagaaaactgttgataacttaaaattgttcactgaaaatgtgcacaattacacaaaacaaaaagagccaaactgtaagagtggctttctatgtgtgattttcctttttccttctagttttctgtattttctaaattgtctataatgcgtatgatttacttttataatgagaagcaattagtgaactttatttttaggaaattaattcagtggataaagataagtcaatccaaaacaattgaactgaagtatgaatgtgtatgggatatgagaagcagagttacaaagctagtggatcttgtgtaacactcaaccacatgccagtttccgttctgggaatgtgacatatgttatctcaacacacacacacacacacacacacacacacacacacacacaaatttataactactacccggcgagaaaaaaatgctgtcattttcctcattttaaaaatgtgacaactgaggcaagttaattagtcggtaaaaggacttgaagctatcaagtctcagagctgaggtctgaaccaaagccaaaaggctcgaatctttgtgctaagccacttggctacagtctacaagacttagaatttaactgaaggaagaagacatgtatagagaaacaccaatgacacaggcacgtctgtgatgaatgaaagacaattagttcagacatattttttgtctgactttcattattttctaccagaggtttcttttttcttcccaaactacctcttatttgctaaagctccccaagatatgccagcatctccgacataattcacattctctgtggctttctaaagaaaaattattaaacttttaaaaatgggaaggtcctatatttgcatttcaactctatgtctgaggggttcgcctacatttatacctgttttattttcttttttgacacttgctgttaactagaaatctttccgtgtgtgcatgggggatgaggggatctttttgcttggtctcagcatgattccttgccgaggtcctaccaatatctgagggcatccagtgatgagacagctggggaggtcaagagcacggtctataaatacttcaatcagccaccatctggtcctggagtcattggctggtgagatccagaaacatgggccaaaacaagccccctgtcgcctgtgtcaaaagagacacacatcacttgggttatggcgccctcttcccaagccatagtggtataaaactccaggcctcatgcttccctgctcctgccttttcagtagttgaattatcctattcccacccccgaaccttcccttaaaaagtctactcctggccaggtgtggtggcacatgcctgtaatcccagcactttgggaggcccaggtgggcgaatcacctgaggtcaggagttcgagaccagcccggccaacatggagaaaccccgtctctactaaaaatacaaaaaattagctgggcatggtggtgggtgcctgtaatcccagctactcgggaggctgaggcaggagaatgacttgaaccgggcaggcggaggttgcagtgagctgagatggcgccattgcactccatcctgggcaacaagagcgaaactctgtctcaaaaaaaaaaaaaaaaaaaaaaagtccactccttgtctttttccggttagttttccaagccagcatctttctatcattcctgaagtttactttgactgagaagcattccagaaccattaagttggagaagagaagcctgtctcccagtgaggcccttcagatgtcacaacggtccctctgctgagagcattctccttcctcccctccagtttcaacctccaccccaccttcccccttttctagctaattcatccctcatgtcttaactaaaatggcacttcctcaaggagagctgtcctggtatgcctaatatatcatcttatagcatttgtgttttccttcatatctcagtttttgtaaagcacgtgtgtgattagatacacctcccagtctgtaagccgaacagggcaggtccagatcttgtgttcactgctatatctcctgaacctcctcagtgttagaattgagaatgacttgataaatgagtgacagaaaagggttaagagtgtaaacaatctttggggtcccaaggtgggagatggggactgcactggtcagggagaggggagaggatcgtgtccacctttctgtcaggtggaatcaaagctgtcccccttgctgagtcagggactactcatggcatgacttccatgtttagtgaggaaatttcactcagtaaatttctcctgccttcttgcttaggcctgaaatctgccatgagagctgcattcttttaagacgttggccctcattaaaaggcaagatttatccaaaacgtaatggcttaaatatcagccattttcgtgtgatcaatttcagattctccaatgacagcaaatatggtggggatgaggcacagtggtagaagtgcctgtaaacaaggttcagctgcttgccagggctttgcaggatgagctcccctggtagagctgcctccctggaaggcagtgaagaaacaggtgaatcccaaaggagaggaacctggcggtaggaagtgtttgggctcagaggcagggatttcagatgcccaatcatacctgaacattatcctaaaaatggaaatgagtgtggggcatggtggcttacacttgtaatcccagtactttcggaggccgaggccggctgatcacctgaggtcaggagttcgagaccagcctggccaacatggcataaccccatctctactaaaaatacaaaaattagccaggcaatggtgcatgcctgtggtcccagctactagggaggctgaagcgggggaatcacttgaacccaggaggtggaggttgcagtgagcccagatcgtgtcactgccctccagtctgggtgacagaataagactctgtctccaaaaacaaaaaaaaaaaggaagcaaaatcacagtccccaaaacctatgcccagtgtgaggtccagatcaggccacctaccatggttttgtttctctatccttgaaatagcactgattctaaaatcctggagattaggatctgcgccttatcttgttttatactccaacacttatcatgatgtcttgctcttagtaaatactcagccatgtcttgtataatggatgagacatttatgctaatgtgtacagtacctattatactttaagagatgtcagcttctatatagcaccttctatagacactgttgaacactagctcaacacaagacatgtccactaactactgtgaacttgataaaggtaacccagtgaagtcataggcatagatcgtgtggccattagtagcgaatagtttggatctcaaaaagatctttggtttttcattttttcagtgggaaggattccttggtttccatgaaatgttcattgtttcggttctgtccgtggtcaaaagaattgcctttccagcctccggaggggagcatttcttcacacctaggatcaggagccagtgacagtgagaccgaagagacccggaaaggtatgagttaggccaagcgcggtggctcatgcctgtaatcccagcactttgggaggccgaggcgaatggatctcctgacgtcaggagttcgagaccagcctggccaaaattgtgaaaccccatctctactaaaaatacaaaaaattggccaggtgtggtggtgggcacctgtagtcccagctactcgggaggctgaggcaagagaattgcttgaacccaggaggcggaggttgcagggagccgagatcacactactgcactcctgggtaacaagagcaaaactccgtctcaaaaaaaaaaaggtatgcgttgttttacatatggtactataaatataagttatatatatttatatttgtttatatatgtttcctactgtctttttattgatcctgatttttgaaaattaaatgagagtattgagtcagaatctccctctaaggtagcgtgttattttgttgcccattgttataggtgaaaaacaaagttgagaaaggtggggaatccacccacggtcacttagctactttgagtagaagctgctgcactgtccacccggccacattatctgcagcggtctgggacaacgaccacatgctctttggaagaggctttggtgaggtagactccattcaatgaaggtgaaggaaagcatggaggctttgagttgcagtccagtcttcactgtggcggttcggcagaattctgatggctttaggcttgaaggatctggcccagccccgcttcacctcctttttgcccctagatcccaaacacacatgtgaacatgcatgtccagaaagaggcagaatggccattgcacttttctctctgggctccgcggcagtgttcacaaataacactgagtaaagaccttgaacagggtggggaaaacaaaggactggaggtgaaaatgggaatgggagagaataatctgggtgtcaataggaaaggtggggcgctgtgagtagctgatagaggaatgaagtgaatggggagaactctctaatgcatggaggctaggacagagccaccatttgtagtcttgaggggatgttttgcctgaaccctgcttgctcaggtgaccggaggaactagcaagataatacagacctcttaatttgcctggcatgagaagacacaatagatactgtctccaaaaggaagggattactgaagcaggcatcttctaagcaatgtgagggtggactccccttcactgcagtggtattcaggatagctggctggaataagagattttcaaggatttgactcatgcaggacacaagcaataaggatgagagttctaacaccaaagctccaggaagtaattccaaattctcttggccttcatgtcagctcgcaggaagtgggaaatgttctaggaattctgtaaaggctgggacctgccactccagggcccgagggaaccgggagttctagaccaaacatagcaccaaggctcatcatagttctagcttctcataggacagtgttcatggaccgtccccatctcatttcctccccctgcctgtatccttccttaaatgggatgcttagggtcaaataccttattctaacccatctggccagagcaaagtggggctgttatcagtggtgtggtacagtagaaagacattagattaggaatcagaagacctgtgttctaattccatttctctactggctggctgcacaatattgggcaaatcagttaacatttgagccttgggaataataacataatatctgtcgtataataatatggtattatcacatataactatatatgattgtaacatatatatgcatattataatataatatataatattgagccagataagatgagtttatggtacaagtaagaagtaaattgctagatacctgctagatattgtgcttgtaaatttgtatacacatagcagaagattgtgttggtgtattttatggatgctttctgtagattcattttgttcctttgaatgggccacacttttctgtttgtttgtatgcctttgctcttttgttgaaaattgggcatttgaaaaaacagctacctctccaaagctgcagactagctcagcgctgcagaggactaattagtggcgtgtgttctaagcctaggatcaggcttgcatgcaggcttcacatcttttcaggcctttcctgggtatgcattttccctgggcttgtgtgtgtgcttttttcccagttccccagtagacacagttgcttttaaatgttttaattttcctaggagtctcacccctgctgcttgttggggctttagctgttctatcgtatccctcaattagtagcccctgtgtggttttcatgagccatgcccactgctcctgtggcttctcctcgtttgagatcccagctatgcctgtttgggccatttgaactctgagttagatgacacagagaccaatcaggcagctgccaaatgggttagaacattgcaaattagatctgccctactctctctggtttatagaaggggactggggacctgactgcacttgccccaaatcactgcaacgtgctggggtgaggcggggcaagggcaggtgaaagcaccatgagatttcccaccatttgagtgtggcttttcctggactgggcatttgtttggttgcagtagatatttgactggttccagagttcctataaagttatttcagccagtctctagttgtttatttaatgtttccacgggacaataagggtctggaagttctgagtctgccattttgctgatatactgtggtggttttcttagcaactatatcatactgctggctctgggtcaaactctcatgtctttttttacatgaactgtcaaactaggtctccatcatcccatatatgtgaagttgatttttttttttacataaatgtaacttttgttttcatctttttatcattttggtttggccctacattccagctcaatttgtatcaaattagatcatttcgtatctgattaatctcccatattctctattctcccatattccctattaatctcccatattctctatagatttttgaaatctataaaaccaacaagcatgtgacctctgcctatgtcatagtcactgtcaacaacaggactcaggactcagccaagtgcagtgtcacatggcaagtctcaagtctctgcagacttaatttcagggaaagtccactactatgtgattactagtcaaatctctgtagtggaaccccatgagaaactttgataagtgccctgtagaaatcaagatacattgtatcagtggtattttctaacttacaggtcagcaacctttctctaaaggaccatatagtaaatgcttttggctttgtgggccatgtgggctcttgtgcaacttctcaaccctaccattgtagcgtgagaacagctataaacaatgtgcaaatgaatgggtacaggatgggttccaataaaattttatttacaaattaaataaaatttataaatctggctgcaggcccgatttggcctatgtgccatagtttacttgacccctgcctaaataaaagggaaattaagttactttcaagtaaattttatttgcaaaccccttcaacactcatcattcactatagtattttataaatacacaaccatttctttaataaactgaaatttgctaagatttaaagtcaaatgtggttgggtgcattggctcatgtctgtaatcccagcactttgggaggctgaggtgggcagatcacttgaggtcaggcattcgagaccagtctggccaacatggcgaaaccctgtctctactaaaaatccaaaaagtagctgagtgtgttggtgtgcgcctgtaatcccagctactcaggaggctgaggcaggagaatcacttgaacccggtaggcggtggttgcagtgagccaagattgtgccactgcactccaggctgggtgccaaagcgagactctgtctcaaaaataaataaaaataaagtcaaatatactggtttgtaaacctttattcctatttttttaaatggcaatattatttgtctccaatgctgttctcactgtggatgaattatctaagggtggatactccaaaactgcttccataagcaattccggcaccctgagatgtaatttagctggttgtgggacttgaacggattgaaaaaggaggcctactcctctaccgtctgctttcttttcaacatgtttgctttgctctttcctgtttaaaagatatccccatggagaaaaacaaaaaccagcaaacaaggaagggccagactcagtggctcatgcctgtaatcccagcactttgggaggccaaggcgggaggatcatctgaggtcaggaattcaacgttagcctggccaacatggtgaaaccccacctctaccaaaaatacaaaaattacgcagatgtggtggtggcatatgcctgtaatcccagctacttgggaggctgaggcatgagaatcatttgaacccgggaggtggaggttgcagtgagctgagatcacaccactgcactccagcctaggtgacagagcgagacctggtctcaaaaaaaaaaaaaaaaaaaaaaggaggagttttttttcttttcttttgctgataacaatatcctctcaaacaatgtcttatttttttctttgaatatgtcctaaaacggtcaatgttccctttgacttttcattggtttgatttggccaatagatccagtcttcataatcttatccatcatttctgtttctctcactctctatagaatcctctgctttactttctcaatccctgctactctgctttcttaccagtgagaattctgcttctgctatggccaccatgcctctacctttcctctctatcttctaaactcctcctgcttcccaaagtccctggagaaactgacatccagatgtcttcctgcttggtgagcagaccaatctttagagggcattaaatgaagcttctataggaagaacttcacttcactgtgtgtgtgtgtgtctgtgtgcatgtgtatgattgtgaaagagtactgtgtggagcattgttacagaaggcatgacaggtggaagaatcgctagtgagtgcttgctgtagcatcctctggtcattgggcaactctatacaacctaaggcttgttcaaccatgtacatgctatattctgacctcatccactattattcttccttgaatgtcatttctttcttttttttttttttttttttggcctcaagtgatccactcacttggcctcccaaagtactgcaattataggtgtaagccactgcacctggcctcatttatttcttatagtttgtcatgaacgaattctagaaattgttctggtgcttatatcatgcaacacttattctctttgtaccaagaaaccaagggattaactatctttttttctgaatgttttacagcactacctatacaatcattttcacatgaaaaagagtctcaccaacacagacaacactcggtcccagtcatcagtcgcccaggttccaacgtcaaacccaccctccctccaatccctcagggccgcaggtagactagcacttgatgtctgatcctaacatggaaaacctgctctgctgatgtcgaattccttgccttacctggccatgggtccagctgtttctcactcaacccattacccacggaagaatgttctacctgccttaattctatcagccagtttctcttgtgattctttggctggtgtcttttagttttttaattaaaaaattgtttcttaaatgatttttaaagatgtgagtttttttaatgtgagttattcttagcttttaaaaatgtcatttcatttttttttctatagctataaataattttttccacctgctccctgctcggaaatatcagatggaaaaatctcccaagatctctgcaccgtgatatgcagagtggctttctgatatatccaactgggattgtgctcttaaaatttcaatatgtccatttacaacattcctgtatgctctagaggattgatttattttgctctgattatgaaaggattgcagagttccatttaacttgtcgccaacatgatatcgactgcatctctcaaaaggaattaatgtaattttggggggttcttgacttactttagcaacacgaaagaataaagagcaacagttgattcttttatttcacccttctttgactctgattagggactgcttgtgattagatatacttttagacaactttcatcatctttgtagtttcactccttgtcttaaaaagaaaaacctccattgagcagttatagacaaggctggtattccgctagtatgtcccagtaggctatcctgattgttaaaactttgagatacattcctttgtactggaaaatggtcttttctctgagtactctgtgcatgatgactagtgaaaagagaagcctccacatagtactatactcattgttaaatattttgaatatcagaatcctctaatgactttcctttttaaaatatcaaaaccccttttaataatcctcttccctgtgacaaatttggttgtaacacaatttgctgttggctcttgtcctcccccagtcctgctctcaaacaggagctgattaaagttcctttcttggggttggtgagggtggagcggggggaccatgaaggagatgaccacgttgggcaaggaaatcagaggagtcttttctggagaagtggggaggaagagggtatgtctctgtattccaagaatcttcaagaatagtttaactttcacaagtatcgtctaatctttaaaaaaaattatgaaatattttagggacaatagaaaatataaaaataatacttctgatttaagacagcatggaggagctgcacatttcctggtttttctcaccgaatacagctaaaaccctgaacattatagctcaacctctgagaggtgaaaagaaggcagatgggctatggatctcagagcctgagtaacaacatggtggtgaatcctctgagtttggttttcctcatatatcctaaactgggtgctagagaaactaaaattcaaagttattaatggatacatcaacaaaagccccagcgaaagcccactctctccagccaaaggactaggaaagggacagtctcaaaagatagaaaacttttagacaatagctgcaccattccagccaaacaccatggattaaactatgctccctaccctgtcagcaaaggctctcaacctcttctggctgtaacaaggttctcctccttctctctgctgggacagtatcagagaaggtgttgtggacagccaggactttaaccactgcccaatattaatgagaatgccctcccacaatgtcattgaaagccacttgggggccctggacctattcctcacctggtaataatgaggaacctcttctccttcccactggagagtattagaaaaggtctcatgaagagccaggactttcaccatcaacccacatccctgcagtgtcagtggaggccatgtgaagagctgtgacaaggtgcctctccccctcccagtgagggtggttcagttgaggcctagtggggaccctaaacttctaccccaaagcgttaatgaggcatcactgccctctttcccaccctgggtgtcaacagaggccaagtggagaacttgggcttctctctctatctgccggtcatgagtcagtgcctttctgccccactggtatggtgtcagaaacgtcctactgagacaacagattgaaataagatctgaagtctcattaacacactatccaaactgtctaagatataattaaaccactcaccatatcaagaattaggaaaatgtcaacttggataagaaaagaccatcaatatatgcccacaccaaaatgacacagatgttggaattattgggtaaggattttaaagtagcaatcataaaaatgcttcaacaagcaattaggaacatgactgaaacaaatgaagagatagataatttcagcaaagaaagagaaagccatagcaaagaacagaagatataaagaagaaccaaaaggaaatgttatgactaaacagtacaatcactgaaattttaaaactcattggatgggcacaagagtgaaatagagaggacagaggaaaaaaacttaatgaaccttaagacagaagaattgaaattacccaatctgaccaacagagagaaaatagactgaaaaacaatatgagtcccagggatgtgtaggactatgtgaaaagatctaatgtttgtgtcattggagtctagaggagtacaaaaagagtgtgagactgaaaaatattttttttaaaaatgacccgaaatctctaaatttggcaaaagccaaaaacctacaaatccaagaagctgagtgaatcctaaacaggttaaagccaaagaaattcacaagacacataataatcacactactgaaaaccaaaaacaacacaaaatcttaaagcaatgagagggaaattatatcttaattatagaggaaaaaacaaatgctagtggacttctcatcaacaaccatggaagtggtatattttgaagtactcaaaggaaagaactgtcaacttacaattctatctatattcagtggaaatgtccttcaggtatgaaggagaaatcaagacattctcagatgaaagaaaacaaaaataatttgttgccaacaaacctatcctaaaagaagagttgaaggaaattattgaaacagaatggaaatgataaaagaaggaaacctgaaagatcatgaaggaagaaagaaaaatggaaagagtaaaaatatggactactacgcagccataaaaagaatgaaaacctgtcctttgtaactacatggatgtagctggaggccattatcctaagtgaaataactcagaaacaaaatcaaatatcacatcttctcacttataagtgggagctaaacaatgggtacacatggacataaagatggcaacaatagacactgggactgcaaaagggtgaggggtgatatggtttggctgtgtccccactataatctcatcttgaattgtagctcccataattcccacgtgttgtgggagggacctggtgggagataattgaatcatggggcactttcccccatactgttcccatgggtagtgaataagtctcacaagaactgatggttttataaggagtttcaccttttgcttggctctcattctgtcttgcctgctgccatgtaagacgtgcctttagccttctgccatgattgtgaggcctccccagccatgtggagttgtgagtccattaaacctctttttctttgtagattacccagtctacggtatgtctttatcagcagcgtgaaaacggactaatacagggggcaaggtttgaaaaacttcttattgggtaccatgttcactatttgggtgacgggttcactagaagcccaaacctcagcatcatgcaatatgccagtgtaacgaacctgcacaagtacccccagaatctaaaattaaaaaaaaatatgttgaactgaataaaaatgaaaatataccctatcaaaatttgtagtatgcatctaaaacagtgccgaaagggaaatttataccactaaatgcctacattaggcaagaaaagtcttaaatcagtaagctcctacctgacgaaccagaacaaaagcataataaacacagatcgagcagaagaaaagaataaagagcagacattaatgaaagtggaaaaacagtagaggaaaatcaataaaacaaaaagctgattccttgaaaacataataaaatggactatttagtaaaaacagatgaagatgatatattttaatacaaattaccaatagtataaatgaaataggggatgaaactacagactccataaatatcaaaaagataataaggaaatactacaaacaactctacatatgtaatttggcaatttagataaaacaaactcttttcttaaaaaacacaaactcccataactcatgctgcatggcatagataatttgaataagcctataaatatgttaaggaaatagaagaattaggttgaattaaagaatttataattgaatttgaaaaagaatctccaagcccaaatgctttcactgaagaaccaattgctaacagaagtattcacaccaattctatacaatctcttccagaaaacagaagaggaaggaaaacttcacaactcattttatgaggccaatattaccctgatatcaaaatcagacaatataaaaaaataaaactacaaaccaatatcacttatatatgcaaaaaatcttttttttttttttttttttttttttttttgagacagagtctcgctctgttgcccaggctggagtgcagtagtgccatctccaatcactgcaagctctgcctcctgggtccacgccattctcctgcctcagcctcctgagtagctgggactacaggcgcctgccactgcacccggctaattttttttgtatttttagtagagacagggtttcaccgtgttagccaggatagtctccatctcttgactttgtgatcctcccgtctcagcctcccaaagtactgggattacaggcatgagccaccacacccggctgcaaaaattcttaacaaaatattaaccaaaaaagcccaggactagacagattcacagccaaattctaccagttgtacaaagagctactaccaatcttactgaaactattccaaacaatcaggaggagggattcctttcttactcagttcaatgaatttttaattcccttaagacctccttgtagatccacggattatttagaagtgtgttgtttcatttccagatacttacagattttcctgttaacctttctgttgttaatttctagtttgatttcattgtggtcagatcagagaacatactctatatgatttcaattctttttttttttttttttttgagacagggtctctctctctgttgcccaggctggtgtgcagtggtgccaccatagcttgctacagccttgacctcctaagctcaagcaaccctcctgcctcagcctcccaactagctgggaatacaggtgtgtgccagtacacctggctaattttcttttttgtagagatgaggtctcaccatgttgtccaggttggtcttaaactcctggcctcaagtgatcttcctgcctcagcctcccaaaatgctaggattacaggtgtaagccactgtgcctagcctcaattcttttaaatttattgaaattcttttgtggctctggatatattccatcttggtaaatatttcttgagcaaataaaattcagcaatacataaaagatgtgtgcgctgtgaccaagtgggatttaatccagagatgcaaggctggtgcgacagttgaaaccaaccaatgaaatctatcataataataggataaagaggaaaaatcagaatatataaattgatgcagaaaaagcacttgacagagtccaatatccattcataataaaagtctaggaatacaggggaccttcctcaatttgctgaagaacagctacaaaatacctacagttaaaatcatacttagtggttacaggctaaatggtttctctctgagaataacaaggcaaagatgactactctcatcactcatttaacataggactagaagttcaagccagtgcaataaagcaggaaaatgtaataaaaagaatacacattacaaagaaagaaatccttatctgcagataatattatgatctacatagaaaattccaagaaatctagaaaactcttagaatgactaaatatgttcattaagttctcaggtatcaagattgatacaaaaaatcaattgtatttctgcatactagcaatgagcctttggaaacaaattaaactacactcactcaacaaaatgaagtttttagatgcagatcttttaaaaaggcacaagacttatatcttacaagtgaaaaagaataatataataaaactctaagcccataatatatccactttaagaaacaaaacattactaatatatttaaagcccattttgtatcctttctaattatattttcctgatttcccaccctgatgtaaccattattctcagtttagttttttatccttcccatgaattttttacacttttggtatatatgtgtctattcctaacaatatatactgttgttctccatgagtcaaaacttcgtgttatattacatgtattcagcaattaacttttttctcaacattatgtttgtaagattaatccacatagtttttattattgcagttttgtaatttttattgctatataatatcacactgtaagaatatatggtaatttattcacttttctgttggtgaatgctaaatttgtttctacatgtttgttattacaaaggatgcagctaaaaacattcttgtgtaggggtggaattgctgtgttataggtatacaaatatttaactatcagatattactatagtggttgctgtaatatgctctcaccaacacgtaagagggtgctcattttttcacattttcagcaagtggcattaatagtctttttattgctaatccaataaatgttaatgtaatctcattgtggtgttaagtgtttagtttgaatttctccaattgtcaagtaaagttgaaccttttaaataagcttattggccacctacagttctcttctgtgaattgcctgtttatatgttttgcccaattttaaattgagttattatctttttcttattggtttgatgtatttatatattctggttaataattttttgttaattaagcatattacaaagatctttttccaggttgtgacttattttttcaccttttaaaatgttatattttaatgaatacaagttttttatatggccaactttgtcaatctttttctttttgatttgtactttttagatcttatgagtttcttttttatcctattgtaataaacataatctcagatatttttctaaatttttgttaagtttcactcttccaatttaggcctatattttacttggaatgaacttctgtgtatgatgtgagataggattgaatttttttttattccaattgtcccattactctcccctcctagtttgtaataccctctctctcatagattgtttccataaatgcttggatttatgtatcaaattctacaaatgcctcacttggagttggttagaattacatttaattcaaaaatttgaggaggtttctctttttttatgatacttgctctccctatctgtaaacattctctatttatgtaggttttcattaatttcttcaatacaattgtataattttctccataaaggacaaatgtatctttagtgagatttattcctagatgcattttatcttggttgttgtaaattggatgtttttaaaggttatattttctccgtctggtgtataaaatgcaattcatttctacaaataaccctgtgtattaattctgacaatgtattatagataatttcaggatttctatgcagatagtataataaaaaataacaatattccttttctttccatccgttattattttctttttccctttcctttcttcttttctaagctgcactggagacaatcttcaatacaatgttgaatagaaacaatgataacgagcatccttgtctcacatctgaatctgtctaatgcttcactattcagtgtgaaatttgctatagattttaggtagataaacttctttggaaaaagaagtttcattttcttcctagtttaataggagttttaccatgaataagtattgataagagggtgttttctttgtagggtacaaacacttgcagtatgtattaattcaatcatattcattgtattattcaaaccatttatttcctttttcattttttcctacttattcatatggataggtcaaaaaatttctcactgtgatagggtttctgttcccttctcttctttcctttccctccttacctccctcccttccttcctgtattgctggatggttgtagaaaagtcagtggtacgtaagaaatgcttacaaaggcatcagaagtaaataccacacaaataaaaagcaaggaggggtaggaatattataatcagacaaagtagaagtcaagacaaaaatcattaaatgatacataaaataccttttacattaagtcaggtacatcccattattaagatataataacagttataagcccttatgagttgaataacatgacatcaaagtatataaggcaaaaagtataagaaatgaaaattactttgtctgaatgacagtactatcatttataaaactaacagaatttcttattaagagtcttgtgatgattaagctaggtaatgcatctgtggtgagtatgaatacttcaggccacaaacttttaattttaagtgcaatccaaagtgaaagaattaatcttattctcagtcaattcaggacaatctcatttaattcacagtttctcctctcttgcattttacttcggattttatccaacttcagggggttgtggggtttcaaggcatcaggggagacattaggttcctccctgcattcataagaaagtcttgagtattgtctatttgccagaatgcatgcctggctgtggctgcatccccatcattctgacctctccaggtgtgtgaacaatcttcttcatggaactttggttcccttcatgaaagcacataataagccaactgctccctgtgccaagagtcaggctcagcccttctctgccttgacacacacctggtcttcccctgactaggggaagacatattgggatgtagacatattgagaacttggcgaacctgatgcctggtagagctctctatggtagagccaggcagtgggcatgaatgcccttcctctcagagtcccacattcaaatgagatttctatggtaaactggtccctgaggttatgcctctgaagtaattgttctcaaccttgtgtgcataacagactctttataagctcccaaaataccaaagcccactatccatcccaagccaattaaataagaatctatgagcagggaagctcaggcattgcatttttttttttttaagtccccagagtgagtccagtgtgcaaataggtttgagaaccgctgctccacaaggttgaatgggggctttctagaatgattttggcaaattttttaatttttggccttcagcagtttatgagtgatcatattaacataccctcattagcataaagtgtattatacttttttagaattactaatttgtttgttgaaaaatatgttattttactgattaggtttactattgttcatatgcttattttttattagtatttccttctgaaccacaaattgttggctcatgtctttgttacatttttattctgggatgttggtgttttctcttatatttttgtgaaagtgatttaatattaataatagtctattcaatattaactatgtggttcccatttgttataaatattcatcttaatttgttattggtctgcatttattttaaatagagaagtttttaactctatattttcctatgtagtgtttggttgtgtatacacatcctgtcttccacaagcagcactgtccaatagagctttctgtgatgatggaaatatgtagaaatatctacttcgtccactatggtggccaccagctccgtgtagttgttgagcacttgaaatgtggctggtgtgactgaggaaatgaacttttcattttaa

SEQ ID NO: 814 - DNA, 2685 bp, Homo sapiens
gatggcgacctccgagagggctctcctgaggaccagagctgcctctctcctgagaggcttgggcagatcccgaactggagcccgatcgttacagtttcgcgcagaaaaagagcgtcagccttgctggtcttttcccatggggcagaagacgaaaggcagctctaacatagcctcctcctacctgctccagcagctcatgcaccgctatcaggagctggactcggacggagatgaggaccagggcgagggcgaggcgggatccgaggagtcctcagagtccgaaatgctgaatttggaggaggaatttgatggggtcctgagagaggaggctgtggccaaagcactccatcacttggggcgctcaggctctgggactgagcaagtctacctcaatctaactttatcaggttgtaatttaattgatgttagcattctctgtggatatgttcatctacagaagttggatctttcagcgaataaaattgaagatttatcttgtgtgagttgtatgccttatctcctagaacttaatgcttctcaaaataatttgactacgttcttcaatttcaagccacccaaaaacctcaagaaggcggatttttcccacaaccaaatttctgaaatttgtgatttgtcagcgtatcatgctctcactaaactaattttggatggcaatgagatagaagaaatcagtggactagagatgtgcaacaacctaattcaccttagtttggccaacaataagatcacgacaattaatggcttaaacaagttaccaatcaaaatactttgtctgagcaataaccagattgagatgatcacaggtttggaggatctgaaagccctgcagaacctggatctgtcccacaatcagataagcagcctccaaggcttagagaatcatgacctcctggaagtgatcaacctggaggataataagattgctgagctgagagaaatagaatacattaaaaatttacccatccttcgagttctcaatcttctagaaaatccaattcaggaaaagtctgaatattggttcttcgtaatttttatgcttctgcgattaacagaattagatcagaagaagattaaagtggaagaaaaggtttcagcagtgaataaatatgatcctccccctgaagtggttgcagctcaagaccacctgacccatgttgtcaacagcgtgatgcagccgcagaggatctttgacagcactcttcccagcctggatgctccttatcccatgctgatactagctggtcctgaagcttgtgggaaacgagagcttgcccatcgcctctgcagacagtttagcacttacttcagatatggggcctgtcataccacaagaccaccttactttggagaaggggatcgagttgattatcattttatctctcaagacgtttttgatgaaatggtgaacatggggaaattcattctaacatttagttatggtaatcacaagtatggattaaatagggacaccgtagaaggtatcgcaagagatggtttggcaagctgtattcatatggaaatagaaggtgtaagaagtttgaaatattcctattttgagcctcgttatatcctggtggtgcccatgaacaaggaaaaatatgagggatatttgcggagaaaaggattattcagtcgtgcagaaattgaatttgctgtctccagagtggacctttatattaaaattaatcagaattttccgggatattttgatgaggtaatcaatgcagatgatctggatgttgcctaccaaaaactgagtcagctcattagagaataccttggattgactgaggaacctgccaagagtttggctacaactgcagatgttaagacatcccacctgaaacctgaagcgcatcctacaaagtatatttcttcgaatatgggtgatttcctgcattctacagacagaaactacctcattaaattttgggccaaactttcagccaaaaaaacaccagcggaaagagattctatacacagacagcacgaggcagcccggcaagctctaatgggaaggatacgccctgatcacacactcctatttcaaaggggtccagtaccagcacctctcaccagtggtctacactattatacaactttagaagaactctggaaaagttttgatctttgtgaagactattttaaacctccatttggaccatatcctgaaaagagtgggaaggattccttggtttccatgaaatgttcattgtttcggttctgtccgtggtcaaaagaattgcctttccagcctccggaggggagcatttcttcacacctaggatcaggagccagtgacagtgagaccgaagagacccggaaagcactacctatacaatcattttcacatgaaaaagagtctcaccaacacagacaacactcggtcccagtcatcagtcgcccaggttccaacgtcaaacccaccctccctccaatccctcagggccgcaggtagactagcacttgatgtctgatcctaacatggaaaacctgctctgctgatgtcgaattccttgccttacctggccatgggtccagctgtttctcactcaacccattacccacggaagaatgttctacctgccttaattctatcagccagtttctcttgtgattctttggctggtgtcttttagttttttaattaaaaaattgtttctt

SEQ ID NO: 815 - protein, 817 aa, Homo sapiens
MATSALLRTRAASLLRGLGRSRTGARSLQFRAEKERQPCWSFPMGQKTKGSSNIASSYLLQQLMHRYQELDSDGDEDQGEGEAGSEESSESEMLNLEEEFDGVLREEAVAKALHHLGRSGSGTEQVYLNLTLSGCNLIDVSILCGYVHLQKLDLSANKIEDLSCVSCMPYLLELNASQNNLTTFFNFKPPKNLKKADFSHNQISEICDLSAYHALTKLILDGNEIEEISGLEMCNNLIHLSLANNKITTINQKLPIKILCLSNNQIEMITGLEDLKALQNLDLSHNQISSLQGLENHDLLEVINLEDNKIAELREIEYIKNLPILRVLNLLENPIQEKSEYWFFVIFMLLRLTELDQKKIKVEEKVSAVNKYDPPPEVVAAQDHLTHVVNSVMQPQRIFDSTLPSLDAPYPMLILAGPEACGKRELAHRLCRQFSTYFRYGACHTWPYFGEGDRVDYHFISQDVFDEMVNMGKFILTFSYGNHKYQRDTVEGIARDGLASCIHMEIEGVRSLKYSYFEPRYILVVPMNKEKYEGYLRRKGLFSRAEIEFAVSRVDLYIKINQNFPGYFDEVINADDLDVAYQKLSQLIREYLGLTEEPAKSLATTADVKTSHLKPEAHPTKYISSNMGDFLHSTDRNYLIKFWAKLSAKKTPAERDSIHRQHEAARQALMGRIRPDHTLLFQRGPVPAPLTSGLHYYTTLEELWKSFDLCEDYFKPPFGPYPEKSGKDSLVSMKCSLFRFCPWSKELPFQPPEGSISSHLGSGASDSETEETRKALPIQSFSHEKESHQHRQHSVPVISRPGSNVKPTLPPIPQGRR

SEQ ID NO: 816 - DNA, 57152 bp, Mus musculus
  misc_feature (1)...(57152): n = A,T,C or G
tctcttccatctctgtattctgttactgatgctcacatctatggttcctgatttctttcctagggtttctatctccaaagttgtctccctttgggttttcttcattgtttctacttccatttttagatcttggatggttttgttcagttccatcacctgtttggttgtgtttttctgtagttctttaagagatttttgtgtttcctctttaaggtcttctacctgtttagcagtattttcctataattctttaagggcttctacctgtttagcagtgttctcctgtatttctttaagtgagttattaatgcccttcttaaaatcttctaccaccaccacgagatatgattttaaatttgagtcttgcttttcaggtgtgttggagtatccaggactcgctgtggttggcatactggattctgatgatgcccagtgttcttggtttctgttagtaagattcttacatgtgccttttgtcatctggtaatctctggtgttaatgttctagctgtctctggctggagcttgatcctcctgtgattctgttaccctctgtcagcattcctgggagtccaactctcacctgagtccctgtggtcagagcattctctgtaggcaagctctcctcttgcagggcaggtgtccagaagtctggagctctgacccacctcctgagtcctagggtcagagcgctccctgtaggccgactctcctctggcaaggacggtgccaaggggtctgggtctcagctccgcctcctggctgaggatgaaggcccaaagggaccatgtccaagaagctctgttgcttctgttgcccacatgctctccagtgatcgagaggtcctgggtgtgctatgggtcctgcagattggagagtcctctggggccctagatgccctcagccgggttcacttggaagatggcagcgctggcctgaccagaaagaatcccggcctctggttgggcggggttcctttgtccctgttcctgctggcacaagaccctcctggattctttggagttgatgttgtgtttcactcacctgtgatcccgaggtgatcccgaggtccagaggcgtggagagtcatctgtggtttttggcaggctctgccagattccatgctttactttctaaatcatttacaaaactaatatgaaaaaaatgttcccaacaataaaatttcatatgactacacgtgtgtcattgggtgtggattttggtatatggtaaagaaagccttaattagaaagaattaaaatagtttaaatttatacattgaagatttattaaaaaaaaaaaatcaggcactagacgttaaataataattgaccatggggctagaaagttagttcagcagttaagagcactgactgttaaagatttattaacctgctcctgccactagccttggacaacagcccccactgaatacatcctttttagaattgttatattttgatgatttataatgatgttacctgttctgtttgtgattcactgaatgcatagtttcagagttgtaatgcttggatgatttttgtgctttactgtgccaaatgaattttgttggtatctgtgattgtttcactggatatagtttctaagagatgtaatgtttgtttttttaatatataaaatcccctgcttgagagctgaaaaatacactcagattcaaactgcctctgtgttgttgttgttgttttttaatctgtttgtcaccgctgcatccttacccacctagcttcaaggaacctcattccagggaccaccatacccgattggggtggtccgtggcagcccaggtcttgcgctgacctgaaggaacccaagccgctggttgggctggtttcctgtgtccctgatcctgctggcacagctcgtcactattgttttggaacagatgttgtgttctgctcaccagtgatcctaagatcctgggtgtgctagggcacctgtggtgtggagggtcctctaggggccgtgggaccatccactgagttcgcacccaaggtggcccagggctggctctaactggaagctctcctgtatttctttaagggagtcatttatttccttttaaaagtcttctatcatcatcatgagatgtgatttttaaatctgaaacttgcttttccagtgtattaaggtatctaggacttgctgtggtaggagaactaggttctgattatgccaagtagtttttctgttgcttaggttcttgtgctttcctctcaccatctggttaactctggtgttagtaggtcttgttgtctctgactggagcttgtccctcctgtgggcctgtaagcctgtggtcttaggtgtatcagcactcccggggagaccagctctctcctgggtggggttttggtgcagagggctatgagacagccttagctccaggggcacagatggagcctgaaaagatcctgtctccagctgctgagctgttttgggtttcatgttcttaggttgctagctggcacttgtagtctctttcccaatctttcaggtgtgcctaagtgtcaggaacccggcatggcaagtcagcaagtacttattttaacatagcaaatcctatgcagtttgttaggcacagcatttgtggctgccaaatctatgcatagaagctatttttatatgagaaagttagctttctgttttctaactccttcactggctaagcttgactgtcctgaaactttctgttgagacaaacctggagctcaaagattcgtctgcctttgtgaacacaaataatatgcttagctgggtgggatcccactctgagatcaccactccctcacttcctgttgctcctttattaattaaaccatgagcctttttttttttttaactattcctgtctctttcttgactcattagtgcagctgcctctgttctttcgggtctgtaaacccctccctcatacaattcacattgcatccttatattttgcatagttgagaaatcttgtttatatattcttaaactcatgttttctcagttctttcccacagccttaagggctgtcctgaaagtcacagcattaccattttgccgagaaacattagacacattcttactttctggatttgtgctgtttctaattatcataaattcattgaccttgacagggagagcattctctggaacatgaaaaatgcatacattattgtgtaaacaagccttatacctaaagtaccatcagcacctgaggagacccatgactcactggctctgctccaggggtgggaactgtgtcacactgatacaccaaccacggtagaatctgtatgacaagttccacatactgaagttaaaaacttcaaaagaaggaggcctcctggaactggttgtggaactctctgctggaacaaaatattgagtcatagatctcctggcaatttacctcttttattttattttattctttttcttatttatgacatgttcctgatagcctaatctaaaatcttaagctagaaaaatggataagaaactatcccttgagatggggtcactagccaggaaaaccagcattttacatcataaatcatttacaaaattatataatactattatgatagattaaaaactttcccaacaataaaatttcatatggctacaagtgtgtcatcagaagtgggcttaggtatatagtaaagaaagccttaaataaaaagaattaaaatagtttacatttatgctttgaagatttacaaaaaatcaggtattagatattaaacgataactgaccataaaaatttattaacatgctcttggaaatatgccactgaaaacatcctttcagggttgtaatacttggatgatttttgtgtttttctgtgccaaatgataatgatgatatcatatctgtgattgcttcactgaatacatcttctaagagctgtaatacttgtttcttttctttttttttttttttttttggtttttcgagacagggtttctctgtgtagccctggctgtcctggcactcactttgtagaccaggctggcctcgaactcagaaatccacctgcctctgcctcctgagtgctgggattaaaagtgtgcgccaccacgcccggcttaatacttgtttctttatgaattaaaaaccttgcttgagagctgcaaaatactttcagattcaaactacctctgtgtttgtttctgtttgtcactgccaaattcttacccacctagcttttgaagactcttgtcccaggggggccaattctaaggcccatgccaccagagggagtccattcctgccactgcctggatgaccaggaattggaagttgcatagcccagagacccatggtaggaaacaactaaaaccaaaatctaaaaacaaaacccagacaacaacaacaacaaaatcaacacaatgattcctaatgatattcttacatactcatagattggtacctagtccaacagtcatcaaagaggctactgccagtagctgatacaggaggatgcagcacaaagaccagctctctgcatgttgtgtttgcagtggtctggagggaggacgggagcgtcaggggatcgggggaggggggggcacggaggcaaactgtctgtacacaacactgaagtgtctctagtatcagtagttagggggttacaacattcctccttcttttggtgactctacaggttacaacattcccctcttcttttggtgactctagaggccaatcttggactctttataggcctaaatcgtctgtgctagctggttggtactgggatctcattaccattagttgaacagtccctaatctctgctttatatactgtaaaagtttattgattatgcctggcagtgacagaagacttatcaggggccctgtaattgtgggaatgagagtagttaaccatggggaagtatcgaatagtgaatgataccagcttttggagttttcttgttctctttggtgcctctctatgctttctctaaccttagcaaatgattctctgatgattccagagtgtttttcataaaaagcgacactcttctagaagagcagcacacaagcatccctgctgcaggaacactaagtctaatccttgtctgctctgcaggactgcctcagccagggaatcgacttttcactctaggaatgcgatggacttttctaagcgttggatgtcttgatctatagctaattgaaggctgttatagttcttctcatgcaacgttagggatgctatcccggtgcctgccccagctagtcctgctcccagaattacagccaaagttaggaaaataagttctctcttctgtctcatgaggtctcccccaacatgccttatttattaggttcttcagcactaattcttctgaataataggttatgtgtggcaccaactggactagaatacagagctcctttgcagtaggggaattaagggcctctccatgcacacatggagtcaaccctgttgaacagtcccaccaagcctgtttggggggaataacccatttcgaatgaaccgggggaggtgaggttgttggttacaaaggtgctgatgtgacaagggaactttttccaggcaggtcccctgtcctgatatggtggtctgcagggttcaggctgggccttcttgggaccatctgcatgcagtgtctctcctggactcattatatttagatataaatctaatatcttcataaaaagggcgtctggcattatagcacagccagcaggaggtggttagctctgggtgggagtcgttaaaaatctgaaaggtttttagcatcattgaccagagcgatttaactaaaagatcccagggctggggacccctgcgggggaaggacttgggggcaggcagcagtcaccagtctgaggaccagctttggtgcaggttttttcgggacaagatctcttggtaaaggtttagggtttgtcagaatccagtttggtcccacagccaccggcagggggtttcctcttggttttatcaggagcctaattgtgaaaatgagtccgaggttgtttctgccaataatataaagcaggaggcccggcgatttctcagcttcccagcccttttcctgctttcctaggttggtgaacctaagtagaacgtcagagttgctcccctgtcccgcaactgtgataagatcttcctttgataccttccattccccatttcctgcaactgatgctccacaacctcaagaggcacaatagaattgttctagtcccccacatgccacaatcccacaccccccccccccgacatatataaaaagtctcccatctacacttagggtatggatgcttgggtgtcaggccacaagttatcagccagcacagatcaaaggttaaatctggaaaccacggggtccaagtggcttttttgtattagccagttgggcccagtaacctgtttcagaattctcagttgtccaagtcataaggctggtgcgggtatttgatctctgaatggggaacaacagtgcatgcagccagtaaaaagtacatttaggaccaagttaattttaacttaaaggaaccagtggcattttggatcctccattccggcggtggtggctgtgaagtctgatggtcttcttctggaagaaacggatcaagaggtctcacatgagtgctgctatcctgtccacctttacagctgctggagttgtgagcaggatggcgtagggtccctttcaccgaggctccagcgctttctggcaaaacctcacgtagacccagtctccaggttgaaacttgtacagctctggaactgggcctacttcatagagggcaggcagtttaggcgaaacctgctcgtgaacccattgtgttgctctgaccttagttatgaattcatcaccttctaattctgcaatggctgatgactgaaggtttgggacaataagggactggacgccatacatgatttcaaaaggagttagtcataaccggtaaggagcgttccttactctatacagggcaaagggaaggagtgtcacccagtctatggcagtctctagggataatttagtcaaggtctcctgaagtgtcggattcattctttctacctgtcctgaacttagggacctgtacgcacaatgtaatttccaatctgccccaatatatcttgctacattctggcttactttggacacaaacactggtccattgtctgatctatcatatgtgggaatccatacctgggtaggatgtcttccagcaacttcttagccactacctttgcagtctcagtcttcgttggaaaggcttctgttcacccggagaaagtatccacgaacactaataagtacctctggccgtactttcctggtttgatttctgtaaaatcaacttcccagtaggcctccagtctcttatctcacagacatgagctaggttgtttcgcagtgttgtgggtattgatcaattggcaagctttgcaacttgatactacatcttcgatagtacgctgcatgtttctggaagtcactttagattgtctcactgcatctgccgtcctgtatacaacactgaagtgtctctaatatcagtaattcaggggttacaacacatacatgcaatcaaatctggagagaagacaggaagatgaaaaagataactggccaagacttcacatatcaagaagcccccccaccccccaaattccaggaaggatcagcacaaagagattatcaaaacccagagaggggagtgacaacaggagatagtctataaaagcatgtctttttttctccagtaaaggtgggctttcatcttttccatgaagtcattgtttcctttgggatcagacaggaggccacctgtgcttcattcagagagtgtctatgcctggtttgtccagcacaggaaaactttggctgcagcctggccatcgctggatgcttccagccaggtttagaccgagaacctgtagaactagaaaatgtgtgacttttggccggaaaaggagtgcaagtaatcttgctgccaagcagagtgtggtcgctaaagagtctggcactagaagaggaaggatactttgagggcatcctgggattacacaggaccacagtcacagcaggcttagaagacatagaagtcggtttcaatgacttagatgtgaaaagagaagccagggtctccctgcatgagggatagctcctgggaataacaaacatgtaaaatacaagagatatggagtcaccaacacttccacttagcttttttttttttttttttttttttttttttttttttaatggtctgagaagcagcaggggtcagggttggagtcatttcaaggagtccctgagattgtaaatgaatctgccagggtaaagctgagccttccagggagaccctgggaacagaagcagcaaggacatggaattactaggaaagctgtaggcagtcagttctctgaacccagcaaggccatttggcctctttatgatttgcctgtttctctctcaggatgggactgttgattctgtcctggaacttttcggaggtagagtctagtcaagtaggtctggtattgtagtttgaccatcttgcaggagtatgtttcatgctcccactgtgataaactatgctgcccaaagtacaggcccagagtaatgagtcagcgacctgggctcaagatctctacaccagtgagacaaatagtaaacacattgtttaagagttgatttatctctgaaattttgttacagaaaggaaagggctgactccataggtcccttagttacttcgtagccaccctaggcatctgattaattaatgcaatgttaactttcatttctttttcttttttgtttctggtttctctgtgtagacctgtctgtcctggaactcgctctataaaccagactggctttaagagattccccggcctctgcttgccaatgtgtctaccaccaccagtgggccacttgtaatgccagaatgttcaaactcaagtaaatattatttatcatgacttcaaagtaagagatcattggttctggtcattcaactgtcaaagggaaactgtacaatgattgctttaagtgaaaagataaagtgtgacgtacggatgtgtaggaaactgtaagctctatgtgcagtttcagacatctgttgtggaccttggaaacatatctctcatagataaatagactactatactagaaaatggtgtttggggagttatttaggctcaacgaaggcatgagagctatggcctcatgattcttaccattagagatccagccccatcacctcactcccaatatgggctaatttctttatcgtttaaggaaattgagggtaaatctcttatttgccaacaaatccccccccccccccggacagaaaccaggtagattgcttttcttgaacaaactgttttcctttgcaggacactaagcataacccttcaacaggtttactagtttcaggcctctgaggatgttccaaacaaaaaacaagtaaacaaataacaacaacaaaaaacactgccgtactggctggtttgtgtgtcaacttgacacaggctggagttatcacagagaaaggagcttcagttaaggaaatgcctccatgagatccagctgtgggacattttctcaattagtgatcaagggggaaaggccccttgtgggtggcaccatctctgggctggtagtcttggttctataagagagcaggctgagcaagccaggggaagcaaggcagtaaagaacatccctccatggcctctgcatcagctcctgcttcctgacctgcttgagttccagccttgacctcctttggtgatgaacagcacaatggaagtgtaagctgaataaactcttttttccctaacttgcctcttggtcatgatgtttgtgcaggaatagaaaccctgactacgacaactgcctagagttttcagagagattgagaaatctgtttgtctatcatctttccccaccctgctcctcctcctagtgctcagttcttttatgcaataggcaccttttcaaataatgtgcctctgccctgttcagaatcaccccagaagcttcagattcttctctacgatgaacctcagcgctgcacaccaccaaatatccctaagtgatgggaacaacattccactcattgggcttggaacctactcagatcctagaccggtatgtatatattcgtgtgtgtgtgtgtgtgtgtgtgtgtgtgtgtgtgtttggtggtggtggtgtatgttgcctaaaccgattttaaatcagaagtcaaattctatctggccacatttttatgtgaccatccacagagtacaggcttcaaagagtaaaaataaagtcacaacattttaagtctgtgagtttgtggagagatgcattcatagtcacctttgtccagatgtggtctgttggctacaggctagactcatctgtaagcatgagtctatagaagcttccagtatgaagagagtgtcttgctatgtaggcatccttacctgtggaagcagagaaggtggagtttggttctagaactatgcctaatatctgaaaacagtgaaaggagaggaaccaccatcaccacacagaagagtttctgcatggttgtttccctgagttgctttgatcctgtggtaatgctgactctcaaggtggtgaacatcgtgaagcaacaagggtgtctttgtgttgactgggaagcaaactccagttgagggtgtcagaggagcggcactggggtctttatgctgcccatgtgtgatcatgcatacttccactcctcatcaactacaaatccctcattccttaccttacgctccaagcctttataggttagcctttataggttagctgacttgtctatccagcccattagccactctccgtacatgcagatcatgacctaaggctggggagaggcacagtgggtgaagtgtttgctttacaaaggtgaggatctgaattcacataccgcttccccaccccccatcccccacccccactcccccggcactcacataaaaagccaggcatggtggcttgtgcctctgactctagctctatgtagggaatgacaggcagattccatttcctcattggccagccagtctagtcaagacctagaactccagattctcctgttcttccatagagtccccaagcttcacctactgtttgactgtggatgtctgcatctgtctgagctagctgctgggtggagcctctcagaagacagccgtgctagattcctgtctgcaagcataatagagcatcattaatagtggcagggattggtgcttgaccatgagatgggtctcaagttgggctggctattttttaaagatagggtcttacactgatcctagagctcactagctgctacagtggccgaccaatgagctccaaggatgcttgtctctgctcctcaagccagcactgtggatacagactcaccccttcatgtgtagcttttatgtgggtgctggggatccaagttcaggccttcaagttactatggcatgcagtttaccaactgagccatctcgaagccccctatagtaaactttgaagggtcaaatcaaaggatacctcttcccactcacaacatcctaattcccacatgttcacacatggtctcctgtcctactgacactccataatctttctcactagcctgagaagtttattagaaaagaccgttgcttgttcaactctagagtctcatgacaatgccttgtatgtaatgcttgttcaaatagtgcttattaaactaatggaaaagtttgtgagagggatgtgtacattagacaatatggagatataaataaatttaaaaaaataatagctaaaagtgttctaaacacctaactatgtgcctggaactctgtgcatgttttgtagcacatgcattttctaacataatcctcacattgcaaagccaataccagttaagcccactgacagatggggaaagagagatgagcatagagagactgaacccatcactccaggttagactgccaaggcccagggttgaaatgtgagccaatatcattcatgtccagaccttggtctctgcacattgctttggcaatgccggttaaatcacatttctgaagctccagtgtcaaggacaacctggagtgcacagatggagcattgaatgaggcagttcatcagagtctctcacctcgacgatcttccaatcatcaaagcatggcattggaaaccattctgtgagctataaatcaatgtatcatgagatatccttttaaaacccatttctctcctccccatatttatcccccttatctcataaggtccctgggaagacctatgtggcagtgaagacagctattgatgaggggtaccggcacattgatggcgcctatgtttaccacaatgagcatgaagtcggtgaggccatcagagaaaagatagcagaagggaaggtaaagagggaagagatcttctactgtggaaaggtgagtcatgtcttactatgtagatacagtgaattggggcgtagtgtgagagcagagcttagtaagatagtcctcaccaggcatgcccaaggccctagaaatgatcttaatcaaacactagcaaacaataaagggaggaagagggggaagaaagggaggaggtggtgggcaaattatcatttgtaatcccttaatttgctgaaaacaatatacctgtgtatacatgcatgtcacttaaacataatacagcacacgcatcgaaatatagcaagtaaacagaaggccatgtgtaactgaattcatggaagggctggtggatttggcctatgaaggtctgccttcactgcagttttaccaacacccaagggcagtatgaggtggaggatgagtgcacagacttgtggtaggttttcatggtggtttagataagaatgaccccattggctcatatccttgtatgcttagtacccagtttacacactgtttataaggattgtggggtgggggggcttgtttgaggaggggtgtgcttgttgaaagaggtgtgtcactaggggtaagctttaaggtttcagtactctctgtggatcagtaagtaaatctctcagctactgcttcaggcccatgtcggtgtgcttgccaccatgatgataatgggctaagcctctgaaactgtaagcaagaccccaatcaaatgcttttttaaaataagagttgctttagtcttggtgtctcttcacaacaatggaatagtgactaaggcaattacctgtgtgagaacatatttcccatagaataataaaagagaatacttacaaaaatagctatatggtccagctgtgagatacttagcatttatgaaccttcttttccctgtgtaagttgtaaatgataaagccaagcatttcctaaacttgtgggctagtatttacaaagcacttgaactgtacctagcacaaaactaatattgtatgtccttgctgaacaagggaacattaaagagggcctgtaatccaagctactcaggaggctgaggcagaggaatcacagatcaatgcctgtttgggagagatggagttaagacagcctaagtaacttaacaagactttatctttaattttagaaaggaattaggctgtagctcaatggtagagagtttacctggcatgattaggccctgggttcaatccccagcacctcagaaagaaaagaaaaaggaaactaagatggaaaacatactttcacttggatggaatggcaatgataatggaagcccgtggtgataatggaagcatattttttctcctctctcctttacattttttctatccaatccccattaccagggccttgtgcatgtaaggtaagcactaatgcactaagctacattccaatctttgaaatgatatgtatagatgtgtatgtgtgcatggccatgtatatgcaggtaggtgtgtgtgtgtgtgtgtgtgtgtgtgagagagagagagagagagagagagagactgtgtggtgtgtgactgcatgggtcaacctctgctgtcattcctttgtagcagcaatccaccttgtgtttttgagacagggtctctcactgagatttgggggtcactgatcagcttaggctagccagcaagaccagggattacctgtctcttcccctctagcactgtaactgtgcatatgctaccaagcctggctcttttccatggggccaggagattaaactcaggtcctcatacttgtatgtcaatccctttactgccagcctcttcctccaatgctccctccatcaattaatccttccttaaactatagtttgagacagattcttgacatgttacctaatctggcctaggactctgaagtccaggcagaccttgaactttccacccttctgccacagcctaccaagcagctaatattaattactgtgttgtaaaggtgtcttttagtcttttgtttaaatgtcaagtctccgaggcttcttgtctcagtctgctaacctaggcctggtcctgaaactttctagtctctgttcaaccttatctaggcctaaaatgtttttagcctctgagacttactgctgaagaagctcacccttgctagttatttctgggctctgctggctgattcaactcagctgcttaggctcaaatttttctccaagctggctgatttaatatggcttctctcagtttctgaattgctctgcttggcctcatactaactttggcaatttgttgtaatctggctccttctcattctctgggtctacctgtttcacctggtctagcttgttctctctctgcagcctgtctcagtaaaactgtcctggtaaaaaataccttgtcctgtatgcactgctctctctctctctctctctctctctctctctctnnnnnnnnnnnnnnnnnnnnnnnnnnnnnnnnnnnnnnnnnnnnnnnnnnnnnnnnnnnnnnnnnnnnnnnnnnnnnnnnnnnnnnnnnnnnnnnnnnnnnnnnnnnnnnnnnnnnnnnnnnnnnnnnnnnnnnnnnnnnnnnnnnnnnnnnnnnnnnnnnnnnnnnnnnnnnnnnnnnnnnnnnnnnnnnnnnnnnnnnnnnnnnnnnnnnnnnnnnnnnnnctctctctctctctctccctccctccctccctctctcactctctctgtctcttttgttttttttttttgttttttttgttttttccgacacagggtttctctgtgtagccctggctatcctggaactcactctgtagaccaggctggtctcgaactcaaaaattcgcctgcctctgcctcccaagtgctgggattaaaagtgtatgccaccacgcccactgcactgctctcttaagcagcctccctttcctctcttcttgtgagagttggtcagactctctcaaatctttctctgattcatcactttgtctgctactcaattagacatcactttcaaacacgtgtacttcctacttcaaactaactttaccctcattgtttgggattaaaggtgtgtctgtattccagccagagggattaaaggtgtgtgtaaggcagagccatacaacaactagaaagagggcttttcagtaaataatacaatctcgggattcacagtgtgatcaaataccctgcaacattatgtctgtacttttaagacaagaataaaactggtggagtctaattttccaattttatatcctgtgaaaaatatataaggtcaacacacacacacacacacacacacaaaagttttggaataaaatttatgctataagaaaatgtactggtttatctgattaccactctgttttctgcattggcatggaaacttggccttactcatccaccatccaacactttgaactcagagtaaagccttagcaatggtaggcaaaattgccctggggtgtgacaccaaatgagactgtggaacagtggattgtcatggcggtgtcaagagactcattgagtcttcctaccctcaagtgtaaccatgcttctgtgatgtaaaggagcagatgacatgtgtgtgagggttttgctatgtgaatgtggaagtcgtaggtagtctttcactatccttcatgactttctttgcagttatggaatacagagcatgtcccatcaatggtcctcccagccctggaaaggacgctaaaggccctcaaactagattacatagacctttatattatcgaactgcccatggcctttaaggtaagcctaagtacctaaagtttagagctctatttcatattgatcattctttagtagcactgaatgctataatgtttgctaccatagatgggaggatactgaccttgcctgacaaaaaatcaacagataatgcttacaggtttgggcccacgtttctgaactcaatgcggtttctgtgatacatgttttaacaactgtagttttccatcaaaataacacggtgctccacattttagttgaacagtatctagacatatccatcttcgaagcccacagccataaaagtgtcttcacatatcacagagcaaagtacataatataataataatttttaaaaagtcttacctttcatccccatcaacaggagacgactaaacacagggatcagatttgtgacgccaaaaccaaggcggagtctgaggatggcatttacttgtggaattcaagtacagtcctcttggcactttttccatctatagatacactgtttacttaacactctgatatatacagttgctgatgctttaaactttaattgagagaaagagaaattatgaaacagaactggacttgggagagtggacccttcaccttgcctgggcaacacagtaaaactggttctggtagaggggaagtaggtgaggcagcccagagagtgtgagcatgagagagctgacccagcccctcatctgctgtgcactagtgtgatcgaggaaaagatgtctaaaacacacacacacatctgtggcaggcaggtgagctggccttgctcctcatcagatatagcacttgaaaggactggagagtgagcccagacccttgcctgggcagcacagtagatttggccctggtggtatgtgtgagggacagctggtcctgctggcaagagcacaggagaatggctgggctggcccactcagctaccacccaggcccagattcaggactcagagttggcccacaccaatatcctccttgtctatgacctactgcagcttgtcaaggggtcagtcctgcagatccaaatctgcaggatctccatgacacagggcaagaacaagataaccgagaggcgtccagtatcaatagcagaagccagagacctcgaaccagactcatgacttacttaacatttgcaagtatagctgtgtgatcaaagggtgtgctgtgggatacactgcagcttccttggcgagagtgcgatacactctgcagcttttttggtgagatggtttttgttagcttggtttttgtttgtgttttcttttgtggggaggttgcaagagtgagggcagatatgaaggtgatggggagatgagtgagattggatgaatgatgggaaattcacaaagaatcaataacaggtataacaagaaacaaaaacaaacaaacaaacaaacaaacaaaaacccagcaacccagaactgagtactaaaatgctaaagtgacaggccagtggttaagcctgcttgctgcttttgcaaaggacctgaatttgattcccagtgccattcccagcagcttacaggcatccgtgaatccatctccaggggaccaggtgctctctttggcctcatgaatgtgtatatacatacaaatggaaataaatctttttcctttctcttataatttttgctttttcgagacagggttactctatgtagccctggctgtcctggaagtcactctgtagaccaggctggcctcaagttcagagatccacctgcctctatctctgaagtgctgaaattaaagacatgcaggaggcacaagcctgtccttttaaaacaaaggagccaaactagttagctgtccgcagattgaatagcatggcacagctccagagaactttgtgtctcagtggctaacatagtttaagcaatcaatcaatcgcactgcccaggttctgctttgctgtgactgtcctctgaagccaaggctgggagggactctgaagacattttcccttttgtgtggaggtatgggcttggtgtctttgcaacagcattgataactgtacacttttagtcggatgaggatttaacaggcaggacaatatagatttgtttcttcccctcaacttctcccatgtcctcaatctacctattctcaaatttactacctcatcattcataggtatatacattcatgtatgtgtgtgtgtctgtctctctgtgtgtctgtctgtgtctttctgtgtgtctgtccgtgtgtatgtctgtgtctctatctgtctgtctgtctctctgtatctctctgtgtatgtatctgtctatctgtctttctgtttgcctctctcttttgtgtgtgtgtgtctatctgtatctctgtgtgtgcctgtctgtatatgtgcatgtgtgtctgtctgtgtctctctctgagtctgtctctctgtgtatgtgtctgtctgtctgtctctctcttttgtgtgtgtgtgtatgtgtatgtgtgtccgcgcatgtgtgtatgaaacctactgactccagttattattgcctttatttgcatgagttttggggataaccacttaggattgggttctcatcacttaaaaaacaaacaaacaaacaaacaaacaaacatctggttctccctccctcagctgccactgactgtctatagctcttcgtctacttgttaggcctgatgaaattttccttcatccatgtcagcctgttgaatgatgtggtcttgacagatcttttttttcgccaaaagatttcttctctctcctccatgatttgactttgtcaagggagcaaaaacttcgttgccttgaacttcagataggatagattgccagagcaccgacccagaaagtcctcattctcagccaccatgctattctttaaaaggtacacgtggctactgggaaaggctgaggaattcaggcaaggtaatgaagtcatgtgccaaatgcattggacaaatggagctacctggagactcccgcaaagggaaggttgtattaactaaagatactaactatatctagagggcaagaggcccttgtgcacacagattagcactggagaagccaggaaaaacgaaacatgcaggctcatctcatcaaaggaaaaatatgtctacccgtcttcctcccagaatgctgggaagactgtggttcacagcctagtgacccttcactgtctgtagagccaggcttcagatgtagcctccaggatttatgctttgtttatcccagaccctttcccccaacgcttgaatgttgtttcaagtctatttattaagcccctccttatgagagacgtcacgtcactcctattttacagcagcctaagtgatgtctatgatatcttaggccaggccaactctggcactgatcttatgcttacctgagtcagtcattctcccaaggccctaagcctggagcaactgtttctgagtcaacagaacctatctttaaggacgagcctcaaagcaaacatgtcttacgttttttttacacttgagactgagttaattattatcagtgataattattataacaccaaacttcccccaccccccaaaccatcggtgtgcttaaatatggctaaaacaaaccaatttggtgtcagaagccaagaagcttggctcagcaccgcggagtcaggctaaacggagtttcattcttacctcttgcctggatcgtttctcggctttcaacgatgcttgcagggaccctcccagctggcaccaaatgtggggcacacaacccttcgagaaggtaagaacatttttttctttaaacagggttccaaggtttagtaaacttgggcctttcacccaagcattgtgcccatggaagtgagagaatgaatattaacacaagtttcctctgtctattgaaacacagcattttgtacaattattgagatatttgtcaagatccagaggagcaaattactcagatcaacagctctgcacatgggaagaatacaaagagaatccacgtaaagagaaattaaaatccctggctaactcttttccaagctggagtaaggtcttgcttaaaccctctcaggagagagagagaaagaattttctactagaaacagatattggcagttattagcagagcaggcaaagtcacagagtcacctcagggctcaccctcctgagcgatgacctggctagagctcaaagttctctgcctgcactgctttccacatagccctttccacagccagatcctggtagtgcagagcaaaatccaaagtgtgaaattccaaagagtgaggtggggggtggggagtgtgtgtgtgtggggggggggggctctattactcccactatgagcggagactctgctgcccggggcttagttttactttgcttgtctctttgtgtgtgctttgtttgttttccctcacagtgaaaataactcagtacagactgatcaatagtcccttcatggagaaaaattaaaacaggcccaacttttagtgcagcaacaattgcaaccaagtctaagtacctaagcctgtgctgactaaggttcctaaaggctaatggttgttcactgctggtctaatcaacacttaaatgagtgcttaacttgcatggtaaataaaccaagagaagaaaatgtaaacgcagctccagataaaatacaaaagcaaccaccttataattatttaggatgcattactctacaacaaatttgccatcagcctctcagtgtaaaacttcccaacaatgtactctaagttacttacaaagtatgtggggccctatcaaattgggtgtatccttacctgcctgtcactactaagaatttggttccaaatcaccccctgctacggaccaccccagtcgggtatgggggtccctggaatgagggtcctcgaagctaggtgggtaaggatgcagcggtgacaaacagaaacaaacacagaggcagtttgaatctgagtgtattctgcagctctcaaacaggggattttatacattagaacaccaaacattacatctcttagaaactatatccagtgaaacaatcacagataccaacaaaaatcatttggcacagtaaagcacaaaaatcatccaagctattacaactctgaaactatgtattcagtgaatcacaaacagaacaggtaacatcattataaatcatcaaaatataacaattctaaaaggaggtattcagtggggggaggggagggctgtcgtccaaggctagtggcatatttctaggagcaggttaataaatctttaacagcctggacactgagggacaccgggcaggtggctggcaccatgaagatctggacttcggagcatgtctttgaccatctgtgagaaacagttactacaacagcaatggagaaatacccaaaccccaagaacaggagtacagttgatgttgatgtgctggacagacacagccacaggctgctcagcacagagtgggacctgccttctattgtgaactctcttattggtgcagcaagaacgaaaacgtacgtgcaggagcattctgtagttgacccggtaaagaggacaacggagctcaagttcaccaaacatctcatttacaaatatggtctcaggagatgagaggctcacatacaagacacacccacaggacccagagaaaactgtcctgacccaggaaaccctcatcactgggaaaagggtcagcttcagcagctaccttgaaggactcatagcaagcaccatatcttccaatgttaacaaaggccaagaagcaatggagtgggtaatacataaactgaatgctgagattgaggaattggcacatcagcacgagaaagcataaggacaccaatggcggtggcggcagcagtggcggcagcggcactggtggacaaatgacaatggaaattggtgtgcagcatcagggccccaggactctcaagctggcatcatattatttgttatttaaaagacacaattatttttaggtagattttttttttaatgagctggaataaggctgtgacttttgatcaaaagaaaagatccagaacttctaagtcaaagggaccatctgaggttaggatgtaagactgggagaggctatgttcatgtgaacaattaatgggtttgtttgttgttgttgtttaagtacttagaagaaattggtgttgatctggagtctcttaaagctccaggtactggaacactacctggctgtggaccaaccagagcagaactcagccgtcctcctgtccacacagttgcccgctgctatgaaccagaactgcccgaatagaggaactcactctagaaacagaaattgtaaaatttaaatcacattaatttgtataaaacaacctgccctgctgggaaccagtgttgggatttggtacttaaatgatatttttggagtgaaaattagcactaaggtaatatatgactccagcaaaaatagtattttattgtattaatgggcactataatgatttgccaaattttgtgacttagtaaaggcattcccttccttgaaaaaaaaatctttaatggtcagtactcttaatcgctgaactaactctccagccccatggtcaattattatttaatatctagtgcctgatttttttttataaatcttcaatgtataaatttaaactattttaattctttctaattaaggctttctttaccatttaccaaaatccacctccgatgacccacgtgtagtcatgtgaaattttattgttgggaaagttttaatctatcataatagttttgtaaatgatttagaaagtaaagtgttggtttccctggggataaggtcatgttagtggccccatctctagggatggtttcttacccattattctcacttaagatcttggcctaggctaccaggaacatgtaaataagaaaaggaataagagaaaacaaaacaaatagattgccatgagaactacggatcaatagttttttttctccagcgaagagttccacccttttgaggtcaatcacctcagcctgtagaacttgtcacacagatcctactggaggtggtgtggcaatcccctttaaaaattttttttgaagataccctatgggtattacctaaaatgacatctaaaaatcctatagagatttctcctagggcttctccaagaagcatttatttatcttttatatacaatttcacatgcaccacagaaaagattgtgcatactctaaactcagtgtattcagttgacttttattatgagacatttctcagccttaaatactttaactcacctcttgtatagatttgtacataaacgatgcagatacactaacagtgtaatctggcctaacttgaaaggaaatgaatggatgaaaaatctctaaggcttttctactttccattcttaaaaatcttctaactttaaactttgtatcttaggatttgtaagttcattggacatgaaaaaatatctgtaaaatttgtaacaaaagctagcttaaaacttataacaaatgggactaaagagatggctcagtggttacgagcactgactgctctttcagaggtaggtcctgagttcaaatcgcatcaaccacatagtggctcacaaccatctgtaatgggatctgatatcctcttctgatgtatctgaagacagatacaatgtactcatcatatatataaatcatcatatatatataaaatgaataaataaaaccttttcttaaaaaagtttttaagaaaacccataacaaatggttaatagcttagaaaaatatattcacaggcagcacctataaaaggtgtcattcctactgagcctcctgcctgtcactttatgtcctgtttagactaaggcgaccacacaggcctgcaaaatactttggattaggatgaatttttatataatgataaattcctaaggttataaaggtcttctcaggttaacaaaacctgacttagagatgtatatttaaccacttaggtctttgctaactgttcaacattagacttcaaggaaattttaaataagaaacgtcaggtatttgataaataagttatatctgataaataaggtttataaattcctaagatctagttaggctaacaggaactgacttaaagatcaatgtctagcctcttgtgtctctgctaacttagttaatttaagctttagctgtttggatgacagagtcattaaaaaaaaaaaaagctgatattcggtaacagtgctttatgaacaagtcaaaagctaaagttcctagctctctaaagactgtatttatggtttaaatttgtattttattttttttgatgctaaaggattttcaattaaatcttaaatacaaattattaaggctcaaactcaacaggggtaaaattataaaagctacagacttgtaaactattaaagataattaagaaatgaaagttaattttctggcacttaaaaattatcaaattttgcaatgtgctcaaaactgtacttgtagtcatactaagtacaaatgcaattcattacacaggggaaagcttcatttagcatcctgaatatgttttcaaggtaaagcctaaagcaataattaaaattataatagtaataataataatgataataataataaagtttgtttatacaggcagtttatcttgttgacaggcttcaccctaaaagagataactcacaaaacaggttccaatataagtttttactatttctttatttaaagggattttctttgctataggtaaattttaaaaactactatcggaacatgacagtaatcgtgaactgctggcccctctgtctctagagaacactagcagaaaaggcctgtggatgggaaagccagaaacagcctgactcagttgctcaagagtaatcttggttgttaacaatttcttggcatgtgttgctttactgtgtcagatttttctattatcatggatgctgagggcaagaggtccttgtgcacacagataagcactagagaatgcaggaaagttaagcataccgcttatctctcctcaaagggagaagatttttacctgtcttcctcttggaaagggtatagtttataacctggtcagtttttgctatctgtagagccaggcttcacccataccccctagaatgtatgttttgttaatcctagacccgtccccccactatgttttgatcattgctttggagctaacagaacccatctttatagaagaagtcatgtgtgtcttgtaaagagtttccatgtaaatatatcctaagtttgttgtaacttggaactgagttgtcatcagaaaacttttttttcccaaaattgtggtgcttaaatatgactaaaataaaccaactgatgtcagacttgaagaagttcatcccaacacctgctaagttgggctgagtcaagtttcattcttacctcacctggatcattttcctgccagctgtgacacgtgcagggacccccacaattattaaacatcatattctgtatagttacatattatattattaaaaagatacagtaatgtataatatggtatataattttatgaaatatacatgttttctatatcataatatgttattagacgcgttctcacgcctggccaggaagaacaccacagaccagaatcttctgcggcaaaactttattgcttacatcttcaggagcaagagtgtaagaagcaagagagcaaatggcgaaaccccatccctttttaaggagaattatcctccacctaggatgtattactccctgattggctgcagcccatcggcccagttgtcatcacgggaaaggcagaacacatggtgggaaaactgcccctgcatgtgtgcagactatgtttaccacttagaacacagctgtcagtgccatcttataatggcaaatgtgagggcggctcctcacagatcccccttttcttttaataagagcaataggccacccatattaatgagagtggagatagaggtcaaatccccagtgtgtaggtaaaggagccatgtacaggattagctcttaggctcacaggcttttacccagagcaaccctgacctgctcccgtgtcgttttgcctgggggaagggaactaggacactgaaccttcatgaaagatgacatgtctccctagaataggctcatatatgccgcagagcctttctactgcagtgcttagccttgcaactctctcgggctgctgaagcacactcactctatcccgtgcaatgagactagcctcatgggaatataagagctgagtggccagcgacctattgcctaagcatagataaccatatatcagggggagcaccatgttctagagctgcaagcgcctgggcaataaccaccttgtctctcctagtttgggccttaagcttacagaccaaccaaagaagcaacactaatccacagcaaagtgtatctccacataatcccacccccatccattctttaaagaaggaaaatgctgaggagatccaattgggtaatcctttgatcaggggacaggtccaagcgcttggagttgacctgaatgatggcaagtnnnnnnnnnnnnnnnnnnnntcccggaaacttttgttcacatccctgctgagttatttgtcataatacatctagttgtatctggacaagatctatgagttgattaaccagcatgagacctctctgtactgggccaaataagttcatttgctcattaatggctctgaggtcatggagcagtctccactttcctgactttttcttaattacaaaaattggagtattccaaggtgaggtagagggttcaatatggcctaattttaattgttcctctaccagttgaatcacagcttctagtttttcagaggataggtgccattgaggaacccacactgggtcccctgttttccatggtatgggtcgtgctgccccaatggccgctatggaaaacccagaccctgtctgtcttggtttccattaggtaagataggctctatccttccctgttcttgatgtcctaacccttttccttctttataacccatctttgccatgatattttttgctttagttgaataccctcccgatggggcgttttcattggacaaaataaggcccaaatgctgcataatatcccttccccagaggttaaccgggagtgggagcacataaggtatgaatttcccttgctgcccttcagaggattcccacgtcaaggcaacggagcttatagtgggacatgattgatatcctaggccctgtaatgaatgagatgactctgtggtgggccatgctttgggccaccaatgtgtagatattatacttttatctgctccggtatcaaggatgccttcaaactcttttccattaatcttaaggcggagcttaggtctatcatttaaagatacaaccaaataggcagaatcatttcctgaggagcccattttctttatctcaggtcctgcagatttctccctggtattatcagggaggagcagcagctgagctatcctatctcctttactaatagaaaaaacgcctttagggcttgagcacaggacctgtatttcaggggaatgttgacaatccataactccagggtggactactaagccctgcaaggtgagtgaaccccggccgagaataaggcccatggttccagggggcaaggatggtataggctccacccttgtgggtcttcctgggtcgcctctctgactgcggaggaaggagtctgccctttatatccctcacagagcgacactggtcggctctatgataacccttgccacacttagagcaaagagtgagggtcccccgctgtttatctggagctctgcaatctttcttaagatgcccaggcttcctgcagttaaaacatgtcctccgatcatttctgcccatggagcatttttgggattgaaggatggcagccgctaagcctgcattggtgagaggtcccccaagctcccgacaaaccctgagccagtcttgtaaacctttgttctttcttggggctatggctgctcggcactcctgtgtggcttgctcataaatgagctgttctaccagaggggcggcttgctctgaatctccaaaaatacgctctgctgcctctgtcattctggccacaaaatctgagaaggattcctgaggtccctggattatctttgttaactgaccagtggtttcacctgctcgagagagcgccttccaggccctaatagccgtggaagaaatctgggcataagctccccaatggtagtttgtttgatcagcagaataagctccctgacccgttaacaagtcaaaagtccaatctctctgctctggagtcaaagcagctgcgtttgctcgggcctgcgcttgtgcagcttcgtgccaaagcgctctccattccatatatttgcccatactagggagagcggcttttacaaccgtttgccaatcaccaggagtcatagcgtgattcgcaagcctttccacttgtgctatagtgaaattagcactgactccatagttacggaccgactcggcaagctctttaatctgtatatacgctaccggagcgtggacacgcccaccctcggctccttcaaagaccggaaatgcctgttgtattttcctttgttcctcctttggaatgaacgagtctgtgcattgcctctctgtccattgcctctctgcgcagggctgatgcactacgcagggcgggggctcagcatagggtggaggtgcactatgaccttgaagccgactgccaagaggccaagcagcaagctggcctttgccagccgcttttggctttttccttgaccgattagctcgcattttatctggctggtacccttttccctcataatgagctgtttcctcctccaagtctgtttcttcagagaagctaaattttttatctgattcagagctactaagaactagctccttaaactcatctagtgatgggtataggctccttctcctagaaacctccgctgattgatcttttttcttttcccttttccctctttttcttctaatctctctccaggtattcctacctgaccttaacttttcctcaggttcaagacccttggaaaggcctgtatacttattttgtgcaccatatttcctctttgttcctactctctctccccgctttacttctgatagcttgtcctgaatttcctctagaatccgccctgccttaaccacttgataacatgtgaaaaggaacaaaagggcttttaacactagaaaaagttcaaggccaaacataccttataaagctattttccactttacttctgatagactgtcttgaatttccttagaaagttcaaggccaggcttacctcgtaaagctatactcactggtactctcgttccccagctgaaaagttctgaattcatacagttgaatccttcttaacagtctgctttacgggaacctttattaccgcgacccgcagttctggttctggaatgagggatcttccttgcgccagtcccgagttttttctcgtcccgggtttcggcaccaattgttattagacgcgttctcacgcctggccaggaagaacaccacagaccagaatcttctgcggcaaaactttattgcttacatcttcaggagcaagagtgtaagaagcaagagagcaaatggcgaaaccccatccctttttaaggagaattatcctccacctaggatgtattactccctgattggctgcagcccatcggcccagttgtcatcacgggaaaggcagaacacatggtgggaaaactgcccctgcatgtgtgcagactatgtttaccacttagaacacagctgtcagtgccatcttataatggcaaatgtgagggcggctcctcacaataatattatatgtacatataatatttactagaaaagcatataaattggtaaacttgatttgcaaggccacagcacattggcctgttgacaactcaaattatctatttttaattcttaagtctaaaataagtgttttgtgttttacagcctggaaaggaaatttaccctagagatgaaaatggccgaattatatatgacaaaacaaatctgtgtgccacgtgggaggtgagttcatgcgggcatctattgtaaaatgtgggtagctattgtaaaaggcctacattttttacctacggcccctattattcctacacaagccctgagagctgaagtcgttacattcaataacaagtaacagaatttctagccacatgtgcagactatgaaacctccccttgaaggtgctcagtaagtctttcttttaatcttgaagtgtgtgtatgtgtgtgtgtatgtgtgtgtgtgtgtgtgtgtgtgtgtgtgtgtgtgtgtgtgtgtgtgtgtgtatgcttgcacacatatatcgagaattgtactcaggtcatcaggtttggcagcaagccttggtagtgaagaattcttaattcttactgaagatagtaattatcaggaatggaaaaggaaacagagaatgtattctactaaaatagtactttaaaacataaatgagataactcactagcttaaaattgagttttaaaaattaatgtgatgtctaaaagaaattaaaaacagctcatgtaaagctaagaattattctagttccatttgtggaccatccactggctcttttccctgggagtgtatgagtgggaaggctcaagaatgtaagaaaactgttgtgagtgtatgcagagaagggatgttctactggcctggggggtggattagtgctgatggtttaccctgactcagcagtttacctctccctgcctttactccagctctgtctgccaagccaaagccaagaaatgaggatgagtaaggatttctgtctatttctttctgggggtaacagctgatggtgtaaaccacagagatgtctggaggtttttctgatagccatggcctgtatccaaaaggaaggaagtgagggcggggagggacacttcctttattgttgtgatgaacttgggaatctggtcctcagttatatcccaaggtaagcagaacagaggaccaagaaggcttttgtcttaaaggccttaaaaagagaagtcagctacacaaataaagagcaaaaacaaacaaacaaaaaaccaacttaagcaaataagtaaaaatagtaacaaggaaacatttaaaaacacattggggatgcatattagttagaaaaaaatatagaatttttttctatttatttatttttttattaggtattttcttcatttacatttccaatgctatcccaaaagtcccccataccctcccccaactcccctacccacccactcccacttcttggctctggcgttcccctgtactgaggaatataaagtttgcaagaccaatgggcctctctttccaacccttagtatgaacagcagaaaacaaaacaaacaataacaacaactaccagttcaagatgaaaggaaaagctaagcaatagaaagaataaagttagaattcccagctaagaggacagaaggacgaaaatggcagtatttgaagaaggaaagatcctaagtccggaaaggaggggaaagaaccccacccatgcctgcgtggagctgggaatgggcctggggcctcaggaaaacaaccgcgtcctctgagacgttgcagcaacgccgagcactttacttctgcagaaaggggcgggcgctaaaccaagtaaggaatcttagcagcttttttcctggctcagagggtcctgtgcctccgctgatgggtgtggccaggcccggcctcacattctcatgtgattggctgacttaaaagttagtgagcagctgataagcaggacccagactgacacagaaagtaagcttgaacatatattttggtttcaggaaagtgctgacttgagaattttttattttattattattattattattattattttgctaagcggtacttttacagttgtcttttaaattggtgttttccttctcttatttactcctttgacagaaaagacaatatatttctttcacatttcctacaatggttataatgtggtttcagaatatcaaggagacatagtaggtgaaaaaaattaagcctctcagaatatagtaaatccataaataaagtcaaataatcgaaagtcatcaactgaaaaagaaggcacagaaagaaggggaatgaatgatgtaaatcagaaaataaatccccatcaggaagacgtagtgatgccaataatcatagaatatgtgcagtgtaagctcctcaatggaaaggtagagcttgccagaatgtaggaaaccaagtcccattgtgtgtgtgtgtgtgtgtgtgtgtgtgtgtgtgtgtgtgtgtgtgtgtgtgtgtgaaacaactttaaataaaaagacagaagcatgttaatagaaaaaatacattaggttagccttaatctggagaaatctgggttggctatttcagcttctagaaagcttaggcatgaagaagcccaggctaaaacaacagaaaagagaaagtaagcagtccgtgtttgtcagtggagatttcaaagctgcttactaaataagaaaataactacacataaaatctgtgggatttatgagattcatgtgtggtcaaccttttgacataattgactcccatagaactctccacccaaattcagcagagggctggagacatggcgcagtagctaatagcacttgttcctactgtgatggacccaggtttggcacctaacaaccatctataactctaattcaagaggatctgatgccctcttctggcctctcatggcactgcacacatgtgatgctcagacattcatgaaggcaaattacctatactcataaataaaaatgaataagtctaaaaagaaaataaacaaacaaaaaccagaacgccagtttttagtacccatggaaaatgtaacataattatgttttctcatccacaaaatatctcagtaagtattctagttatgcaaagtgtggcatcttattaagctgaaattaaatctgaaaccaagaacaaaaagatatctgagaaaacatcaaatatttaggaacagataaacatatgtaaataattcataagacaaaaaggaaataaaaccaactatatgccatccacatgctagacttacacaattagaaactgaatcttttaaaaaaacaatattaaatatttagatagaaatttgataaaatatgcataagctttcaacattaaaaaactatgctctataactaagagaaatcaaagctctaaataaatggagaaatatacaccatctcttaatattcaatttgtatgatgttaattcttaccaaacttgtccaaagactcagtaaattctagtaaaaaactaaaatcactcattgaaataagaaaaaaaactaatgctaaaatttatatggaaatacaaatatctacaatgcccccaaagatcctagaaaaaaaaaaaaaacagaaaagaaggaggcataatgaggaagcagtgtaggcatgtatgaaatttccaaagaataatttttaacgatttttatttgtttctgcgtgagcatacgccatgcgtggaagcccattgaggccacgagaggactggagttacaagcagatgttagctgtgtgacatgggtgctgggcagtgaatttgggtcctttaggagccatctctgcagacccattaaaaataaacttaaaaatattaattaaaacagaagttgaaggagttacaatagatgtaagagttgctacatagttacaaaaattgcatccagaatcagtggaacagagtagggaatgctgaaatagatccacagactatgatgtcaagatagtagcaggagctcgagcaaggggggagggggtggggggggagagattgccttttcaatggtgtgttgaaaccagctcacaccagcttgcaaaacccgactctgcaaatatctttccaactgcatggtcagggatgtcacttggctggcttgatacagcctagagataaagtgacaccacaggggttgacaaatgctataactgggttgttctttccctgccctggataactgggtgttaaatatttatccgcactccactgcaggtgtttataaatggatagtgtaaatgattttactagtatgtgcatatattagaatctatcaaaatgcattttcttttgttttagtttttataatgtacatctatttggggatggggtgggtgtgtacagcaatattcattcttgccttctgagagcatctttcctgactgttggcatttttccctacaggcattggaagcttgcaaagatgctggcttggtgaaatcccttggggtgtctaattttaaccgcaggcagctggagctcatcttgaacaagccaggactcaagtacaaaccagtcactaaccaggtagattggagtggctttggctgagtggggagaggtatccaatagaactttaaaatgatagcaaggttcctgggctctgcagcaggaggtcttcctggtgctccatagaaatcatagtctaagactctagaccactcttcttttaattcacatcccttaagaaaaagggcccagccgggcagtggtgatccatgcctttaattccagcacttggaaggcagaggcaagcagatttctgagttcgaggtcagcctggtctacagagtaagtttcaggacatctagggttacacagagaaatcctgtctagaaaaaaaacaaaacaaaaataaggatgagaggaggaggaggaggaagaggaggaggaggagaaaagaagaggaagaggaagaagaagaggaggaggaagaggaagaagaagaagaggaggaggaggaggagcccaatacaaggccagcctgggtcatggagcaagtcagaccccaggccaagctatatcatagttcaaggcctgccttgatgctacagagtgagaccctgtctcaaaaaacaaaacaaaacaaaacaaaacaaaacaaacaacaaaaacccacacacaacaagccaaccaaccaaacaaacaaacaaacaaacaaacaaaaaacccactcaggcatggtgggcacatctggagaggcagaggaaggtaagccttgaagccaccctgggctacagaacaagaaagagtgtgtttcaaagaaataaaacaaaacaaaacaaaacattaagctattttgaaagctcaaatccaggcaaatgtaaccaagatttgttttttaaagatttatttattttacactgttgctgtcttcagacacaccataagagggcattggatcccattacagatagttgtgaatcaccatgtggttgttgggaattgaactcagaacctctggaaaagcaatcttaactgctgagccatctctctagctcccaggatatttgttttgcttgtttttgaagaagaaaagtaatgggaaggaaatgagagttgccaaatcaagacataatagagaggatttaaaataatacaaggctcagaaaattaaggaagtaaggtcccttcaggacaggagcttgagaccagcaataccaataccctatcccccaaactaaatagtatctaaagggtggcatgtgacctaagatacaaattaataaaagagaacaaatacttagaggctgacaaaggcataataaaaaccctctccaaaacgaaaccgcacaaactagtgggaaaacatgaatctttgagtagtctgaggaaaatggctgactctcttagaaacaagaagaggtctactgcacagcaccctccaaggttaaaagcaggaatcatttataaatacaatagaaaaacttccagaaagaagtttcctggagggctggagagatggctcattggttaagagcactgactactcttccaaaggtcctgagttcaaatcccagcaaccacatggtggctcacaaccatccctaatgagatctgatgccctcttctggggtttctgaagacagctgcagtgtacttataataaagaaataaatcttttttaaaaattaaaaaaaaaaagaagtttcctggaacaatatgtacaaaaggaagctatggaaaagtcatgaagaaaacttggagcaatgtggaagtactggaagggggactgggctgcagcctattggtggcatgctcctgtagcgtgcacactgtccagggttaggtatctagaactgagaaaaaaactggtaggaacaaagggcatgcaaaaatagaaagtggtgggttttttaatataatagaatccacatagttatgaactaaaagtctaatacaagtggatcgaaatccgtgataggcaaaataaacagatgggaattcacaggaaagtagtcccaggagtatgaaagctaggaaaaatgtttgcctcactgtaagagaaagcctgattgaaatatgatgttctattacctgtaacacattcatatcacacttgcacaggacccaggttcgggtcccagcacccacccaacagctcacaatcatttgcaactccagttctagggggcttgatactgacttctggtctccacaggcactgctgcacacatgtgatgcccacacacgtatgcaggcaaaatattcacatacatagaataaaactaaaacaaatcctatttaaaaccaaacaaagcaaaacaaaaaaacagcctaccaaactttttaaaaagatttatttattcatttatttatttatttatttatttatttatttattatatttaagtacactgtagatgtcttcagacactccagaagagggtgtcagatctcattacgagatggttgtgagccaccacgtggttgctgggaattgaactcaggaccttcggaagagcagtcagtgctcttaacctctgagccatctctccagcctctaccaaacttttgtttcatgagttttaacaatgctcttctaagcaaaggacatagtgtcaatgaatcaatgagtgccactgttcagcctttctggatagctattcctatttgtggtttttgagtttttccactgtgtttttatttgtgtgtgtgtgtgtgtgtgtgtgtgtgtgtgtgtgtgtgtgtgagnnnnnnnnnnnnnnnnnnnnaaagagagagagagagagagagagaaagaagttggttctatcttcctaacatgtgtttcccagggattggaactcaggtcacaaggccgggtggcatccacctttacccactgtgtcttctctacagcgcctgaatagcgttctaagctatgtgaaacttcttttgatgaagcctgagctttgttctcttccctaatgtaaccacacaggtggagtgccacccgtatttcacccagacaaaactcttgaaattctgccagcagcatgacatcgtcattgtcgcacatagccccttagggacctgccgcaacccatcatggtaagtcatgctatattctcatcaagaaatgtctctatgaggacagggcagaaaaccagtgtgaattagctgagtaggagattgtctttggctgtgggatcgtcaagaaatggcctgttcatgtcaagttccctgtaaacagatgaaaactcaccataccttccttactgaggggttgacttgttgagtacactcaatgtatggcatttccaacggctgcctgataagtaagaaacattcagtagatattgaggtatgatgggacagagtttctgcggttgcgttctgaaagcttttaagctgttgaatttgatacatggtggcaagacctttgatggaatcaaggagctttaggaaaatgtctaccttgattgcaagagttgagctactttcttctcttctggtctttttgcctttccctatatgtctacttcagaccaagctctctgtaaggttcttcatgctataggtacacacatgaagagagagagctttttgtgtgtgtgtgtgtgtgtgtgtgtgtgtgtattatatacatgtctattatgtgtcctctgaatcagcccgatccatctgcctctcttgatcttatgctagaacacctcttgattccatgattggttacactcagagaacttgactagaggtgacttgagtgtcctggcagtgaccagtgaatgagaacacaccagcaggtgactgatggctttttgcctttcatctaaagatgacgtgcattttcttttcttccccaccgccccaccctgaagggtgaacgtctcttctccacccttgttaaatgacgaactcctaacctcactggggaaaaagtacaataagacacaagctcaaattgtgttgcgtttcaacatccagcgagggatagttgtcattcctaaaagctttacccccgaaaggatcaaagaaaactttcaggtaagagacatacctttgaactaatggagagccggtgctgactgctctgacaccctggagagtgttctgaatattgtgatgaccctcatctagcacagaatcaatctcatgtacaccccttctgtgtcctgcatgtccaacactcctctgcctgtgtaactcccgccaaacagacatactccagacttgtagactaaaagccaatgtagactttctgtggctgtttccactgctctcttcctgtttaaggcagcctcttggaaaggacatctcctctccgttcacttctattattttagacccattaaaaccgaactctcaccctggctgtcttggtgggcagcttttctgggggccaccaaggacttgtgagttagcagatctgggacttcattctcagccattgtggggtcatggctttcatccacatttagtccagttgacatgctctcccccttggaacatttgctctgacaggaaactatatgatatggaagttttgagaagaaaagcaagagcttgggtggttggtgtgggtttctgagagggtgaaatgcagtccacattggcctcaaaccttctctgtagctaaggatggctttgaactcttgaagcttctacctccaccttccaagttcccaggttacaggcatgactacctggcagttagtttaattttatagtatgaaatctccacttatgtaagataatttgtgccatgaagtaaaaaagactacagaaaaatcaattcgcactgaacaaggagaaatagtgattagaaacaacatagagagaatgtgaaagttcatattaggttaaaaaccataatttataaaagtggacttatttgatttaggtcccagttacttatacatactgactcccagaagaaacagaagcactgctacttttataaaaggcacttgacaaatttacatgatagtgtaacacagaagctgtgtttctttttctttacttatttacaatgctaatgtatatccttttgttttaggataaaatgttctgtagatatctgttaaatccatttgtttcataacttctgttagtttcactgtgtctttggttagtttctgtttccatgatctgtccattgatgaaagtgggatgctgaagtctcccactattattgtgtgtggtgcaatgtgtgctttgagatttagtaaactttcttttatgagtatggatgcccttgcatttggagcatagatgttcagaattgagagttcatcttggtaaattttacctttgatgagtaagaagtgtccctccttgtcttttttgataactttaagtttaaagtcgattttattcgatattagaatggctactccaccttgtttcttgggaccatttgcctggaaaattgttttccagccttttactctgaggtagtgtctgtctttgtcactgaggtgggtttcttgtatgcagcaaaatgttgggtcttgtttacgtaaccagtttgttagtctatgtctttttattggggatctgttgatattaagagatattaaagaaaagtaattttttttcttcctgttatttttgttgttagaggtaggattctgttcatgtggctatcttcttttaagtttgtttaaagattactttgttgctttttccaggacatagctttcttccttgtgttggagttttccctttattatcctttgaagggctggattcatgggaagatattgtgtaaatttggttttgtcatggaatactttgttttctccatctatggtaattgagaattttgttgggtatagtagcctgggctggcatttgtgttctcttagggtctgcatgacatctgtccaggattttttggcttttatagtctctggtgagaagtctggagtaattctaataggtctgcctttatatgttacttgacctattttccttactgtttttaatattctttctttgttttgtgcatttgatgtttttattatgtgacgggaggaatttcttttctgatccaaactatttggagttctataggcttcttgtatgttcataggcatctctttctttaggttagggaagttttcttctataattttgttgatgatatttactggccctttaagttaggaatcttccttctcatatatacctattatctgtaggtttggtcttctcattgtgtcctggatttcctggatgttttgggttaggatctttttgcatttcacattttctttgatttttgtgtcaatgttttctatggagtcttctgtatctgagattctctcttctatcttttgtattctgttggtgatgcttgcgtctatggctcctaatttctttcctaggttttctatcaccagagttgtctccctttgtgatttctttattgtttctacttccatttttagatcttggaaggttttgttcatttccttcacctgtttggttgtgttttactgtacttctttaaggcatttttgtgtttcctctttaagggcttctacctgtttagctatgttctcctgtatttctttaagggagatatttatgtcattcttaaattctttgaccagcatcatgagatattattttaaaccacaattttgctttttttttttcctttggcgtgttggggtatccaggactcactgtggtgggaatactgggttctgatgatgccaagtagtcttggtatctgttggtaagattcttgcatttgcctttcaacatctggtaatctctggtgttagatgttcttgctgtctctggctggagcttgttcctcctgtgagtctgtaagcctgtgtcagaactcctgggagaccaactctctcctggcaagaccagtgcacagagggttacagaacagacccacctcttgggtgcagatggaggcccgtaggaccctgtccctgctgctctgccactctgccacctgtgcacctcttgaataggtcaaccttagagagtcaccggagagaaaatggcaatctcacctgagtccctgagtcagacatttccagaagcctgtatttcatagagtcttttgtagaatcatcctagaaagaataattttcatctgaaaaggtgctttaattttggctgttcttttcttcaaattagatatagagatagatatttataaatctatagatatattgatatattaatatacctgccaaagtagacttttaaatttggtcttcttcttatttgggaaatattgcatctataattagaataaatcttagagtcatctctcattattaattttatgaaatctgtgacctcacaaggtctgctgcagtttgtcactaggatccacggtagagtcacagactagcctattgtgtgtgaaaagtaagtggaaagacccctcttttgagctattagtttgtttggcattgggtttatgtaattaaattttaaaaattttattttattttattttatatatgtcagtgttttgcctgcatgctaatatgtgcactatgtacatgcccagctcctatggatgccagaacaggatgtcagatcccctagaaaaggagttatagatggtggtaagtcagcacatgggtgttgggaatcgaacttcagtatctggataataaataatcaaagaaaagcatcctctgaaaagaacagttagaaatgatctatagaggagcaattaattaaattcgtgtatttaatatgtcctgtgaaaggtaaatgaataaaaaataagaacagatcacgaggaccactaatacataaataaagggagatagctatgctacatctatacgctgtacctggaaagagaaaaaaagcagagctgtgagtgaagaggaactgctcactttcctcccgtatgtgtttcttatcctacagtagtacaaggagcatagatttacagactgcttacataattacaaattataaacaggtaaactatatagattttacgtgaaaataaagatattaaatgctaatgcagaataactatatataaacaaagtataaaagctaggaaaaaaataaaaacaggctagtaagatgggtcagtggctaaaggcacttgctgccaaaatttccatcacttaaaaaaagaacacaaggaggtacacatagtagcccacacttaatctctgtactggggaggcagagacaggcagatctctgtgtttgaagccagcctgatctacaaagtgaggtccaggacagccaggtgagttctaggacagccagggttacattgagaaaccctgtctcaaaacaaaacaaacaaacaaacaatgtccaatcctgaaagaccacatggtggaaggagaattaatgcaaacatatacacatacatacactaaatatataaacgtgagaaacacagagagaaaataattgaaacaaacccctagaaagatgttttaaatgacgagagaagcttaaagaatggtgcacacctgtgatcccaggaagttgacacaggagtattgtgaggtagagaccagcccaagataatacctagcatgttccagtttgagctacaaagcaaggcattattattattattattattattattattattattattattattattgttataagcaattttattcttttaaaaaaatcttctcatacattgaatcctgaccacagtttgccttccctcccccgcaaaccctattcccatgcctcctatctccctcagatcaaacccttctcctcccttcagagaatagcaggcctcccagggacatccaaggacatgccataacaagctacaacaagaccaggcacataccatgacatcaaagctgggcaaggcaacccagtagtagaaaaagggtctcacaagtaggggaaagagtcaaggatagcccctgctcccactgttagggtttccataagaacaccaagctacttactcataatgtatgcagagggcctaggtcagacccctacaggctccctggtctctgcaagttctcctgagttccagtcagttggctctgggggctgtgttctcctggtgcatccctgatccctctggttcctctgacccttcctccccttcgtcttcgggactcacagagctccaccttgtttgtctgtggcattctgcatcagctcccatcagttgctggatgaagtctctcttgtcaagaaacacttaaaaaaaaaacattcttggctgtcagggagatgcaaatgaaaagaatgagcagatttaaacgctaggaaatattattttcagtgtgtaaggcaatagtctagaattttttaaatccagtgttttatattgtcttaaagttttattgctgtgaagaaacacgaggaccaaggcatccttataaaggaccacatttaatcagagctggcttacaggttcagaggctcagttcagtatcatcatggtgtgaagcatggcagcatctaggcaggcacagtacaggaacagagttctacatctccatctgaaagctgctagtgcagctaggatgagtgtcttgaaggccacacccacaaagccacacctactccaagatcacacctactaacagtgccactcccagggccacgcatatacaaatcatcacacacacataagaattcttcacatgtggaacagtagatgttttaaatgcataagtaagttcggtaagtctgaatcatcccaagcgaaactgcttttgaggcaaaggtcagagtagaagatcaagctgtcccccaccctctgctttgatgcaccacactcccacacatacaggagcccaggtctctgatactgacagctgggctggctcttttaaaaagagccttaactgagctctcctctactgtctccactctctgattcatcttcacaaatgttctgtcttctatttccactatttagatctttgacttttctctcacggaagaagaaatgaaggacattgatgccttgaataaaaatgtccgctatgtggagttgctcatgtaagtgtccgaggatcactagtccggcagtgcttgtcacatgttaacaataaaggctcctgtgaacccttgcctgtaccgaccaggatgagggatgagcaggatgctcttggagttccaagccagacagaaatattgaagacacttctttcaatattagacaggcttgggtgaatgtctgccacttaggtaaaggtgtggcacggagacaaggagaattaacccttcatgctatatctgctagagcaacaacacaaattctgaaataacactgtttatgtctagcaaaaaatctaagcaatacccaagttggagcaaattcctttttaaaaaactctgaggcctgtttgtgtagtagtagaaagagtgtcaggttgtgaaccaagatcctagaggttaagtcaaatactttctcgtctgtaagattcatagcattggggctgggaagatagctcagtggttaagagtattcaatgctctttagaagacctgggctcagttcccagcacccatatcagacagatcacgatcaccaataacttcagttccaagggagttactggtctgcaaaggcatgtagtatacaaagttcaccctcacacaacaccccaaaagaaaagtaggtaaataaactaagcatggtggtacatagcctaagtcccagccttcaggaggcagaagcaggaggatctctgtgaattcaaggctagcttgttctaaccagtgagttccaagccagacagaaatattgaagacacttctttcaaaaataaacacataaatgaatagagctgaagagatggttcagtatctaagagatggctcggtgtctaaggacctgggtttccaattctcagcatctacatggtagctaatactcatctgtgacttcagttctcaggactctgacaccctcttctggcttcaccaggtactaggcaagcgtatggtacatagaggtacgtgaagccaaaacacctatacacatagaaataatgaaataaatcttttaaaaacatgatttagagcttcaagctctgcctatcagctatctttttgatgagactttaccacaccatgtgtcttagttagggttttactgctgtgaatagacatcatgaccaaggcaacttttataaggacaacattggagctggcttacaggttcagaggttcagtccattgtcatcaatgcgggaacatggcagcatctaggcaggcatggtgcaggcagagctgagagttctacatcttcatctaaaagctgcaagtggaagacagcctttcaggcagtgagagtgagggtcttatagcccacacccacagtgacacacctactccaacagggctgcaccttctaatagtgccactccctgagccaagcatatacaaaccatcacaccatgtataattattgtcaagctcacccaagacactgctccctaaacactgcaggtcttttaaattaaaattcatgtggcttatacacagatagccaaatgtgtatatgcatgcacatattttgctcttcattgcttcctgtttgatttctcaaatcatgttggtggtaactttatttggtcttctctttaggcagtgagttcagcagcccccattaagctaaatgcacagagttgaaacacagttgatctcactacttttcacgagtaggaaagtattttgaatgcactaatattgattctctggattactgtaataaagcagcccctgagtgtgagttttccagggagaacactgcttggcggcaaaacacgctacccagcctcagaacacatgagaaaatgcaagcacacgtaatatcttactggaaactaagccatagttaatcaatagctcttgaagagatgttatttctactggaaagtatcattaaatgaagaaataatatggactaaatccaccattctattgattttcttttactaaattatatgatttacatttgaaatactaaaagcaattttagcaatattaggggaaaatgactcattcttcagaaaagaattcgaaaatcaacaaagtgatatgaagattaagctccattaatttaaagaaaaactgtgccttcaaagggtaatgagctgcccctcttctctgatgctattttgtcgacctctggcattggagagccatgtttgttttgtatttttgtagtactttcagagagctgaatcttggctatgttccatgatagacatacacacactctagattgttgtagacactctcacatttcttatttaaaaattagggttgtcgtcgtcataatcgtcgtcatcgtcatggtcattattgtaacagtacaagataggatcatcagcatcattattacaaacagtaacacttcgaattcgagtacaggcaggaagtttctcaccttgttttgttatgagtgaagtgatgtaaccacaaccaccttttccatgcctacctactatgtgcatcattgtggaaaggtgccggtttaaggagaaatgagaatgaagtacaagggggaacaaaagggaaaggactagaaacaaaacttcaggaggctggtaacacagctgtgccaccaggagaataaagtgtcttcctcttacggcgttgtcttggcaggtggagtgaccatcctgaatacccatttcatgacgaatactgaacatggaaatttcttcaacagagttttttttttttcttcattcaagatcttaagctgattaatccactccagatgtagataaatggggtcttgctctcttcagattaagatgggcagaacacaccatgcttaacttttgtgtagtattaactcagctagctctgatgaagagaaaagaagattcatctttatttaatctatctggatagttctttgcaaatgtcttactaatatctttagatcaatgtcttctagactgttcatggaaatcactaaactttactcaaaagtagcatgtaaaagcaggtccaagaatctgagactaatatagggagtctgatttgtttaacctttagcaggacaaagaggtttgcagttggcacagttcctggtgctgaccatgaccatgacctaccaaatgtttggaccattagttgcaagatggtcacagccaaggcagaaatccacatgccattcctaatgcaccttgagtagagatagaactggaagtcttgaagagtcctaaagaagaacataccgtaggatgttccagggctagaggttcctgcagtgcttgcctggcaggctggaggcccagggtgagggaggtggggatgagggcaatcggcaaagccatgctgagtctgtttttatcatttgtttccatccagtgtgcccattcagcctttcatgtgcgtgaaggatggacaacactgattctttcttaaattgtttttgtttaggagggtggggagttgagacagggtcttgtgtagtccagactgctcacaaacctgctgtgcagttgaggccagtcttgaattctgaatccctggtctttctcccatttttaatgccctgagctttcatgtgactggtaagccctacttgtactatgttataatcattcttgcctgcactcatcaagaaaaccaccatgtaaagtggcaagaaacaagatatacaaatcaagctttgtaccataaaatcgtctgaagatggtgattttttttttaaaaaattattttatgtatatgagtgcactgtagctgtcttcagaaacaccagaagagggcatcagatctcactacagatggttgtgagctaccacgtggttgctgggatttgaactcaggaagtttggaagagcagcctgtgctcttaaccgctgagcatctttccagcccccaaatgatttttttttcttttttaaagaaggatttgagaaatgctagaagaaaaggctttgtaaaagtagtttttaaagatcttaagaatatagtggggtagctatctgaattttgacaaagctgaaagttctaaaagagcacgagtcattttactatatatataaaattttaaaacatgaattaaatgattacaactgtatctatttttagttcatctaaaatacaatacatttgcttatattagatcactttcaaagggtgagaagattcttcaaaagtaatatatttttaatatcaatagtcaaaatcaaatggcccaaagagaaccatttttgagaaattatcacttaaaaatgtgatcaacacgaatcgtttttgtttcaatattgttagcaatgctgttctctgggaaatattttattcacaagaattaataaaatatgatgatttgttccagcacatggtctctgttctgtttctaagataggggagaagcagctacgtcaaagttgaaagggcctgaggttgagctttgggaaggaaagaaagaaaaggctacagaatgagaaatccgagtccacctccattgctctttagggttcttcgtgaggggtcatgtggaggcaggcctaggcttaacatttttaacaaaccattcctggaggtggatattttttaaaaagtcctgccatttgtcaggggatatattcctaaatcaaagaagggtgagtttcatcttaactgtagaagagatggaggggaaagagttggagacagaaaatagagaagtcaggagagaatatagtctgacatttcgtctactatggtaccaagtacttctccctttccactacccagagtttatgttgaaaacgcaacctccactgcctcaggcattatgtgaaaaggtcatgatatctatgattaattaacatggggtcaggctgaaggaagatgacccttaatctaaaatgattgatatcctcattaaaataattaattaattaactaattaattaattaattaaaaagggcattcagacaacacagaaggagaaagccagatgaggatgaatgtagaggtcaggctgatgcttctgtgagctaggagataacaaatattgctaccacctatctgatactaggtaagatattttccttcagaaggaatttgctttcagccctacaaataccttgatcccagacaactagccttgggaattctgaagtaatcaatttccgtcgctcaagccatactgatgatgatagtttgttgtgacttccctacaaactagcaccccagagtctcttttgacctgcccacactggctattcagggagacatccatttaaccactcaaggaagatgaccctggaatactattcttgagaagaatgatgtcatatctgggctatcagaggcattgcatagtttgtggtaataaatgatgatatggaaattttcaaccatatggtcttagtttgtcttacagagtctggagacagatcaggctcagccatactggggggcttcaagcctaagtggctgaatggaagatctcaggatctcaaacctcaagtggatttccctggttggcaataatgcatataaattgtcatgcatgattgcttggggcagttaagcactatctattaattctactgggagaaaatagtagaagcctgtgtctgatttcccacatagactctggcctgtgtttcttgtaccttggctaattataacctatgcccttgcattatcagtatccatagctatgagcatggctgctttcctaagttctatgagttgctgtaataagtcattgattctgagggcagacctttaccacaaacagttatcagagcatcaagtgtactagctgggtatgatgacccactcctgtaatcccagcatttgggagcctgaggcaagaggattgcagtgagtttgaggctagcatgggctacaaagtaagattccatctcaaaaactagaaccaaacaaactacacacatgtacatgcacacacacatgaacacacataacacactcatatgtatgtgtgtgtgtatatatatgttaggcaatgccggaacactccacagttctgcccctgtgttcaaccatatacaagcccttcctattaggtataacatactgggacataaccacacatcgagcaaagtacatggagcccatgaacttgcagcatgcagatcaaagatatttttcacatctgtacatacccactctcctgacatgcatgtcaagagatgaacatttctcaggctgaggaaatggctgttagtaaagctcttggcacataagcatgaggacttgaattcaattgccattaccacagaagtaagaaccttcagtacaaattctactgctggggaagcctcgggcttactgaacaatcactggtgtagcagaatgaacaaggtcgagattcaatgagagaccctgcctcaaaaaaaaaggtggtgaagtgatgaacaggaagaacatttgacattgacctctgatctccacaatgctcacacacatgaattcaaatacacatcatcatgatagatagatagatagatagatagatagatagatagatagatagatagatagatagatagatagatagatagagagatagagagagagatagagagatagagggatagatggatggatggatggatggatggatggatggatggatggatggatggatagatggatagatagataattttaaaatgtaaaaatgcattagggatgttagcctcagaatttttatctctgtgcatagagagtctgtatattttccttttcatcaaagatcaatcttataaaattcgtatttttctcacaatatgctattgttatatagcatggagaaaacgtatttgttcacttatccaacacatattttgtgtgcttggctaacctcttgggctgcctcagtgaacacagcactgactctcagcacttcattctttctctttagcgactgttgattttcctaggccatagccaccttttcttttctgtttttcttcttgatgtttgctatcagttaactggtcaatcggttaagtggttaaccaagttctttgttccttcttgttttctttctggatttcacttagaataaatttgttaaaacacacacacacacacatacaatctgttctgtgtctcatttatacctcctttttccagcatcatttgtggttttctttagcatatcaatagaatgctaacttcgtaggttaaatgctcttttgaccaatgttttcagcttctctttttttcttctctagtgacacagacactgagcatagtgagcttttcctaagaactgttgctgttaagatttcacagacagatttttagttttgtttctaggtattttcttaactcctatcttaattaatttgctgagaacctgctgaatgtggaatagcgtgaagtagaacacagaggacagaggtggacagaggtagctttaaagactgctggtctccagaagtagttttaaagactgatggtctctggcctttaaactctctaaccatgctgaatgctgaagctgctggcttcggaaaaaaaaaaaaatcctagcagctttcttgcttattctgaggctaaaggcctctggcttggtggttaagacctatagcttgacagggctgggagtggggctggtgtgggatctaagtaaggagtaattgctagggcttttactctcttgcctagaagccttgccactggtttgtcaggtgggagggaggcttggagcaataaacttttattgagctatgagaagagagtcactcacagaaggaaaaacttttacacaagcaaataaacataaactcatatacattcatatgcaaacttatgcacacataccaatacaaaccatgcaaaccacatgagcttagccacatactttataattacaaacttacccacacacatccatacttacatatgcatatggagcaaaagaccaagagccagtgcagaaagtactcattcattctggatggaaaatgagctacaatctttattgcatagagaaagagaaagcctccatcgttttattgctaagtgaatgaaacccaagtttgtaagaagaaagctttgtcttctttagtaaggctaagcctgccttgcggttaagaagagacctgctctgtcccatggtaaggagaagcctgcctgctctttctgctctctctgcagcttctttgcccctctttctctctgcattctgtgtatttctctcttaatttctaagttctcttttaattcataagttattctactctgctttttccttcctctgcctaatcttgctctctcctcctgctctgatgcagtaataccctgcaatgcaatcatttctagttttttctgccttttctaggggaagagtccacatagtttttccaagcattcccccccttttgtgtttttacaaaacttcactaaacgttcaaacataagttcaaatcataaattgaataagaagtttacaacagagaatgtttacatgcatatccactaagagtaattatctgtctaaacattaattttctgtcactggctccacaagttcatggaaagttaaaaaccataatttttgtgtctgagttgacactgaagttttgtatagataaactcagtcagtatttgcacctataatgaatgttagtcgtgacctttggttaattgttttacaacctcttggaatgtgctctaagttgtaaatgcctgctttctatctcagaagcaattaactcatgacacttgaagactgtcagagttttcattgcagtattcatatcagagaagacttataacagccgtcctattataaagggcttaataattactagtgtaattttaggaattcttataaacttaccactaagaaaaaagaaatcatctatttgtctatatagcaccactacaagacagtacatcttcattgatctgcagaaatatgctcaacaggataggctaataccttgattattatataatatttaataataacaggaaaggcatatcaaatgcaagaagcaatcctgggatgaagtctctatgggaatttgtctcacagagctcacccatcataagccatgcaaaaatggtaggttacctccaggaaggttacctgccaaccttagcctatcctagatggctcctgacattaattctttgactggagagatggctcactggttagcctcacttgaggcttccagaggacctgaattctgtttaggtagctcacaactacctgaggctcccattcccatagacccaatacatcctttcagattcttcaggtgtacatacacatgtatcatacactcacatacatataataaaagtaaagaaaagtgtaaatgtttaatagttatctgcaagctattatattttaatttgtaatgtgagggctttatcttcctgagtttatagtctaattttttttcacaccgacttcagaaaacatcgtggatcagttttttgatgtgagattgggaccacctatagtctgctctaatgtcttgagttggatataatggatggatcatcctgagttatcaggttttacctgatactagagaagccacaatgactgagtgatttcattcctttaccactgtggtccttgactaggagcaatcatgtcctgtccttctgcagaagacatctaaggatgtttctgctcatcataactggagttaggaacaacatagaaatggaatgagcacctaggaaatagaggcaaaaatattacttaataccttcaaattgtcaggcagtttttaaaacaaagaattatctagccctaaatagtcaggcggaggctgcaacaccctgctaacacaagctcttttttttttcctcccctccaggtccagtgcgctcctcttcctccttcccctcacctactcaggggaggcctcctagaggtaccaaccaaacatgacaaatgatgttgcagtaagactaggcacctcccctcatactaaggctccctagtaggaggaaaagggttctaaaagcaggcaaatgagtcagagacaatgcccctgctcccactgttagtagtaccacaagaagaccaagctacacaaccataatatatttgcagaggacctaggttcgggccatccagggtccctggttgttggttcagtctgtgtgagcccctatgaggccaggttacttgattatgtgggttttcttgtggcgtccttgacccctctggctcctacagtctcccctccccctcatccacaggattccctaagctctgcttcatgcttggctgtgggtctctgcaccatcagtttctgcatgaccctctctgtgatgatgattatgctaggctcctgtctacagttatagcagaattgtaaggaccatttaattgagcgatctttctttgtttgttttgccaggtctgtttggttccattctaggtctctgagatatccagactctgattcctgactctccaggcaatgtcagggatgaggtgccaagattttttttttttttttttttttttgagacagggtttctccgtatagccctggctgtcctggaactcactctgtagaccaggctggcctcaaactcagaaatcctcctgcctctgcctcccaagtgctgggattaaaggcatgtgccatcacgcccagcttccaagatcttaatagatcttaaaacgcactcattctcacatccctattcagtccattgtatgtaactgaaaaatcaatccacggaggcccattgctacagtgcttaatgtaaacagcccatctgttgaaaaagaataatctcagcagcgtcacagagaggaacacacaatgtaaaagtagctcagcaaggcaatttctttttgcgaaaagtgtgtgccagaactgaagcctgtcaatcagcagcttacgaagctaaatggcctcttttatccaggatgtaggtggagatgtcatcccatcgatgggagctcaatttcacatctgcagtgattggttaattggtacacaagaggtggaggaagttcaggaaatagagccctcgtcgggctatccaactttggtagaaaaaaagaagtttcttaagcaccccttactgtttttcacaccttttatcttttctcagattgttaaactgacaatgggtttcgtgtctttgtatttgtgtttagagcagatggacaaatgaatcccaatgaaaagtcattaatacaagaagaaaaaagatacaaagtatctctttagtatgttaagagcagataattctgacagataacaagctgctatcaaagactggggagagagagtacagtaagatgatctactccccctccccccaacacacacacagagactccttgaaataactatgcaaatttaggtcaaatccatgtcgcctcttgtttttttggttgccccccccccccccccccgacagggtttctctgtgtagccctagctgtcctggaactcactttgtggaccaggctggcctcgaactcagaaatcctcttgtctcagcctcccgagtgttgggattaaaggtgtgtgccaccatgcccggctccatgtcacctcttgagtaaagaaaagataccattaggaaattcaagtcctcaaggacaaaaagaaagagttggattggcaaagaaatgagagggaaaaaaaaatgtaatccaaagtgcactcaagaagaaactgctgcaaatgcaaggacacttttagacatactccagccttaaagccaactgcaaattaaagcataactgttagggagctgcaggggggcgggggcggggcgggaggtggggcttgcggtaaattggcatgcacaaagccccaggctggatcccagaactgcttgaaacaagacaaactcatacacaggtaatctgagcactgggaagtagaggcagaaggataagaatttcaaggtcgggctggagagatggctcagcaggtaagagcactggctgctcttccagaggtcctgagttcaattcccaacaaccacgtggtggctcacaaccaactgtaatgggatccgatgtcctcttctggtgtctctgaagagagacagtgtactcacatacattaaataaataatccttaaaaaaaattcaaggtcatcattcctccttcttatctccgagaatactatacctgaagaagaaagagtctgacagaaaaacagaacactgcctggggtaacttcacaggactgtaggaggaaaagaagtgaggcggattgcagtttactcccagcgttcagtttgggaggggaagaggagggagaccacatgagaaatggggagatatatcagtattgaaggggtctctctgtgagctacaaagggccattgtcatgaatgtacatcccccctcctgcctgaggaaagcaaagaacccagagccaggagcaaacccagggaaagggtttatatcctaatcctaacaagctggctcttggtgtaagttacattgttctaatgctctgggagcagagactgttgtctttcccatgactttatccctgaaacaccagtgttcctttaactactccataaaactgtttcacagcaatttagtgagacctcggaaagagctaaatgcacagcactgaagaactcatacaccctgagcagtcctgagcaaaaagaatagcgccgggagtctctggggaggtggctcagtgagtaacgtacttgctgtgcaagcatgaggacctgggttcagttccccagcacctatgtaaaaacgcgta

SEQ ID NO: 817 - DNA, 1072 bp, Mus musculus
aggcaccttttcaaataatgtgcctctgccctgttcagaatcaccccagaagcttcagattcttctctacgatgaacctcagcgctgcacaccaccaaatatccctaagtgatgggaacaacattccactcattgggcttggaacctactcagatcctagaccggtccctgggaagacctatgtggcagtgaagacagctattgatgaggggtaccggcacattgatggcgcctatgtttaccacaatgagcatgaagtcggtgaggccatcagagaaaagatagcagaagggaaggtaaagagggaagagatcttctactgtggaaagttatggaatacagagcatgtcccatcaatggtcctcccagccctggaaaggacgctaaaggccctcaaactagattacatagacctttatattatcgaactgcccatggcctttaagcctggaaaggaaatttaccctagagatgaaaatggccgaattatatatgacaaaacaaatctgtgtgccacgtgggaggcattggaagcttgcaaagatgctggcttggtgaaatcccttggggtgtctaattttaaccgcaggcagctggagctcatcttgaacaagccaggactcaagtacaaaccagtcactaaccaggtggagtgccacccgtatttcacccagacaaaactcttgaaattctgccagcagcatgacatcgtcattgtcgcacatagccccttagggacctgccgcaacccatcatgggtgaacgtctcttctccacccttgttaaatgacgaactcctaacctcactggggaaaaagtacaataagacacaagctcaaattgtgttgcgtttcaacatccagcgagggatagttgtcattcctaaaagctttacccccgaaaggatcaaagaaaactttcagatctttgacttttctctcacggaagaagaaatgaaggacattgatgccttgaataaaaatgtccgctatgtggagttgctcatgtggagtgaccatcctgaatacccatttcatgacgaatactgaacatggaaatttcttcaacagag

SEQ ID NO: 818 - protein, 348 aa, Mus musculus
APFQIMCLCPVQNHPRSFRFFSTMNLSAAHHQISLSDGNNIPLIGLGTYSDPRPVPGKTYVAVKTAIDEGYRHIDGAYVYHNEHEVGEAIREKIAEGKVKREEIFYCGKLWNTEHVPSMVLPALERTLKALKLDYIDLYIIELPMAFKPGKEIYPRDENGRIIYDKTNLCATWEALEACKDAGLVKSLGVSNFNRRQLELILNKPGLKYKPVTNQVECHPYFTQTKLLKFCQQHDIVIVAHSPLGTCRNPSWVNVSSPPLLNDELLTSLGKKYNKTQAQIVLRFNIQRGIVVIPKSFTPERIKENFQIFDFSLTEEEMKDIDALNKNVRYVELLMWSDHPEYPFHDEY

SEQ ID NO: 819 - DNA, 62131 bp, Homo sapiens
ttgttttcagggtagcatgtaccagcctgtcagcaatatttagtattaataattgcatttataatttccactggtttcggtggagcttgagggactaagtctggtcacatattggaatatgtctatgcaactagctcactgtaagacacaccctccttgagcaggctctgggctttctggtaccaaggtgctcacacaggtcactggtgttttaatacctgaagacaaagcataatcagaacaaccatgtggtgtgaaagtaaggaagtcttcacctgagatctctagacactcccaatgcattttcttctcctgctattgctttatttgttgcctgtaataaagtataaactgggtcctatggatcccttcaggaatcaaacacttgataaaaataattaatgtaccttttgataaccctaattgaatgatgttcattggtagttcatacttaaacataaaagctggagattgtcaggcaagctatgctattactgattcgaattcactcttggcatataagcctttctcaaaagtcagttgacttcagataactgagttaactaacctcaagtggatctgccagttagcataaaatgaaagagcaattattggtccaatcaatatttcccagcaagctttggtcattctttacttatttttaggatggattgagactttttcttgccagaccatcattaaagactttgaatgcttttccttttactcaaaaactgtattgttcttatacccaatcttcaggaaaatgtagagaaaataaaggattactaaaactaaaaattgtcaaagttctaagagtcactggaacttacatgtaagttcctacagtattccatttaccttcatgacataggctctccccttaagagttaataacagaccatgccatgcatttcagaattttgctctgatcctagtctttgccccactgcaagttgacataactaaatactacatcttatcattaaacggatacaagctgccttttcaaagtaaccatttacacaatctttgagcctgaaacctggagattttgtcttctggaagagaaagcaaaggaagatttgccttgagctttgactaacaggactgtatcaggtactgttactaattaacactgtggtgagactctaagatagtaatccctgcattcatattttcagttcaaaagacatacatcctttttcctagatcaggggacttccatttcactggtagacctcaagctgagaattctttgaactctaccagaagcagacaatcctctaaagtaacaattgattcaaaaccctccattgaagctaatgattatgtaaactagatagcttttactaaaatctctggaacaagattaattttaagataatttaatacacttttccttttgattttttttactatggatcttgcctaatagcatatgttgaagctctccagtgactgggtcaagagttctcagtctgttctcctatacatttttttttaaacttctaagcctctgtggtcttttcttgtggcatttcaagagaaagaaaacattcttatacatttttctcagaccttagttactgctgtaaatctgattggtggatcaatatccatttgaccccgctgggggaaacatatgtcatagatgtttctttaaatattgtcaagatagatgttcttatacaaatttcttctagtactgaaatgtctctcacattatgagtcccaaccttcaaccttgtaaaaattggactttacctccacattacaaaatacatcttattagatcattaactaaacccaggaactccgctccgctctctgcaatggtcagttgctctcttcagagtcactgtatcctgcaggaattatttaacttcactcagaaaatatgtccagcattagggtccaatgattagttctctgttttgaagatacataatgtttatactgtcctttgagtccatgccctaccaaaatactattccttatgtgtacactaccactggaaacgcatcaaacagtttaaattcattacgcagggtctgaatggataacaacatatttcatcttgatttcctcttcactaaccaagagggagtttatgccagaacaaacatacatatctacatatgtatttgcataccttggtgcaaatacatatgtacaagaatagactctgctggattttttagcgcatttttgagatctgggtttggttatctagtccagtggatgaacagtcttctacaaaagtcataataatttctttttctggcaagtgcctgtatcacagttgttcaatgcatcctgtctagattcttaagtgctactgtgtaaccacttttacattacatgatgcaaacactcattctataatatttggttgctgcaaaagtagttgtggtttttcccatataaaagtaatggcaaaaaccacagttgcttttgcaccaaccttagaaggctcagaaggaactgacacttgtccagtctagaggcaacctttcctagataatctaatcagcaggatcctgacaatgcaaaggtcttgaacatcaaagattattgtcccacagtctgactttgtctttcctgatatctatcagcagacagtggcctagtttctaccactaggctatgatgtttcttccctgctaaacataaataatttcatagaatatcaatattacatgaggactcttcatgaccatgatggaataagaaaaaaataagtccattctgtaattatacctgagcagaggtactatgcaaccacaagaataaccaaatatcccatcttcagccaacatgggtgactgctactttttctccaatggcaatgctagctatgctctatttattcaaccttctagaaataaattattaagatatccaatcactgtattggcccagtgttaagagggcacacatacacccacaaaatatagctgtgtcctggaatctttccccaaatcacctaagataagcccagtttctacaatgagctcttcccatctccctcttactaagactccatgcttctatgtagagtgcagtcttccttgctgcagggagtttataaaactaacttcattggttacatgtatttttctaatggtcctggactgatgtattcaacaagtgattgactaaatggcgctaaaatgtcatctaaagtatctgacttaagatatactctagacatttttattaacctttttattaatggtaataattaattatgctaatagtaataataaataatactaataatttagtaaaatttattattgataatagctctccagtaaacaggtcaaatcaattttcatctctgatacagtaacaagcaaacatttttctaccatcagatctacagagagaagagtatctaatactgtgagcatattatatacgaaggtttcaatttattttcatttaattatgactagtttggattagtcatttttgtagtccctttaaatatgttgtcattgatcaatgtatctaccctgttatcactttattggagggagtagagtgtagtgactaaaagcataggctctggagtcagacagcctggcagttcttccagttactaagcaatttttgacaaaaactgttttggacctcaagactcttcctataaaacaggaataataatattacccactgcattcctttctaagggctgccataacaaattaccacaaactaggtggcttaaaacaaacaaacaaaaattattctagcacatttctcgatgctagaagtttgaaatgaagacatcagcaaggccatgctccctctgaagtttctaaggaagaatgcttctttgcctcttcctttcttctagtggttgccagcgatcattggcattcttcggcttgtagatgcattacttcaatttctgtctctgtcatcacatgtcattcttccctaagcctctatgtctctgttttctcatcttataagaacaccagtcattggatttgggcttactgaaatccaatagtaacttatctaattatatctgcaaagatcctatttctaaatataaggtcacattctgaggtttcagatagacctgactttggggggacactaaatgatccagtatattcaccacataagattgttgtgaaaattaaagaagccatgtaaagtacatagtaaataccaaacttaatcttattatttctgtcaatataatttttatggatttatggccacaaagaaagtataattcacaagcaatttttttgttgaatgaaaataggagctgttttaggtcaatttattttgaaaatattaatatataaagagtaacttgaaacatttctgatgagaaaagcaatgtaatatttagattccatcaatttagtaaggatgtatataatacattaaaaattaagaaacatgtgagggttctagttccaaataagatggagtcccccactgaatacaactctaaagcctgccttctacaatgagaacattaacattctatgccatttaaacaggacccaaggagattgaggctgcagtgagctgtgactgcactactgcactccatcctggaaaacagagcaagaccctgtctcaaaagcaaacaaacaataacaacaaacaaacaaacaaaaccaggacccaggatctcataacctaacattcaaaaagttctcaataaccaaaagacagcaaagccaagatgtcatagatgttgtacatacttatatggtgaaaactttaaggcagcgattacaaaagtttcccaggaaacaatcaagaacactcatgaagccagtgcaaaagtagagagtctaaggaaagaaataaagcatacttaaaataactaaatggaaatttcagaaatgaaaaatatatctgacatttaaaactcactggagtggaaagatgactaagcctaagagacctgtaggacaccatcagccatacaaacgtatacataatagcagtacaagaaagagaggagagaaaaaaataaaacactattttttgaagaaataatggccaagaaactttccaaattaggtgcaaatcatgacactacacatccaagaagctcagtgaactccaagaaggacacagccagagatccacagaaagacacattactgtcaaattgtcaaaacctgaagacaaaatctatgtaacaataatatcataaaggagtaggctgatggagtttttaaaggatcaaaatgtttgaatactattaaaactgggttagtattaattcaaacttgattgttacaaagttaagatgctaatcgtaatccccagggtaactccagcgctatggactgaatagtgtccccctagatttcacaggctgaaacttgaattcccagtgtgatggtatcttgagatggggcctttgagaggtaactaggtttatatcaggtcatgagggtgggttcctcatgacgggcttggtgtccttttaaaaagagaccacagagcttgcttactctctgtttctcctcttccccacctccccagtccccaacacactgtgagaacacagcaagacagccatcaacaagccaggaagctctcttcctggctcttaacagaaactgaattggctggcaccttgatcttggacttcacagcttccagaactgtgcaaaataaatggctgttgtttaaaccacccggtctatcatattttattatggcagcccaaaataagacacccagaaaacaatttaaatatacaaaataatcctgcaggaattttaaacacacaaactgattctaaaacatatatcgaaagtaaaagagaaagaatagctaaaatacttttgggcaagaaaaataaagtctgaaaattatactatatggttttaaggtttatgataaagctacaaaaatcaagacagtgtggtatcaatgaaagaagagacaaatagatcagtgaagcctatttctatgtggagttcacagaaataaagcaaaaaaaaaatcaatgaaacaaagtagaaagtcatagacccaccaatatatggccttttatttatttattttatttttttaaatatatggttttaatgttgaaatatttatcatattatagtttttagaaacttggacaattatcaataaaatcagggctggtcttatgatttactagagtatatggctgctcgcttgccttttatttttaacaatggtgcaaaagaaattcagtgaagaaagcacagatttttcaacagatgtaattgaaacaataagccatccttattcaaaacaaaacaactaaatctcttcaattatacaaaaatttattcacgatgagccataggtctaaacagaaaatattaaactatataactttcagaaaaaaaacacagaattaaatttttgtgacctggggttagatacttaaagcacaatacaaagaaaatgacaaataaacattaccaaaattaaaatattttgttctatgaaagatacagttaagagaatgaaaagacaagctacagactgagaaaaaatatttgcaaactacatatccagtaaaaaacacacatcaggaatttaccaagaaatctaaaaattcaacactaagaagacaattcaattttaaaaatgagcaggagatttaaataggcacttcaccaagaggatatacagacggcaaataagcataagaaaaggtgggccaggcgtggtgactcatgtttgtaatcccagcaatttgggaagctgagatgggaagaggatcatttgagcccaggaattcaagaccagcctgagcaacatagtaagacccctgtctctacaaaaaaatttttaaaaaccagccatgcatggtggcacacactgatagtcccagctgctcaagtgggtaaagcaggaggaatcacttgagcccaggaggtagaggctacagtgagctagctataatcatgccactgtaccctagcctgggggatggagtgaaaccctttctctctaaaaaccaaaaaaaaggaaaaaagaaaaatgtgttcaacatcatcagccacatgggaaatgcaaattaaaataacaatgaaataacacaacaaatgtactagaaggctaaaataaaaaatactaagtgctgtcaggatacagaacaactgcaactcatgtgcattgctactggggaggcaaaatggtagtcattcggaatggccgtttggtggtttcttataaagcaaaacatacatttgccacattacccgataatctcactcctgggtatttactatagagaaatgaacatttaatgttcatacaaaaccctgtacataagtgtttagagcagccctattcaaaatcaccaaaaactgaaaacaaactaaacatccttcagttggagaatagagaaacaaactacggtgcagatatataactgattactactcagcactaaaaaaaataataaactgttgacataagcaacaatctggatgaatttcaaaggcattatgctgagtgaaagaagccaatctcaaaaaagtttatattgtgtaattcaatttttatgataatttcaaaaaataaaactatggtggttgaaaacagtgatttctatggattaagggttaggggagggtgtgataggatagagttctttggcttatagcacttttcagtatcccaattgtagtggtggttacaaaaatctatatatgtgttaaaatgcatagaactaaatagcaaaaactcagtaataataaaaataacaaacacatgctaatcaacattttagcacacaaaggtgcacagtaagcatttgttgtatcaatttaaaaatgatattaaagaccattactgctatgttccacattgccacagcctagtttaaattactgtgtctagctgaatactgaacatgttatatatacgttatgtgttaatgtgtacataagcaagaatgactgttggagggagggcaagtcaattatagacaaactttattgctgaaatacctggagttcagtcaagattgtgatgctccctgcacggaatgccaatcactaagtcaacaaggattgccagagaagaaggctttaatctagtcctgcagtcaaggaaagtgggagttcagtctcaaatctgtctccctgactgaccaaaattgatctgtttacatagcagggaaggtgcgaaaagaaattagggagggataaagaagaaatcctgatgaatcaggtatttggtatctcagtatcaggatgtggtgatctagtgagtttcagtcccttgcctgagggtcagtttcctgaggaaaaaactcagttaagacataagtttcaagttttaagacagagggcacatttctatgtttattcaaaaatccataaatatgggacaatttggccagtttcaacttcaggacattttaaccattgtggactcagtgacctgtgaagtgtacaggccagggaaacttcctctttgccttctgaagtttcactgaaaaatcaactcacaaaaggcagattaattggagaaaaggtattcaattttatttaactatatgtttacacagggagaaccacagagtgattacccacccacaacagggtttagaagcttatttactggtaaatcaggttatgggagaggggaaaagaggaattctgttgaggagatcactagggagaatgaatggatcagggagtagagattaacttgtacattaccttgtgaaagggtttgttcaggaaaggttacattcttagtcttacagggagaggaagaaaaacgaattgttccttttggtgggtctggatcttaggcagataaaggaacttcactttgggagaggtggtagggagtagaggtcagagggaccttgaggcttttccagttcagtatgtcaaagtgccatattttggggtatcagtttctgactcccaacacattctttgtcttctttttttgtaatggatcatgagataacaggtaggggaaaaagaacaattgtcctccttggtgggtccatcctatctttatgtagacaggggaaagtctcttccagagcccgttgatctctaagggtctttacttcaaaatcttcattataccagggagccatatgttggggtggaatttcctgcctccttcaacccccagctccaaatttggaaatggcttctaatttttttaaggaaatgtcttttatttcctttggccactgtgattgatttcacgatggatccatgaaccaagaaaggcaatcaaggctaacaagtttcaatttcaggactactgtttgagctactgagaaagtaaaatctctttttcgttgtttgagctggaaaccttgtcactccaaggacagtcagtaaacacttttcaatgttaagggaactgagagagagagtttcctgagagaacaggaaggcagagagacgaatgagaagtgagaaattggtcctggccatgttattgttcctctagtccagtttaactggtgataagcttaacttgtgataaagatcctagatccctttccagtcctgctgcatccaaatctcccaggaagtcctagaaaatgtctagtctcccctgaagctagccctactgccagaatttgaggaatatgaaccaataaatttccattatagtttaagagaatttaagatagatgtgtgtattagttcattctcacactgctaataaagacaaccaagactgggtaattaacaaagaaaaagagatttaatgggctcacagttccacatggctggggaggcctcacaatcatggcagaaggtgaaagaggagcaaaggcatgtcttacatggcaggaggcaagagagcatgtgcaggggaactgtccttcataaaaccatcagatcttgtgagacttattcactatcacaagagcagcatgggaaaaaaacacccccatgattcaattacctcccactgagtccctcccatgacattggggattgtgggagctacaattcaagatgagatttggttgaggacgcagccaaactatgtcagtctcttatttgccaacaaaagcatcctaactgatagaggccagacagatttgtttctttttgttttttcaatcttttgttgtgaagaagtaagcataaactctcaataggttacgttttacaagcctctgatgaagttcaaaggacaaccatgcttaggatttccaggacaacctggaaaaaaaaacaggttgagaaataggtgtgttaatctcccttccctctgctcctccctctggccttcctttctttgatggaataggccctaggacacctttctaaaaagactccctgtggtgttcagaatcactcctacagtcaggttctccacaatggatctcagtgctgcaagtcaccgcatacctctaagtgatggaaacagcattcccatcatcggacttggtacctactcagaacctaaatcggtaagcttattttttctctctttgcttgcttgtttgtttcttttaacatttgcctatagcataatctgcaatttattttaagcagatctcattgacttactttttgtagtaatggaagcaacctcaatttgtaataatgaaaggactactatttactgaataggtattgagccaaaggttaaactaaatcaattcatgattaaaaattagtttggattagagaaggagaattttctgcttcctttactgaaatttagctaaatgctgattactagagtgaactgagccacatgaaattcgtgtgtttatgacttgtgttttttttatatgagataatttttagttcagtctaacaaacacctagtgaatacttgccatgcactaagcactaggcgatagaagtgtcatatatgaggaaaacaatgtctctgttatctagggattaaaaatcaaatagagggggcagattcttgacaactaattgtagaatgaccaagataaggatcaatgctattctagaactctctgtaaacagtctctgaaagcatatgtattggtccattctcatgctgctattaaagacataccctagagactgggtaatttataaaggaaagaggtttaattgactcagagttcagcatggctggtgatgcctcaagaaacttacaatcatggcagaagggaaagaaaacacgtccttcttcataagatggcagcaaggagaagtgctgagccaaaggggaaaagccccttataaaaccatcaaatgtcatgagaactcactcactatcctgagaacagcatggaagtaaccttccccatgattcaattacctctccctcggtccctcccacaacatgtggggataatgggaactacaattcaagataagatttgggaggggacacagccaaaccatatcagcatagaaatggaaataattaaatttgaccatgaagattgaaatgggcttcctttaaaacatagtaaagtttcagcttatgagaatatctgttccttgttgcagttcaacattaaatgctgattacgagaataaatagtgacatgtgtagaaatgctactgaaatttgagtggtcatgtatgaatgaactatttgaagctgagcatgaatgtaccagacagagaagcacagctaaagcaggacattttggcaatacgaagtatagagacattttagttagacagagaaggatatatgatatatccagtgaatgccaagcccatagtgcctggcacagggagttaatggtgatggcagctgaatctgaaaatgcagattaagacagggattaccaaggaccttgaacaccatgctaaggagttggaactctgtttgtttgtttaaggcagggtcttactctgtcacccaggctggagtgcaatgatgcaatcttggctcactgcaacctctgactcccagactcaagcaatcattctgactcaacctcctgagtagctgggaccacaggcaggtgccaccatgcccagctaatttttgtattttttgtagagaaggggtttcatcatattgcccaggttggtcttgaactcctgggttcaagcgatccgcccgcctcagcctcccaaagtgctggaattataggcgtgagacactatgctcagccaggagttggaacttcgttctatagtaatgagacatcatctaaagtttagaagcaaagaaagagcatcactagatctgtgtttttgaaagataaaactcaggttgtagcatggagaatggaaggcagatgaggagaaataaactacccatagcaagagtagttaaaacttggatcacaatcccacattccacttcaattgcacacctcccttgtttttggtaatgcaatggaaaattactcttggaacaattatatgagtttgatccttggcccctttctcttctttctttgcacaatgtctctttatgatctcattcataatcttggctccaaccacatatatgcagagattctcaaagctatattctctattgtttgttatctctcccccatgtaagtcccttacaggagataactattgttcaaagatgaaagaaatgatgaggaagtctaattatggggtacaagctatggagaaggcatggcctagaaagttaggtgggggaatattccttcctgagtggctctggttgagactgctgtagttgcagcaagttttcagaatctgaatgagccatggggcaaaggagaagtgtagtccaagctcttggtgagtacctaggagaagcctaaaacacccactacattttgcccctgagcaaagggaggtgggggtgcagggctcagaacccatttctcaggaatgtgccatcctttaaacattccttttattttatttattttatttttattagaggcaggtttttgctatgttgcccaggctggtctcaaactcctgggctcaagtgatccacctgccccagcctcccaaaatgctcggattacaggcgtgagccatgacacccggccctaaacattccttactttctctccaatgcccatagaattccccttttctgatcacccagggaactttgtttcacctggggaaaacaaagccttgctcttataccaagtaattttttcagatctggttttaagctgaggacagggtgaaggtctcataagctctacctaaggggaccaggggccaggcagaaagcataaatgagtagtttcagagagttaagtcttttctccattttgtcctacttccccattctgatactagacatgagggcaagcaatgccttattttcctctttatttctacaagaaaaaagaaaaaacacaagcaactaacactcgggggactattattgagaatataatagacatcacactacaagagggtggcagcttgtcctccagtacagccaatcatcatgaataataatccagttgttggccagtcttctaacactttttggagaatgctgtaaagtaattattaatttgtaagcaacagcaactcattcagattttggatgacatctggatggcatgctgtcttgtccaacttgtgtccaatcacaaatgtgccaattacatcttacaatggatttccactgacccacccaaacttacgttgtagtggatcttatataacccagctcataatgggcagctctggccacacagtcacatcatgtcccatggtcagatgtactatctctacaggactcagcagcaatgtcaacaatgtagatggcgtgacttgctccagaaccctacaggcttaccttgtaattctccaactggggcttgccataaactccatgccacatgtaaacaatagggcctgctgggtcatatggcccaagtggcagggatgcttgtggtaaagtctggagttctgctgagcccctccccattctgggcctaatgaaagctggtgtattcatgtcacacagtaaatgggtaggaatagtactgcaagtatggaatatgctgcctctggagcctgagggcgccttttgggtactgtgcttccttcttaatgcttttcctagtatacagccatacctatgactttatcttgaaagaacttccatcagccttccaataatccattttttaaaattcttaatagagacgaggtatctctatgttgcccaggatggtctgaaactcctgaactcaagcaactctcccaccttggccttcaaaattgctgggattataggcatgagccactatgcccagcccaatgatccatgctgactgctttggtttctttaaattatgcaatgcacttgttggctgcctatgtaacttgcctttagggtgggggtgccagatttagcaagtaaaaatataagatgtccaggtaaatttgaacttcagatgaacaatgaataatttttaaatataagtatgttccatcccatttaatatttggaatatgcatatacaaaaaagtcttgcccatttgaatttcaaatgtaactgagcatcctgtatgttgcctgaaaactctagggatttcctgtctaattaaccatctctgcaaagcatcgctgtgggttatgctctttggataccactcattttgataacagtgcccacttcacttctgaagttagtactaccatgtagcctctattattttaaaattccatcattcctagtttttaaaataaggacaggatctcactatgttgcccaggctggtcttgaactcctaggctcaagcaatcctcctgtcttggtctcctgaagtgctgatgttagaggtctgagccaccacacctggcccctaattttttagtaaacctagtttttcaacatctcccacagtctgccttgtctacagaggacagccgtaattgagctcaacaactctggtgtttttgttgctaaagcactgctgtctctttgataaaaggagtgttctctgggccctgctgcaaaacatagatcatccgtggatttccagccttacatagtatatctactatagtgggctcccttctctgagcttcctgagccctcttttgaccatctgccatggtatttctggaatgtctacttcatgtatgtggatgtcactttttccaagatttcaagagttatgctggcagtgtgttagcactgtttcctgaggtgttaagtcacgtatcagaagatggtgtttccatatcaataaactctcctttatccaacttgaaattccaccttcctcttgatgctgcaccccaagatccactctcacacacactctccacctccattgcatggtgtcttggtgtgcagctccctcagtgtatcaccctctttcttcctttatccagccaggagatctcataagggataatatccaaaatataaaaggaactcctaccttttttttttttttttttttttttttttttttttttgagacagactttcgctcttgttgccccggctggagtgcaatggcacgatcgatctcggctcaccaaaacctccacctcccgggttcaccaattctcctgcctcagcctcctgagtagctgggactacaggtgtgcaccacaacacccagctaatttttgtatttttagtagaaatagagtttcaccaagatggccatgcccagctaattctgtatttttagtagagacggggtttctccctgttgatcaggctggtctcgaactgccgacctcaggtgattcacctgcctcggcctcccaaagtgctgggattacaggcatgagacaacaagcccagccaagaactcctaccttttatatttagaaggatatattctaacatgactccatggctgtgaaattagtctccctaccaagtgatattcactggaagccttctcttggaacaactaattattggtctggtgactaggaggcaatatgcaggtagatcctgcctggagcacgtgttccaaggcagcagcttctgcgtcattttcaaaggacacagggaatgctggacattaacctggaggagcagtgctggatcatttctgctgatttaccttcttccttctacctaattccttcttgctatgtccgatatgctactgatgcgtccatttaattttagatatcttatcagatttttgtttgcttgtttgttttgtttatagaattgctgtgtttggttctttcctaaatcttctagggcacttttcatagtttcctgtcctctacagagattttcaagtttatttctttgtttttaaatttaattttcttttttttttattttaatagagatgggggtcttcttctgtcacccaggctggactgcagtggtgcaatcgtagctcactgaagatctcacctcctgggctcaagcaatcctcctgcctctgcctctcgagtagccaggactacagacaggtgtacatcaccatgcctggataattttttaatttttgtttttattttattattttattgtaagacagggtcttactatattgcccaggccagtctcaaacccctagcatcaagcaattctgcatcagccttccaaagtgctgagattataggcatgagccaccatgcccagcctcaagcttatttctttaatcaaaacaatcatagttattttaacttttgactaataattccaatttttcattgtggtattactctgtgactgaattatttcacttagtataatgttctccaggttcatccatgttgtgtactgcagaatttccttcttttttgaggctgaataatattacattgtctatgtaccacattttctttacctgctcatctgtcagtgaacatttaggttgtttccatatcttagctattgtgaataatgctacagtgaacatggaagtgcaaatatttcctcaagatagtgattttatttcctttggatatataccctgaagtaggattgctggatcatatggtagttctatttttaattgtttttcttgaccaacatgttctaatatatctttaatttttttaggaacctccatactgttttccacagtagctgcaccattttacattttcaccaacagtgtacaagagttctaatttctctacatcctcaccaataattgttacctttcagttttttgataatagtcatcctaatgggtgtgaggtgttatttcattgtagttttgatttgcatttcccagatgaatagtgatattgatatttatatacctattggccatttgtatgtcttctttggagaaatgtctactcaagtcctttgtcaactttttaatcaggttaggtttttctttggggttttttgttttgttttgttttgtttgtttttgcttctttgctattgagttgtagaagttccttttaattatatcttggatattaaccccttgtgagatatacggtttgcaaatattttcttctattccataagttgccttttaactctgttgagtgtttccttttctgtgcagaggctttttagcttgatgtagtaccaacaacctatttttgcttttgtttcttatgcttttggtgtcatatccaagaaatcatcacctatcccaatgtcatgatgctttttcccttatgtttccttctaggagctttacagtttctggtcttaaaaatctttaatccattttgagttgactttttgtgtatggtgtaagatacaggtccaatttcactctgatgacagttccaatattaggatctatggttctgtttaggctctcagttgtttctaccagtcttcctttatggaactttgttttctggggtacctgaattcttcagctgtgtgcaggttaatactacttttaaaaaagtatttgtgagcgagcatcaagggtgaaaaacaagtattttctttcagacaacatttgtgtgtgtttgctccaggttccctggaggcattgctacccagtgacgatgtgaaactggtcagcagactccagctacataggttatgaattctcccagggactggaggtggccatagcctgttagggagtttttttactttcctttttcatctcctacacctctcatttctgcattcagactttcccataaaatgtagtttgaattaataaatgcctactgtcttttcagtacttttatggtaatcttttcaaaagttttaatctagcttttttttttttttttctttttttgagacagggtcttgctccaacacccaggctgaagcgcagtggcatgattacggctccctgcaaattctgcctcccaggctcaagcgagtcaccagacccggctaatttctgtattttttatagagatggggttttgccatgttgcccaggctgttctcaaactcctgggctcaagcgatcctcctacctcagcctcccaaagcgctgggattacaggtgtgtgccactgcgccagcataatccagcatttttaattttcttaagtagaaggagatgctgtcagccattttaggaaaccagattttttgttttactgttcagtgagattgtctttaattgtggaatcaaatttttatattttagattctcctatcatatcatttatgtggtatcctatttgatctttccgatttttttcaaaactggttttcctaaaaaatgtgtcacaatttatgtagaatttttttgtgccacatttaagaattacaaagtgtgggccgggtgcagtggctcacgcctgtaatcccaacactttgggaggctgaggcgggcagatcacaaggtcaagagatcgagaccatcctggccaacatggtgaaaccccgtctctactgaaaatacaaaaattagctgggcttggtggcacacacctgcagtcccagctgctcggaaggctgaggtaggagaatcgcttgaacccgggaggcagaggtagcagtgagctgagatcatgccactgcactccagcctggtgacagagtgagactccgtctcaaaaaaaaaaaaaaaaaaaaaagaattacaaagtgtggtcctcatgtccacagtcccaactagttcctccatactgatgagaattaagtacaaaatagtaatacatctcactgctgcttctgccttctgagggacaatatttttcagcaagtatataaatataaacatataaataaataagtaaatagtagatatccagtaagtaaatatccagcttttagaagagactccctggtgatagctgaataattgaagattttcactactataacttgcttctgtgccataatccttattaaatgagtcatcatccaaatatacagcaccatggtggactacactcctaccttagcccttgcctttgccactttctttctttttcttttctttcctttttttttttttttttgagacagagtcttgctctgtcactcaggctggagtgcagtggcatgatctcagctcactgcaacctctgcctcccaggttcaagagattcccctgcctcagcctcccaagtagctgggattacaggtgtctaccaccacgcctggctacattttgtattttttagtagaaatggggtttcaccatgttggccaggctggtcttgaactcctgacctcaggtgatctgccccgcctgggcctccgaaagtgctgggattacaggtgtgagccaccatccccagctgtactttctttatcctaaatgctctcctctgtacttcattttttgggttaatcttcaaaaatacaagcacctactttaatacgcatttgtctggggctcccttcattgtgtactttagctcttcatttaaatgatcagttccagcccataaaatctcagtgatgtttctgagattctatttaccatctagtattaagcttcatatattaataatatgtagagggaggccaaggcaggaggatcacttgagcccaagagtttgagaccagcatgggcaacatggcaaaaccccatctctacaaaaatgtatgccaggcatggtggcacacgcctgtagtcccacttactcgggaggctgaggtggaagaatcacttgaatctgggaagccgaggctgcagtgagccataatcgtgccattgcactccagcctgggtgacggagaccctgtctctaataataataatgataataatgtagatacttgagaatgaaagtagatgtttattttcttccctgtaaatttctggacaccacgcctcacctccccttcccactgtactttggttgtcacacttgtcattcataacatctcattttacaggcttttttctggccttttgactcaattactgtccaagtcctattaatcatgttgttatttaattaaccaaacaaatatttctaatgttgctgaaatgtgtgtctccttttcccagctatttgatatttgtgactatgaatcttataatatcatctatgtagccagtttgttcatttttcgtatcctcttatcttctctatagtgatgacttccaactgtagcagggggaaaaaatacaatatatgtccccaaggctttctatatcctgcccaggactataaaatcactagaaatacatttcagatttattctctcgctcagcctacaacaaatcaataggtgtggaccagagttcacatgtctgatgtgatttgtccagcatttggttagaacactaaagaaagcacaagtagttaaccaacatttgttgagcaagatcagaacaatcaccctttgatatgaagtcagcacaaatcagaaaatagaatcaaccctctcacacacacacgctctaaaagatgctttgaaaattatatttgatgagactagatgtttgtcttcagagaaatctcattgctgtttctcattaagaaaaaatgtaactaaaagaaacacattcgtatatttaaatgccatcataactgaggcatagggaattatgtggaatctgaaaaatggtgtcttactctattttgtgctgctgtaacagaatgcctgagactggataactgataaagaacagaggtttattctcttacagttctggaggccgcaaagtccaagatcaagatgccggcaggttagggcccagtctctcacttccaagggtgtaccttgattgctgcattctctggagaggagaaacactattactcacatgacagaagagggagcacccactctcacaagccctttttatggtgacattaatcctaaacacctcccattaggccctacctcccaacactgtttgtcaaattggagattaggtttcaacatgagttttggaggggacaaaaataatcaaaccatagcaaatgaaaaatcagtgttcagggaacaggatatgctcattcttatgtttaacgtgagttaataaaatgaacaaacctgtagctaccaaatgttattaaaatatatcctaaaacataaaatgttcctcaacaatattttttcctcagtttcattgagatataactgacatataataaactgtccatatttaaagtatacaatttgaagagtatgacatatatacatctgtgaggccatcaccacaatcaaaataatgaacatatctatcaactctataagcttcctcatgccactttgtaatccctccttccacccatacttcccccaactcctgaccccaggcaatcactgatctatgtctgtcaccacagactatgattccatttatataaaatgctagaagagaaaaactaaagtatttattctttttggtccggcttctttcactcagtataattattttgagattcatccatactatgtgttgtcatcaatgctacatttcttttctttttttttttttttgagacagggtctgtctatgttgcccagtctggagtacagtggcatgatcatgactcactgcagccttcaactcccaggctcaagcaatccccctaccttaccctcccaagtaactgggaccacaggcgcatgccaccacatccagctaattactttactttttgtacagatggggtctccctgtgttgcccaggctggtctcaaactcctggcctcaagcaatcctcctgcctcagcctcccaaagtcctgggattacaggtgtgagccaccacaccaggcccacttcattcctttttattactgaggagtattccattctgtggatacatctcaatttgtttacccaaccttttgatttataatttagccttcttcaatcagcttgtgccctcctgtaaaaaggcttccatgaattctcttgtcacaggaaatattgatcaaatcacatttttgatgccacgaagctgagggcagacctgggacagatggtgtctcccactgagggagcggaggcccctgggaggtcagtttctcctgctgctgaacaccatcttccaatcacaacagcaaggaattgggaatgtgtcattttagctgtaaaggaatgtacatgcaaaatgtcctgattaatgattattaaaggaaagaccatttctcttttccccaaacccaacctctttgtcacttcagacccctaagggagcctgtgcaacatcggtgaaggttgctattgacacagggtaccgacatattgatggggcctacatctaccaaaatgaacacgaagttggggaggccatcagggagaagatagcagaaggaaaggtgcggagggaagatatcttctactgtggaaaggtgagatcttgccttcagcctccactggggacagtgagaaggtttcagttgttcattttattattcatcttccgtgtgtgtgtgtgtgtaattgcactcatgagtaggcagtacttaataacagtttgggtttgtttgtttgtttgtttgtttgaaagataagtgttcaaatgagaccaaaatcatgcaaaataggattttcaacattcttgtatcatattaacgaattatttattagtttgggagaagtaagcagagtagcatttaggggagagaaagagggttttaaaaatgtatttggctgggtgcggtgtctcacgcctctaatccgcacttcgggaggccgaggcaggtgttttgcttgagctcaggagttcaagaccaacctgggtaacatggcaaaaccttgtctctacaaaaaaaaatacaaaaattagccaggcatggtaacttgcacctgtagtcccagatacttgggaggctgaggcaggaggatggcttgagccagggaggtcaaagctgcaatgagtcatgttcatatcactgcactccaacctgagtgacacagcgagaccctctctcaaaaaaaaaaaagcatttgagcaaatgtaattaactcagacatggtattcagattttgtttaataaaagcaaacaaacgtaaattaaaaaaaaaaaaaaacaagctcataaggtcaccaatccaaaagccagctatgtaggcttcctgggcaggcacattatgcaagccttttgcttaatgactcatattataggagtcatttcttactatgatagaggctaaagttagcatacaaggaaaaggtggtcaaaacatgctttaaattgtcctttaactttaatcctttaaattgtccaaaaagtacagttgtgaatagaaagcaatatttatacgtatacaatgtcaatatgggctgtatgtaataaagcatacttgggcgaaatattggtgtttacttacgtaaacagaaacagtgtgtgcagctgagttcatgtaatgtgccattgctattgcctcatcaggactgtcttcactgcagctcagcagcacctgagaggcaatgtgggggtgattaagagcctagactggtgcaaggttgcccaggtcagaggcccagatctgtcactattggctgagttgcctagcatttctggacctcaattttttttctctgtaaaatggggataataatgtcaactatttcataaagttgttatgagttcacatttacaaagcactcacaccgaacctggcacaaagctaatactatgtatgtttgttgaataaaagtaaattaaaatatcatcagcctatgcccaggaatgaaaaagaaagtaaaataaatatcaaacagaatttccacttagatgggattgcaataggaacaccaaagagacccagagtagcaatcaaaacacacgtaacacatttttccactactctcttcatgttaaattttctctgtgtttttaaggcaagaaaaaaatcattgtccaacagaggaaaaaatcagatattaccaattttgcttaccctttcttgtgaccaaaaaaagtatgattcaggccgggtgcagtggctcaagcctgtaatcccagcactttggaaggcagaggaggaaggatcacttgaggtcagaagttcgagaccagactggccaacatggtgaaaccccatctctactaaaaatacaaaaattagccaggcgtggtagcaggtgcctgtaatcccagctacttgggaggctgaggcagcagaatcgcttgaacccgggaggcagaggttgcactaagccaagatcaagccactgcgctccagcctcagcaacacagcaagaccccgtctcaaaaaaaaaaaaaaaagaaaaaagaaaagtatgattctaaacttatatccccccaaaaaaatctgtgagcaaaactgatattccaaaagatgtactaatttgtcctgtgggtataagcaaccttggcaccgtatgtctcagacacttaagggtacacatgctccagtaggatcaaccaaaccttgatccttcattatgtaatgccttagcgaaagagtaatttaattgctctggggtctaagtaggaccaaataagaacaaaagatcagtgaaagcaaatctaaatctatgcactaatttaaaatttcaccaggctttcacaccacctgtcacaatgtgaaggacccagtgaagccacacgcataaccatattccttgctcattttatcagagtggcatgacaataaagtatcacgctaggtcaggacatctagaacattgtgtaaccctagttatacaatgaggaaaaatgcaagcactaagcatcaggaaattcacccggaaatggggaagactgccatcaaattaggtactctgtggtcaaggaggatctgtaagtctcttgtggtagatttgcataaaattatgtctggagatgtgagggtgatctggctgtaacatatgtcaccccattagtcaccagggctaattcagctgatctggctgtctaggcaattgtacctcttgaagctgcactctcagtggaagaggacggctttccctgatgaaggaggagggtttttaggtcaagtgtatgtgagtagctgcactcccctactagaacctccaaacaagctctcaagctaggctctgagtgtcaagagttttatcagctcatcctatactcagatgacactgcatcataaacatatttttgtgaaatgaaatgtgtgaataaaatgtgtacaagcggctaggcacggtggctgatgcttataatcccagcactttgggaggctgaagtgggcagatcgcttgagcccaggagttaaagaccagcctgggcaacatagtgagaccccccatctcaaaaaaaaaaaatgtgtacgagtgttttacaaagaaaaaggggctgccttatcgtaaaaagcgtgtagacattagttaattctccctctttgattctttcagctatgggctacaaatcatgtcccagagatggtccgcccaaccctggagaggacactcagggtcctccagctagattatgtggatctttacatcattgaagtacccatggcctttaaggtgagttcagatgcccaaaggtcaggtctctgcaccctggcaaccatgagccaatagctatgtgcatgaagctctgcaccatgagccaatagctatgtgcatgaagctctgcaccatgagccaatagctatgtgcatgaagctctgcaccatgagccaatagctatgtgcatgaagctagcgtattacttggcaccacagaatattgtggtgttttgttaccacagatcagagagtactgacctagtctgacaaatacccgagaagattatgttagcagactcaggcttggtttccaagtttcttgattttttaattcaatgcaatttctattataccatgtttttacaactatagtttaagctctctgcatcaaaccaacatgtagtcctctaactgtagcccaccattgagacacacacccttcttcccactcacacagtcacaatctccgccctcatcctcactttgttaatgctgactcttgttcaaatgtcagatttctaacctaagtcttaaaaatttagaaagacccagtgtacaattatgtgttgcttagcaatgggatacattctgagaaatgtgtcatgaggtgactttgttgttctgcaaacatcatatagagtgtacttacacaaaccgaggtggtaaggttttatttaccatggtagactgcattacttttgtaataacatgaataaaacgcaaacacgttgtgcctaaatggtatagcctattacagacttaggctagatagcccagccgattgctcctaggctataaacctgcacagcatgttactattctgaatactgtagacgatggtaacacaatggtaaatatttgtgtatataaacataacatagaaaaggtacagtaaaaatatggcataaaagataagatacacctatacctggcacttaccatgaatggagcttgcaggataaaaattggatgagtcacggagtaagtggtgagtgaatgtgaaggcctaggtcattactgtacatgactggagactttataaacactgcacacttagggtacacaatgaatcacataatattttttcttcaataataaattaacattagcttattgtaactgttttcagcttataaatgttttaattttttaactttttgattctttgtaataatacttagtagtaacactaatactaattacttttttttttttttttgagacagagtctcgctctgttgccaggctgaagtgcagtggtgccatctcggctcactgcaacttccgcctcccgggttcaagcgattctcctgcctcagcctcccaagtagccgggactacaggcaagcaccatcacacccggctaagttttgtatttttagtagagacagggtttcaccatgttggccaggatggtctcgatctcctgacctcatgatccgcccacctcggcctcccaaagtgttgggattaattacttttttaataacatgaataaaacacaaacatgttgtacagctgtataaaaatattctttctttgtattcttattgtataagctcttgtctattaaatttttttttaaacttttttgttaaaaactaagacacaagcacacacattagtctaggcctacacagggtcagcatcatcaatatcagtgtcttccacgtccacatctcgtcccactggaggttcttccggagcaataacacgcatggagctgccatctcctgtgacaacagtgtcttcttctggaatccctcctgaaagacctgcctggcgtttttttacacttaacattttttaaaagtagaaggagaacattctaaaattatgataaagtgtagtagaacaaatatataagttgtatccatagtaaaaacagaaattgtttactatcattatcaagtattatatactatacatgattatgtgtgttctacttttatatacctggcagcacagttggtttgtttacaccagcaacaccacaaacatgatgtcactaggtgataggaattttaaactctattataatcttatgggccaccatcatacatgcagtccaccattgaccaaaatgtcattatgcagcacatgactctacttaaaagtgagaaaataaaatttacttctctgtgactaactaatgacatttacatctttttggacttgatagataatttctattcttatttttgatgggttcaaaggcacaaaaggtaaaattttaacagtgagaaatgacacaatatagtgacattaccttccaactgaacctataattgggaaatcaatatttgaagcttaagtacgacatgttttttggtgtttgtttgtttgtttgcttaaggtagggtcagccggggacagtggctcacatctgtagtcccagtactttgggaggctaaggctggcagatcacttgagtccaggagtttgagacaagcctgggcaacatggcaaaaccccatctctacaaaaaatacaaaaattagccaggcttggtggcatgtgcctgtggtctcagctacttgggagactaaggtgggaggatcacttgagctggggaggtggagggtgcagtgagccaagattgcgccactgcactccagcctgggtgacagagcaagaccctgtcttggaaaaaaaaagaaaaaagagtgggggggcagtcttgctctgtcacccaggctggactgcagtggtgtgtggctcactgtagccttgagatcctaggctcaagcaatcctcctgcctcagcctcccaagtagctgagactacaggtgtgtgccaccacactcacctaatttttcaatttttcttttgtagagacagggtctcgctatgttgaccatgctggtctggaactcctggcctcaagccattctcccacttcagcctcccaaagtgctgggattacaggcatgagccaccatacctgacttcacatgctttttgaatcttaagtttttttaaacaaaaaatcttttttgctaaaatatttttagcactttattattttttaagtgtcaagcagacagaattttagccaacaaaatattaaaaattatgacatgtttaaaagataaatgaacaagaatgagagtcaatagcatagatttttaaagggttgggttattcttccaataatacctgactgtgaggaagaggaatgaaggaaagagacaaagaggcttatcgggatgaaaggatgagtaaaataggcacaatggaaggtcaagggaaacacctagaggtatctaatgtgggttcaggcttgataaccacctgattagaatctgggaaagtaaaaatcacgtaacagaattcatgatggaggcataaggccattcagaaggtaagtaaaattaggaaacacaaggtaagaaatatggagcagaaatgtgggtcataagtgttgagaaattcaaagtgcttagaaatcagagacagaatggataattaacatgaataataatgtggcatcaaggagaaaagggactgttccctgctctcagggagatgggaggaagttgaaaagacattgtctttccctaaagcagacaatggggaaaatgttttccataaaggaaaactgagtttcacaaaggtgaaatgctagaggaaaaaattaaaatttttgttttgttttgttttgttttgttttgagatggagtcttgctcttgttgcccagactggagtgcagtggcatgatctcggctcactgcaatctccgcctcccgggttcaagcgattctcttgcctcagcctgctgagtagctgggattacaggcgcccgccatcatgcccggctaatttttgtatttttagtagagacagggttttgccatgttggccaggctggtctcgaactcctgacctcagctgatcggcccaccttggcctcccaaaatactgggattataggtgtgagccactgcgcctggccaaattaggaacaaatttaagagcataatggattttgtccaattgcttgattcccttctcagtctgttttgtgctgctataaaagcatgcctgaggcctggtgcagtggctcacacctgtattcccagcaatttgggaggccaaggcaggtggatcacttgagcctaggagttcgagaccagcctggacagcatggtgaaacctggtctctacaaaaaaaatacaaaaaaattagctaggtgtggtggtgcacacctgtagtcccagctgctcaggaggttgagatgggaggatcacctgagcctggggacatcgaggctacagtgagccataatcatgccaccgcactccagcctggacagcagagtaagaccttgtctcaaaaacaaacaaacaacaacaacggaaaaagaatgctatcattcagaaacatttcctttaaaagaaaaaaaaaagaatgcctgacactgggtaatagataataaacagaaatgtattggctcaaagttctagaagctggagagttcaagaccaaagtaccagcacctcactagagccttcttgctatgtcatcacatgctggaacgaggaagggcaaagagcacaagaaagcacccctcctcgtctgagccctttttacaatggcattaatccacgactgaacaactcccattaggccccacctcccaacacagttgcactggggattaagtttccaacacatgaattaggggggacacatttaaaccacagcaattcccaataagaaaatccctattaccaaagtcaacaaagactttcatcctgccaaattcaatagacattttgtcttcctattatttgatctctttcaatacagttgactaccaccttcttctgtaaacattttcttctcatggtgttcgtgacatctcatgaccctctcatggtctttggcagcttcttctctgccagcttccaaatgttgttatgcccagtcctctaccctcaatattcttgtcttactagctacactctctctataggtgacttaatccaatcatgtggatttaataccattttacatgctaatgactccaaattttatctgtagccatgacctctctctgagctcttgacttctctgttcaactgcctccctcaatatccacttgaatgtctagtgaccatttcaaagtcaaaatatccaaaatgatattctggattcctagccccaacctcaagaaatggttaccaccaaccacccaaggcatctgggatcatctttgatttctccctctccctcattcccaccaccccacctcatttccaagccaacattaaggcatgctggctctactactcattcatgtgctaatctgttcccttcttttcctctctactgcagttgccccagtcccagacaccatcagctctcccctattgcatacagcccgttaggttgatttccccagaagcagaccctgagatgaagagaatgcatacaagagtgatttatttcgaagtactgttaagggagtggggaaatgtggctgaaaaataagaggttaagcagatgtgaggtagaaatcagagtcctacagagagcaacttaggctaaatgtcacagaaagctctggagacaaagttgttcacatctcagaattacacagtcacaaggcaaagaaacaaatattgatacttgtaactttagttcaaaggctgtcccagcagggggagcagggtgtaaattcctgggcacatctaattgagtagatacacaagtcccagtagcctgaggtctgtcctctaacagatgcaggtgtcagctgtacagagtgagaggacagtgcacacaagacaggtactggcatcccaggaagcatgggcaggtgtcttaatccagctgggccgctatgacaaaatactttagactgggtgatttagaaacaatagacattgattgctcacaattatgaagactgggaagtctaaattctattatttaattcccagatataaataaaatgaattacatttattctttttttttttttttcagccaggagatgaaatataccctagagatgagaatggcaaatggttatatcacaagtcaaatctgtgtgccacttgggaggtaagttcaaatgtgcttcttattttaaaagacgatatttttaaaactgtgatctgattattcctgtcatatttatggagagagatgcaccctttactttcaatgaaaagtaacagtcagaacaggcattcctaaccataagtacaggtatatgaaatctccacttctgggtactaaataattcttacttttgttttgctggaatgccaaagaaaagagagaggggtggaaggaaaaacagtgtaaacaaaatatgttctaatataaaagtaattaaaatatatgaataagataaattcacaaatcaaaaaatatatatcaagttgttaatatgatgcctacaagaaacaaacttaaaatgatacataaaaaaactgaaaaacaggccagtcgcagtggctcacacttgtaatcccagcactttggaaggccaaggtgggcggatcatctgaggtcaggagttcgaaaccagcctggccaatgtggtgaaactctgtctctactaaaaataaaaaaattagccaggcgtggtggtgggcgcctataatcccggctactcaggaggctgaggcaggagaattgcttgaacctgggaggcagaggttgcagtgagccgagatcatgccactgcactccagcctgggcgacagagcaagatgccgtctcaaaaacaggaacaacaacaaaaacctgaaaagcaattctgttttttatttctgggaaagctgctggctcttttcccaagatcacaagagtagacaactataggaaaataataaataaacccttatggattcgtggtggggagggatattttgaacttgtttgcttagaggtggtgtggcagctccgacctagagtagaagtcaacccaacaagcaggaagaagataatacaggagaggatcggttggtccttttgcacttccttcacccctgccatagcctgggaacaaatgttgccgcacaggtggaaactcaggactcagttgtagagcagccttgagattctgaacttgtgaaaaactgaggaaaaacataagttacccactgacctctggcagtttttttttcccaccgatgtgattccaaactccaaaagtttggaaattacactctggtaagtacctctttctatatacttgcctgtgaggcaacagctgaaggtctgagctgtggagttgtttcgaggggcgaggaggaatgatttatttcccagtgcccggggctctgtccaaaagaacacgcagtcactcccgacctcattggagggaatcaggtttggacagttggacattttgaacattctgttctaagggactgcctaacaggatagccagtatccccaggaaaaaatgatttcacagcccaaagtaataaggcatttgtttcacaagaagacaatacatctcaattactgatccaatgtaaacagaacagagaaccaggaacttctaaattaaccaattaatatattagagaacataagaaaagatattagcaatataaaacgtgaacaaacaacattttaaaaaacaagctaaaataaaaattaaaaaataaaaacacaatgcaattggttgggataaatagaagaaaatggtcaaattgagatatcagaatgaggaaatctctcaatatgaagaagaaaaggacaagaattttttaaaatatgaaagaaaagctaagaaattcaaagaataaaattagaaattccaatatccacacaactggactctaagaaaaaagaaagaagaaaaaataaaaggaaacaagaaggtgggcatagtggctcatgcctgtaatcccaatgctttgggaggctgaggctggaggatcacttgagcacaggagttcaagaccatcctgggaaacatagtgagacacccatctctacaaaaaagaaaaaaaaaggggggtaatagttaaagaaaaaaaaaaacacgaagatcttaaagggaccatggagcacaaaagaggaaagatgaggaatatcacgggtgaggtgacctgtagtcccagctacttggaattctgaggtgggaggaccacttgaggccaagagttcaaggccacagtgtgctatagtcatgcctttgaacagccactgaactctaacctgggcaatatagcgagatttcatctcaaaaaaaaaaaaaaaaaaaaaaaaaaaaaacataaagagaaaatgttaaaacttccagagcataataaataatccaataaagaaggcaaaatggaataacaaaaataatcaatccaagacaaagcagaaaaaaaaagaaaaggggcaataaacagatgagaaaagtagcaaataaagggcaagatgggagatttaaactcactaatatcaataattgcagtatatataaatggtctaagcaccccaattaaaaggcatagattatcagaatggatataaaccaagtcccactatacattatacacaagaaatccatcttaaataaaaagtcaccaacaggttaaaagcaaaagtctttcaaaaagcaaaaggatagaaaaagatatattaggctaacactagtaaaaataaagctgcagtcgctattttaatatcaacaaatacttcagagcaatgagtattacatgggataaagaagattattatataatgataaaggagtcaatcctaaacatctatgcccctaataacagagcttcaaaatacatgaagcatcatctaagagaaccgaacagagaaagagaaaaatccacatttatagtcagagattctttttttttttttttttttttttgaggcggagtctcgctctgccgcccaggctggagtgcagtggcgcgatctcagctcactgcaagctccacctcccaggttcacgccattctcttgcctcagcctcccgagtagctgggactataggtgcccgccaccacgcctggctaattttttgtacttttagtagagacggggtttcactgtgttagccaggatggtcttgatctcctgaccttgtgatccaccctcctccgcctctcaaagtgctgagattataggcatgagccaacgcgcccggcctatagtcagagattctattaaaatgatatcatactaaaatgataagtatacagaaagagctataggatataggagatttaaacattatcaaccttcttaacctgacatttatagaacacttcaccaaaatataagagtgttttctttccctccctccctccctccctcccttccttccttccttccttccttccttccacgagtctcgctctgtagcccaggctggagtgcagtggcgcaatctcagctcactgcaacctccgcctctcgggttcaatcgattctcctgcctcagcctcctgagtagctgggattagaggctcacgccaccatgcccagctaatttttgtatttttagtagacatggggtttcaccatgttggtcaggctggtctcgaactcctgacctcgtgatcaacatgccttggcctttcaaagtgctgggattacagatgtgagccaccgcgcccggcaacataggccatttttcgagccataacataaatctcaataattcttcaagtattttaattatgcaaggtatgttgtctgatcaaacaggaggcacacatgtaaataacccataagacctaaaaaaattaaaatctttatctagatgtaatttatatattagcaacacacaattggaaattatttttaaaaacaatgctaaacattaaatatttaaagataaatctaaaagaatctgtgcaagagctatacagtaaaaacaacttattactgaaagaaataaaagatgatccaaaattcaatggagagatataccatgttccttgatcagaatatcaagatgttaattttccccaaattcatctgtagattcaatgtaatcccagtcaaaatcccaatagaaatggaaaacctacttctaaaatttatatggggcctggagcagtggattatgcctataaatcccagcactttgggaggccatggcaggtggatcacatgaggccaggagttcgagaccagcctgggcaacatggcaaaaccctgtctctactaaaaacacaaaaattagccaggcatagtggcgcccatctataatcccagctacttgaaaggctgcagcatgagaatcacttgaacctgagaggcggaggttgcagtgagccgagatcccaccactgcactccagcctgggtgacagagtgagattctgtctcaaaaaaataaaataaaatttatatggaagtacaaataacctataatagccacaacaactttttgaaaaagagcaatagccaagcacagtggctcatacctataatcccagcactttgagaggctgagtggggagaattacttgagcctaggagttcaagaccagcatggggaacactgagaccccgtctctacaaaaacatcaaacaattagtcgtgcatgggagttgcatgtgcctgtggtcccagctactcaggaggctgaggtaggaggatcacttgacctggtaggttgaggctgcagtgagctataccactgcaacccagcctcagtgacagagcaagactccatctcaaaaataaaaagcaataagtttggagggcttatactaatttcaagaattattatacaactattagaatcatgacagtgccatattagcataaagaggaacatatagatcaataaaacataatagagaatgttaaaatagacccatacacatatatggtcagttgattttcaacagaaatgccaacgcaattcaatggggaagggtaatcttgtactacaactggcccataccagcttgcaagaacccgttgtgcaaacctcttcctaactccacattcagtgatgtcgggttgttagcttgaatagcccggtgtgaatagttacatcacagacattctcaaatactacaaactggggagcttttttcttcctggatagctggttgttaaacatttatcagtattccactggaggtgttcatgatcttgattgtaatgatgattttacaggtgtatgcacacattaaaattcctcaaaatgtacacttcaaaaatgtgtagtttattgtacatcagttataactcaccaaactagaaggcaaaaataatgcatgataaaaagttgcacatctacacatgctcagaaattttgccacataaagactcacactggaaatcattaggtccgattgatgtactaagtgaaaggaacaaaaatctaacagatgctccaaaaaaaatgcataaagcaaaagtgatcaaattaaacttaaagtgtgtattatctataaaaatattaagatcaaataataaaaggaaaatgaacccataatacgctacaattaaagtttatatatatactattagcatcacagatgttgagggtagataaataccgtgtgaacatgctaagttattgtctttattagaaaacttcttaaaagtaataaagagttaagaagaaacaggataagtgggataaattgaaataaatcaagatggtagaaacagttcaaatatatgtatggttgcaataaatgtagataaaataaactcacctagacagagattgacaatttaaaaggaggcacctaagcaaaaagacatgtgaaagttaaaactttacaggtaaaaaaaaacacacactcaccaaataccggaaaaagttggtattactatattaatatcatataacacagacttaaaaattaaaagcattattagggataaaaagagttgtgcgtgaagatgaaagattgaatttaccaaaaagatatactaattttaagcacatatatatcaaataaagtatcttcaaaatatataaaacaaaaaattgacagaatacaggaggacattggctcatgcctataatcccagcactttgggaggccaaggtaggaggatcacttgaggccaggagtttgaaatcaacctgggcaacataatgagacccccctcatctccaaaaaatattttaaaaacaaaatttagccagtgtggttgcagatgcttgtagtccagctactcaagaggctaaagagggaggatctcttgagcccagaagtcaaggctgcagtgagcaaagatcccaccacagcactccagcctgggtgacagagcaagatactgtttcaaaaaaaaacacagaagaacattaataaatcaccagtatagtaagagatttttgacatattcctttcagtttttgacatattccttctgttaattttgacatattaatttcagttactgagaagccaagaagagctagacctaattttatatataacatgtgtgtatgtatatttacatacatatatgtatgagagagagaggagagacagagtgttacatccaaaaatgggagaatgtatctatttcacatataccagaatgtttataaaaattgccagccaggcgcagtggctcatgcctataataccagcactttgggacactgaggcaggtggatcacctgaggtcaggagttcgagaccagcctaaccaacatggtgaaactccatctctactaaaaatataaaactagccgggcgtggtggtgcatgcctgtaatcccagctacttgggaggcttgaacctgcgagacagagtttgcagtgagccgagatcgtgccatcgcactctagcctgggcaacaagagcaaaactccatctcggaaaaaaaaaaaaaaaagtgcccaggtactatgccataaaaaaagtacccaaaaatttcaagaagtaggatcattttaaaaaattgtttttaattgagatagggtctcactctgttgctcaggctggagtgcagtgacacagttataactcactgcagcctcaatttccccagctcaagtggatcctcctacttcagcctcctaagtaactgggactacaggcatgcaccaccatgcctagttaattcttgatttttattagagatgaagtctcactctgttgcccaggctggtcttgaactcctgacctcaagtgatcctcctgccttggcctgccaaagtgctgggattacaggtgtgagccatcgcgccctacctgggatcactaaagtgtggtaaataccttgagaaaatacaaggggaagatatggcatacacatgttttccaaattcaatcatagaattactgccttttcccaccatccttcttttactttttttcgcaagatgcttattaacatacccaggaactttcctttttaaagaattcacagtcacccttataaacattcattcttgcttcttgtgaggcttgtttgttgacctgtggacatttactctacaggcgatggaagcttgcaaagacgctggcttggtgaaatccctgggagtgtccaattttaaccgcaggcagctggagctcatcctgaacaagccaggactcaaacacaagccagtcagcaaccaggtacagcctaatagcttccactagggtgtggggagtgggggcaggatttacatgacacaaagaagcctcagctgggagtcaggaaggctcatgattgctccacctaaatctcatcatgggaccctgtgcaagtctttagacttctttctattggtgtcactttaaaaaacggacttggggcctggtgcggtggctcacgcctgtaatcccagcactttgggaggccgaggcaggcgatcacgaggtcgggagtttgagaccagcctgaccaacatggtgaaaccccgtctgtactaaaaatacaaaaattagctgggcttggtggcacatgcctgtaatcctagctactcagggctgaggcaggggaattgcttaaacccgggaggtggaggttgcagtgagccgagattgcgccactgcactccagcctgggcgacagagtgtgacttcgtctaacaacaacaacaacaacaaaaaaaaatctaatgaaaatcaatgaaaaaaaatgagaaaaaacactaaggctcaacagaaaaaggagtaaaaggaatgaacagaaattcacgaaagacaaattgcaagactggtacacatgaaaaaaaactcactattaattagagaaacttaaattgaagtgtgatttttctattgcacatcaaattagcaaagtttttgtcttattaatatttttaaatataatgcccccgtgtaggcaagtgattaaatgctagtgagtgcaaattggttcagccttactaaaaaaacaatttgtcaatatgtatcaagggccttaaaaaatgttcacagtcctttatttctgcaatctatgctaataaaaaaatatcagaatgcctagatagactgatgtgtgtttactacaacattgttcataatggaaaaaaatggaaacaacataatacaaaaaattaaggggatgattaaataagttacaagacattcatattatgtgaaatcttaacaaaagatgttcttgaatccattttaaggaagcaaaatgaacaagatatgaagggacagactaggacacgaaatgtatatagtatgaaggagattctattaataaaatggattttattgaagaattttttttaacagtacaattgcattcaacaacgtggccttgattttgtgctctgctctccaatgcaaccacataggttgagtgccatccgtatttcacccagccaaaactcttgaaattttgccaacaacatgacattgtcattactgcatatagccctttggggaccagtaggaatccaatctggtaagtaaaactttaggaagcatttcctttggtgtagagtgtgaggctcatgtgaactactgtatttgattggaatgccttttggtttgcctgtgcaacctcttcaagtcattatctgtatatatgaattagaacttttcatactttcctgactgagctgttgtaaaattgattacattataggtatgaaattgcctatcagtgcctgatatataggaatgctcagtaaaagttagtttaattattatttgacaaaggagtttctatggccatgttttgcaaattttcaatcttttgatctctgtattcaatagtgatacttctactatgatgtgctccataaacttaagtagaaatttttctactttaagatgattccaaaagttgtgtctctatttcttccacttcagtcttcctacctttccctgtatgccagctctctctataagactcatcaaaaaatattatttaccctctgaaggaggcagctccataaacttgccttgcttgatcttcccatactacgagtaactctccattcagtgcatactctgcactcagagaaactggttacaggtgacctgcagtgtcctggtaggtgactgggtgaatgggaagacagaggaggaggatggtttattaacctttggttctcattatgcaaactaattatgatgcatgttttgatatttttaagggtgaatgtttcttctccacctttgttaaaggatgcacttctaaactcattggggaaaaggtacaataagacagcagctcaaattgttttgcgtttcaacatccagcgaggggtggttgtcattcctaaaagctttaatcttgaaaggatcaaagaaaattttcaggtaagagaattgcttttggagatgtgaaaagatgggtatgtttgctatttttgcttttatagaatgtgttcagcttaataggaaacctgtaacactctcatattttattttataccagccccttgacccatgtagcccatatctaggtttaattttcattcaatttgagacaattgctagtacttcagagattgctttgctacttgtacactatccagatctcttatattttctctttccttatctactttttattttttgttttaaattttttttttgtttgtttagagatagggtcttgctatattgcccaggctagtctggaactcctgtcttcaagcgatccttccaccttgacctcccaaagttctgggattacaggcgtgagccactgtacccagcctcttcccttatctattgacccttgacactacctactcacttctctaccagcacaacagaaattgagtgaataaaatttggaattcataatagtcaactttccaccttcttaatggctctggtaaaagttgaggacaaatttgaaaattattgaagaggaccatttagacttcatgaatgctaattgcctttacttccctctataagtaatctatgacttacgttgtaacttccaagtgaagaaagaactagacaaaggggtaattcatttattccgctactactaaagactaaactgctaggtaaacacaaccatagaaaagtgccatacaaaattaattaattacccattagctaatttacatttcaaaagtaaattgcctgtttagccctactcataattaaagataaataaaaagtaagatactagttgtcccttcatatcagaaaataatcaaaatacttggtaatatttggggaaacaggcgctttgacacactattgttagaaacattaatttgtatgagatatggaagagtaggttaaattatttcatgtccatcaaaattcaaatgtacatgttacatgatttatttatatgtggaacctaaaaaagttaatcacataaaagtaaggagtagaatagtggttaccggaggctgagattattgaagggagggtgctatgaggagatgttggtcaaaaaagttgtgattacagttagaaggaacaaatgtcaagagatctattgtacaaaaaggtgtctatagttgatgatgatatagtgtattcttgaaaaacataaagagagtgcatcttatgtgctcttaccacaaaaatgataactatatgaggtaatgcatttgttaattagctagatttaaccactccacaatttatatgtatgtcaaaacatcatgttgtatatgataaaaacatacaatgttatctgtcaaattaaataaattcaaatacacttatccattgactcagcagtcttaccctatagatgtatttgcacatatatacatgggtgcacacacacagacagatgtttattatagaattctttgtaattttttaaaaactcaaaacaatcttcaacaggattttataaaacaagctatgacatatttgtacactgaaatatcatatagccatttaaaaaatacaagtactgacataggaagatagccacaatattagacaattacatcttcagagcttttttgctacatgatagaatgcaactcaaactttagcaaaaaataaaagataatttattggcttgcataactggaaagtccatgagtagatcagaaatggctagacacaggtactcaaatgatttataaagagatttagtcctctctctctctccctcctttctctccacccacatggtggcacagacaattcctaacagctccaggataatcaattactcatactcagtgaagagtgaagatgatcagaaacaaagtcttctatcagggtctctatcaatccctgattagctcctgaaggtcaccctcatattacccactgtggccactgagtaggataccctgaccccagggctatatccctattcctgtgctgaagaagttaacagacagctccactagaagggggaaggaaagttcgtaaaaagaaaaaaggcgaaaagatgctgaatagttacatcaactcctgacaataacatttgccaaaatgcctcatcctaaaaagtggttgacactcttttccacaatcttagaaagagatcaactgcattactaatgtgtaggctcattgaagattaaaacacattttgatggactttttgaggactgaaaattttgctgttcaaaaattataggagtgttacaagtgacctttgcgatggaaagcatttggactttatagcatctagcaaatcgcaattttgtaccagagaaaatgccactctccttgaaattttcattgtaactaattatgttatattccatatgtttccatagccttgataataaaagaatggaactcagaggtcacatattccaagaaaaaaacggatacagatttagaaggaaaatgagaatgaaaatcacagccaattctcactctttagggaatagactcacccaataaccatgaattttgctgggtatgaaagcaaggagcaacaaaataataaattatgctctcttagaatgaaggtaaaataaactgttagaaatattttaaaagaatggcaaagatcaataaagcataaagaataaagggaaaaataaatattttgatgaaaaaagaaaagcaaaagaaaataaaaactatgtagtaaaaagttaagactgggcacagtggttcacacctgtaatcccagcactttgggaggccgaggcaggaagattgcttgagaccaggagtttgagagcagcctgggcaacaaagcgagatcccattgctttaaaattaaaaaaagttaagttaaatcatcagtttaggctgggtgcggtggctcactcctctaatcccagcaccttgggaggctgaggcaggtggatcacctgaggtctggagtttgagaccatcttggccaacatggcaaaaccccatctctactaaaaatacaaaaattagccgggcatggtcatgggcgcctgtaatcccagctgctcaggaggctgaggcaggagaatcgcttgaactagggatgcggagtttgcagtgagctgagatcataccatagcactccagcctggatgacaagagtgaaactttgtctcaaaacaaataaacaaaaaaccatgagtttaaaaactagataaaattaaaggtaaacatgaagaaagctaatacggagccaggatattttaaaagttaaaattttaaaaaaaagaaattataccaggtgtggtccagctttgttgccatcatccactggcctccattctttgaagatgttatctctgggctcactttcactttctccaacactcttcctctcataattcttagtgaattcaacatccacaccagtcgttctccacccttatccgacagctctttgacttcctctcccataagaatcttgtcctatatatttcagccactaattcccatgcctagcccttggaaattgcaataacaacttcctaataaatcctccatagcctcaatttcaaacatccccctctctttcctacactagcaattgttcctctctactgtgtaactcccaccaacattcacatatgtagtaacctcctatcttaaaaaataaaatccaacctagactcactttcctctccaagtattatccacttctctcttctgtttcaaacatctggaaagagaagttgttctcgctgcttcccattcccttcccccactatctcttgaagccattcaaaccaaacttttaccctgaccatcccactggaacagcccttgtcaaagttaccagtgacctccacattgctagatccagtaattctcagtccttgtcccacttggtctttcaaccacatctgatacagttaacaatatctccttcttcaaacatttactgaaagggaaaactgtaggggaagcagtttgagaagaactatcaggagctcagttttgtaatatgagatcctcattcacttaggataatttgtgccatgggagaaaaaaaagaccactgaaaattaatccacatacgacaagaaaaaacatgacacagaaataatgtagagagggtgaatttgaaagcttatattaagatcgaaaccaaagtttatgaaagtaagttcacttctattctcaacaaaatgtaggttacaattgcaagtttattaactcagaagaaacagtgaatcagtgttgattttttttaaatatgcttgacaaaattacataccacaacatgacatcctctatttcacaaaagttttgcagaatgttcataaagagaataattatcacaaaaattttggagggctttatctgaaggagatttttaattctttaatttttttttcaagtcacactcttttgacatatctatcaaagtagatttttaactgtgcaggattcttctttgaaaaagatcatacctataattagaacaaatctccaagatcattttctttgatttcataaaatcctgcatctttgcaaggtttgcaacctcactttgccattagattattccatatatttactggataagaggctgatcctccaagacttaaaggagaggactagtgtttagcaaaaaagaagtctgagtaaggattcattttataggcgattcattcatttttatattgtgcacatttttgattccttatgtaatctcataaatgccaataattggataataaatcataaaagaaaatggttccctgaaaagagtacttggaaagaatccatggagggataattaagtaaatcgtgttccatctacacaatgaataccatggctaaatgaataaagtcaggttgcatattgtgatagaactatcactggggtcactaagatattatgtgaataaaggaaagttgtagaatcataaagatatggtccaattactgcattttcctcttaatgtgtgtagtatttgggaggaatatctgggaagggaaataagaatggggtgatgagtgacaagattttcattatttattccatatgggtctatgtacttctacagtgtttcatttctttgcaaagagcgtatatttatgtactacttatataattaaaatctattaataattaaatatattaaaagttaaaggatagaaagataaaataataaagagaagataggttatatacagataatccaaatgttaaaaataaaaggaagtgaaaaaatatatataaatgttaataagggacaatcataaaaccagaatataaataaagtataaaatctaagaaaaataaaacaatggaaatgtaattagaataaaaaggtagaagagacataaaaaatgagagaaaggatttcaacatagcaaattaaaagttaaaaacaaagcaaattaaaagtttttttaaaaagcaaatttaggccaggcgtggtgaggctcatgcctgtaattgcagcactttgggaggctgaggtgggaggatcgcttgagttcaggagtttgagaccagcctgggcagcatggtgaaaccccatctctacaaaaattgaaaaattagccaggcatggcaaaacatgtctgtagtcccagctacttgggaaactgaggcatgagactagcttgaacccaggaggtggaggttgcagtgagccaagatgataccacagcactccagcctgggtgacagagtaagaccctgtctcaaaaaaaaaaaaaaatcatatttagagactcagaattttttaagtgtaagacagtagttcagaatcaaaagaccagcatttcatacagaaataagaattcttcacatttgaaattttaggggatttcattaacatttgtggtttcagagcatttggaatttcttgtaagatgtccccagaaagaccgtctcaaaaacaaagggcagaacagagtatccagctccacctcagtgggtagccccccaacaccagcctgactcctcttagacatttgcagagatattcatacatctttggaaggctcccaccggtggccccactttctgatcccaagcttgaccttcaaaaatgttctattatttccgttatttcagatctttgacttttctctcactgaagaagaaatgaaggacattgaagccttgaataaaaatgtccgctttgtagaattgctcatgtaagttccggggatcattaatgggtattgaccagtggtattgaatggtcatgtgtcaagcaacaaggctcataagaaccctgacctatgtccatagcaccagggcaaagcatggtgggccgcatattctgaatgttaacatgcctgagggaaatacatccactacagggccttccacaaccctacactctcactgaaaagaagagtcctggcatctgtgacattttgtgacttcggtgaaggcatgcaggctaaggaacctgaggagaattaattcatcatgtacatatgctaaaacaacagcagcacaaatgttgaaacaacttatttatttattcctaaaaatgaaagtgatgcacaaattagagcaaagttataaaaaaaaatttctaagggagaggcatgatgatgttgtagaaagagcactagattgaaaccaagaacttagacttttagacaaatacttaagattttagtttccagctctacctattagctgacttcctacaagcaaaattccatatactccttcaaaatgtcaagttcagctaaccaactgaagtagctctttattctctaaatattacaggccctttaaaaaagaatatagttttggccaggcgtggtggctcacgccaatactttgggaggctaaggtgggcggatcaccttaggtcgggagttagagatcagcctggccaacatggagaaaccccgtctctactaaaaatacaaaaattagctgggtgtagtggcagttgcctgtaattccagctactcaggaggctgaggcaggagaattgcctgaacccaggaggcagaggttgcagtgagccgagatcatgccattgcactccagcctgggcaacaagagcaaaactccatctcaaaaaaaaaaaaaaaaaaagaatatatttgctatatatgtgtgtatagatatacacacacatatacatatatatactcatatacacacacatgcatttttttcttcttaatcattctctattaatgtttccagttcttcaaatcacctgaatattcatcttcatcttgaatctttaagtgaacattcagaaaatgctaagatgattcatatagtttggacacttactttactgatcctactgtttttcatgggtcagaaagtacagtgactggattaatattgaatttctgaattaataaaacaacttcctaatggaaatttttcagggggaaaattgtttgacatcaaaaggcaccaccacccaacctcaagaacaaaagagtaaacataaacacataaataacactttcctagaactaacagttataggttaattaatagctcttgaagataaatgacttctattgaatcaataatatatcattaagttaagaagagaaaccaggtgcagtgtctcacatctgtaattccagcactctgggaggctaagataggagaatcacttgatgctaggagttcgacaccagcctggacaacatagcaagaccctatctctacaaaaaatttaaaaataagccatcatggtggcatgcacctgtagtactagctacttaggacgctgaggtgggaggatcacttggaccccagactttgagtgagctaaggctacgctccagcctggtagacagagcaaggccctgtctcaaaacaaaacaaaaaacaaacaaacaaaaacagtataatcaatccaccaatgtactaattgttttacagacagttggtgacattattcagtttgacatctgacatatttaaaagcaattctagcaacttcggggaaaaaaaaataactcttaccaggaaataactagaaaaatcagcaaggtggaacaagaattaggccccattaatcacaaatactgtatcatttagagatattggaccatgatttttttcagcttttatcaagttgatttttaacatttgaaaatcttaatattttccattttaatttacagtacatgcagaaaactaaatcaggaacacacacattccagacattttacagaccatttcatcattgttatttaagagctaaattcactgccatcatcatcgtcataatcatccagcaaacttattttgctactcatcacctttctagatctcaaactctcaacacgcaggaggtctagtgagaggggcaagtaaaaatgctaatgagactgggtgtggtggctcacacctatagtcccagcactttgggaggccgagacagggcgactgcttcagcccaggagttcagcttgggcaaccgtggtggcacatacctataatccctgctacttgggaggctgaggcaggaggcttgcttgggagcccaggagtttgaggctgcagtgagctatgatcatgccactgcactccaacctgagtgacagagtgagattccatctgtaaaaaaaagaagaaaaaaatgctaatcagcagagggtgacactggtaataagagttttgaagagaaatgcccatgtagtggattggagaaggaggcagccagcgtcaagggaacagaaagggggaaggagtagggaagaggcatgtgcacatgacatgcctaagacatgattcaccactggggattctgttctgagtaaaatgttgataaggtggccaccaaccttccctcaacacactcacattcaggaggctgtccagagcttcaggaaaaggtgctggcttgagggaaaacagaagaggaaagtaggtaagaaacagcagaggaatgaataggagagaggggtagtggtcagtgaaattctcaaaggatgctattgaaacatacagctgtgcaatttttgagtgaacttttttctgtgggggaattgttttggcaggtggcgcgatcatcctgaatacccatttcatgatgaatactgactgccgggagttcctgaacagatttttcactcccatgagtgccaagacggtgcaatgggtagtcccctagatgtgaaaatgaagagagagggttttaccatcctgagaagaaataatgatggaaacatgtttaatgtttgtgcagtgtaaatgactttgactcagtcacattgaagtaaaaatattaaaatctgttgaaataactcttaggaaattatcaactaattttttcagatcagtatcttctagattccagacagaaaaaaattacacttcagaaaagacatcaaaggcaacatatgacaacaagtaatttatgaatctgggtagtagcgttggtaatctgagttctttaagggttaacaggacaacgaagtgcatgtggcagtgtgctggcagtggccttgaggctttggaccattggttacaaaacagacacagccaagataagatccacacacacattattaacaaggaagtgatttgctgcaccttgagttgagagggctacatgtagaaaagtcttaaaatagagctaaacaccacagtggtcaacaaagccatcataatgttggtgtttgtttccctccaatgtatgtatgtttagtttttatccaacctgaggaatgaaaacttaactggatctctcttgcatccttaaagggcctgagtctcaacatggctgctgatccatacttacacatcttactgtcaatcttgcctacattgattatagaaccactattacgtgaaaaggcttgaaacaaccaacatatacaaataaaaccctgccttgtaaaatagtaaaagagaagccatatattggcttttcttcttaacttgggagatatattgaaacaaggtgctttataagattattgtacttaagactttaatagtgttacttggatagcttatatgaattttgagaattttatatgaattttgagaaagcaagttcaaaagaactctggtaattttcctgtatgtacaatttaaagagtgaataagattattagaattcagcaatagagatatatctattttcaattcaactacagaaatatattttattggccgggtgcggtggctcatgcctataatcccagcactttgggaggccaaggtgggcagatcaggaggtcaggagatcgagaccatcttggctaacaaggtgaaaccccgtctctactaaaaatacaaaaaattagccaggcgcggtggcgggggcctgtaatcccagctactcaggaggctgaggcagaagaatggcatgaacccgggaggaggagcttgcagtgagccgagatagcgccactgcagtccggcctgggtgaaagagcgagactccgtctcaaaaacaaaaaaaaaagaaaagaaatatattttattcattcacattaggtcactgtcatactgtcataggatgagagagttcttcaaaaattatgttttcccaagatcagttgcttatagataatgttcaatgacctcaagacatatatttttgagaaattatcattttaaaaaatttggtctatactgattgttttcactgattccaatattattacttataacactgacctctggaaaatattttgttcacaagaaataataaagtataatgatttgttgcatcacatgaatctccattctgtttctaaggttggggcaggggaagaatcatctgaagccagttaaaaggcctttgatttaatcctgctgtacatttagcactgggaagagaggaaagaaaaggggatgtggtggctcatgcctataataccagcaatttgagaggccaaggcaggtggatggcatgaacccaggagttcaagaccagcctggaacaacatggcaaaaccccatctctaccaaaaaaaaaaaaaaaaaaatacaaaaattagccaggaatggtggcacacacctgtagtcccagctactcaggaggctgctatgggaggatcacttgggttggggaggcagaggttgcagtgagccaagattgtgccactgcactcgagcctgggtgacagagtgagattctgtctcaaaaaaaaggaaagattgaaggaaggaaggggaaaaaggaaggaaggaaggaaaaaagaaaggaaggaagggagggaggggaaagaaaaaggaaggaaggaagggagggagggagggagggaggggaaagaaaaagaaggagggagccgggcgcggtggctcacgcctgtaatcccagcactttgagaggccgaggcgggcggatcaagaggtcaggagatcgaggccatcctggctaacatgttgaaaccctgtctctactaaaaatacaaaaaattagccgggcatggtagcgggcgcctgtagtcccagccactcgggaggctgaggcaggagaatggcgcgaactcaggaggcggagattgcagtgagccgagatcatgccactacactccagcctgggcgacagagcaagattccgtctcaaaaaaagagaaaaagaaggaaggaaagaaagaaggaaggaaggaaggaaggagggaaggaaggaaggaagggagggagggagggaggcaggcagagagggaggtatggaaggagtgacggagggaggaaggaagaagaaaaaggtggtaccattatgaaagagcagaaacttgagtcctggtccctgttgtgaaagtccttaaaaatactttgagggtattagtgtagaggtgagaatggaaacaacacctatcgaagcatttttaaaagacagacattggaaaagagtcccatcatttgtcagcgaaaaggtatttctaaaaattgggggagcgaaatcctctcttagtcataacagagatggaggaaaaagatctggagacagaaagtaggaaggtcaggaaagaacaacagtctgatggaagcttctgcatgttccttctccctccactgtcacccctctcaagcttcccatctgttatgggttgaactgtgtcctctcaaaattcatatgttaaaaagcccagaccccagtacctcagaatgtgatcttatataaaaatagggccaggtgtggtggctcttgcctgttatctcagctatttgagaggctaaggtggaaggatcacttgaggccaggagtttgagaccaccctggtcaacagagtgataccttatctctacaaaaattttaaaattagctggatatggttgtgtacacatggctggttgtgcacacacatagcacccagctatttgggtggctgaggcaggaggactgtgtgagcctaggagtttgaggctgaagtgagctatgatcatgccactgcactctagcttggatgacaaagcaagacctcatctcttaaacataaataaaatagggtcactgcatatgtaattaattaagatgagatcatactggggtagggtggagtaaggtgaaccctaaaccaatgagactgtgtcctcataaaaaagggaaatttggacacagacaacacacagggtgaatgtcatgtgaagacgaaaacagagatcagggtgatgcttctacaaggtaagaaatgacaaagattgccaacaactacaagaaaccaggcaaaaagcatggaacagttacacctcagccctcagagggaatcaacattgccaacacctctatctcagacgtctagccttcaggactgtgaaacactacagttctgttctttaagccacccagtttgtggtacttagttatagcagttttacaaaagaaaacaccatccctcagtaaggatttcctgtctctccagttaacatcggctgtaaaaatggccttgccaaatcaatgctttactgagcccaagtattgacaaccaataatcttgatcttttggggacttacgcaaccccaaaaagatgtttgttaacccaaatcaatttttcttatcaatggcctctgatcagctatgtagaaagatccgtcaatagtgatgcaacctgcctgaaaaaggagaggagacccacggcatgccatgctcactggtccacagaaacataccgggctggagcggcaaggacatcctggcccagtgcacagaatgtttctggacctgcagtgtttcttgataagactgtttctttgctgggtacaatggctcacgcctttaatcccagcactttgggaggccgaagctggtggatgatatgaggtcaggagttcgagacaagcctgaccaacatggggaaaccctgtctctgctaagtacaaaaaaaaaaaaaaataataagatgggcatggtggcatatccctgtaatcccagctacttggaaggctgaggcaggggaatcacttgaacctgggaagcggaggttgcagtgagccgagattgtgccactgcactccagcctgggcaacacagtgaaactccactcaaaaaaaaaaaaggaatgtttcttgatctttttgtagttcatgagcgtgatgactgagtgttcatgtgcatgtgtgaggcgtgccacccttaaaccttgttataacatcagcacattacccacatgacacgaaaaaaaatgtttcttatccctgacagttctccaagagggcctccttcaggcattgtcattccgtccacagtaacaacacagcaccaggagaggccattagaggggcataggcaatgatcctgtcttcagccttcaacactttgaggtgtgtgcattctgaagccacagtcatagggattaacaaagataaacaaactcatatttctaagacttgatatttctcagaactctcaaaatttcaggcttctgctaacttcaatgtcttcttcttgaatcagaatcctccctgaatccaaatagtagccttaatgtttctgtctctacacatgaaatccccaaattctcactttagcttcttccaccctagtctctgcctcccattcatgagaaacaggatgagagggtgatgcccaactaataggcttactctctcatctaaagggcattttggtaaaaggctttttctgttgggtcatatctcctctggcaggagctatatccccctggcttcctatttggattcttcagaatctcggcttgagctccggctgccctccctagatgtactaactgcctagcttggggcaaaattctccttttgcacagcacgtgcttgcctgattcagctcaaagcagatcagactttcttaataaggccacattctcttccctcgttgccttctgcactccaggcttgaaccaaaacttggttcctttatgaaggacttcaccgaaggccacaggaagcatccagcacaatcttctaacccagcaccaaagcctgagccttggcagacacatggtccaagttccaaaatataagttacactttaagtgaatctggtgaatgggctggagccttggtctggtggggagtgctggggggtgctggggaggagaggaagggacaggggtgtagggggaagcccttctatccgtctttttttaacagttacttctcttcctttttctgtctggtttctcataactccaaccagcagagacaagcccaggatgaagactgggcagtagcctgggaagaaccgggcttcggtaaccacaggggccccaggcggcccgggaagcgtggaggtcccagcgtgcgggcagaaagcccaagaggccgagcgctgtggcagctccatggggccctggcggaggcaagggcacagcgtggctggctgcatatgtgaacaaggtgagcggcggggccgcggtcgtcgcggagtctgagcacaccaaggagcgcatcagacttcaagggtcgaagtgcaaaggggcagtttttgatttcggggtcaaccaactaggactcgatgggtggaaaagaagtgcctaaacagcaagctgcttacctcaatctcggtcagaatttgtgggggccccatagatgtgggtgcctggcggggtcctggtgcggacagcggtctcgggtttgcgcactgcgcacagtatcctcatcacgacacgatggaagctgcggagctggggtcaaaataagaaggcgcagctgggacctggcgacaccaagagaatggaagcccccagactcattgcgggtctctgccgggaagtgagtatgtaggcagcctgtgggcggaacctcaccttggccttgacggaaacgggctctgcgtttgcctttggggagaacaagatggggcagctgagcctcagcaaccacgcaggagcatccccagcaccgcacagatcatggacaacgggcagccaattactagaatggccagtggaaatgaattccgtataatgggcgacaaaggagacctctgttccttcgtgtgccctcaatgtggtcagctgggacccaggcacagtgaatagttaaggctgtgagctggtgctggtgccacgatgagtggcccaccttcactgagaatgaaagatgggtagattctgcctgtaccaaaggtggttgtgagacccccagagcaaggcagggacccctccccatttcccttacatgctgtgctgactgaagctacattcaaccttgcagccacacaaccacaaacgtttcctttcacaaaatagaccaatcaaatctgagacagagtattctgagcacaagcatcttggctaacagtgggcactttgcaaaagatgctccccaatgcacttgcccagtaatgtcctagcctgtcctaacctggcctttgcttcatttcagtagtaaaaagcacacccctgggtggagatttaagatgctaatgagacatgcatcacatgaagaagcatgtccagagactgcataggtgcaactgccaaaccaccccaaacatgcaatgatgtcacatggaggagctccaaagcaaatgaaaccccaaactaacctgcagtcagggagctagctgcaggtctcttcctgctgctacctccccttctgctcaagctgagagctccaataaactgccttgctcaagcccatctcagattcttggtctatttctatttactaagggtcaagaacccaccagccaataacggttgtgtaagacgtgacctgtaatgctaaccacacattgattctggactccaagaaatgagtcttctcctggggctttggtggctatggttgactgggccactcagagcagaaggatgagatggtccccgcttggtgaggttggagtctgacttccttgggtgtggggcatcccagatccatgttggttacacctggtcctttgctgtctgtgaagttggtagtctctttttctgggggagcccaatatctcccatgaatcttccatgtacctgaaagcagtgcaggacctctgcggctgcagaatccagagcctggcttgtgggaagagcagcaacattgtggccgccaatgagaacaccatcagctgagggccataaccaacctttaggtaattgggatacagggaccatgagcccaagtcttccactgcagcccaagaggtgaagactctgaatggcatcttttcaaagcaggtctccataggctactcacactccttggtgatagtgcgagatgaaagtgagaccaggaaagagaagatcaagaaactgctagagccggttgcggtggctcacttgtaatcccaacactttgggaggccgaggcaggcggatcatctgaggtcaggggttcgagaccagcctggctaacatggtgaaaccccgtttctactaaaaatacaaacaaatagctgggcatggtggcacatgcctgtaatcccagctaatcgggaggctgaggcaggagaatcgcttgaacccaggaggtggaggttgcagtgagccgagatcacgccattgcactccagtttgggcaacaagagtgaaactccaactcaaaaaaaagaaaaaagaaaagaaagaaactgctagaatacaacccctgaaccctttgatgctcctggggactcctgcaactccacccgtctcccagaagctgtcatttcctgtgcagtgggaggtgaagtcaaacaaggaattttaaaaagcaaaagttagccaaagttgcatttttgttagactccctgaggttccatttttacaagggatccaatgttaattatccttttctgcatacttttaaaagtctgtttttttctcttcatgtttaattaaaatatttgctcatatttggaaaaaatatgaattgttataaaatagtggaaaagatatccagactcccagtgaggactgtgtttcccattatgcttcacccaaattaactcagtcaattctaactttcaggagtattcacttgttatgccccacttccacatagcgatttttccatcaggatgttattagttcctagtaatagaaatgcaattcagactagtttaagcagaaatagtgaattcactttgtcacagaactggaaacaaagaagtgcaggggtaaagtggctgtaagcagctagaactagggctcaagcagtgtgtttacaacttgtgactgttttcaccccgttggactagctgtctccagacagcaggcatgaaagcaggcaagatagctctcagcaacactctccttcactcagattaggaacccagaagagagtgagagtctttggtaatagctctgtcaaggaagtaatcctgggaagaactctgactggccaacatgcatcatgctggaaccaatggtgatggcctggggcagactgaatggaagggcctgagacataaactcatccctgtgcagagaagaagcaagagaggaatgagagagacagtgggagggggatggaaaggcaagagggtaggagcgagtggaacaagagcagcactaaggagaaaggaatcataaggaactacaatcctgcctcaatcaccagaaatacgttgccccaagaagcaggcaaaataagagatgtctgcaacagggactttcagggcgtggagataaataaaatttaaaagctattggaaccccccccagaacacattaagccctgagtgagatgtgactatgatctgagtcacacatggttacaacttctgttctcagatagattaactcactttcttatttttcttgttctgcacaatgactagagtgaattcaactacaccacagataaatgcctcctgccttcttcattaatggccctggtcatagattcacttcccctttgctgcctcactttgcttagaccagatgacaaaaaacgcatgactattacaccctctgtgaaaagtgttaaatgtccccttcccaaaaggaaacactgcctataaccaatcaaattgctgtaactatgcaccaaccttgtgtaaatagtgttgtaatcccactaaaatctctgtctctgtctaaataaatgaaatcttaacttccctacttcaaaatgctgactccattcctttggagttggtgtttctgggtggtccgtcctcactgtttgagcttgaataaactctctttaaattagattctgaaccttttgattattttaggttgacaggagttttggagtactaggttttagcttcctgcttccctcacttcagattcccaaaaaaatgatatagtagaaatctccatcagcactgaaaattaagaaggttgctgcctatcagagggtgtaaatgagaagaaactgtcaaagtataattttttacaaatcaggccgggcatggtggctcacacctgtaatcccagcactttgggaggccaaggcaggcagatcacctgaggttgggagttcgagaccagcctgaccaacatggagaaaccccgtttctactaaaaatacaaaattatccaggcgtggaggcgcatgcctgtaatcccagctactcgggaaggctgaggcagaagaattacttgaaccttggaggcagaggttgtggtgagctgagattgcgccattgcactctaacctgggcaacaagcgcgaagctccatctcaaaaaaaaaaaaaatcaaaaatatgatttttatgtaaatacaaaatgagtacataccagtgatttaattatctcattaatgatggaaacagaaaaacggtaagagaaataccaagagaattggagaaagtaaaatgtttcagcagctgaaagaaaggatgcttggatcaaattgctcatttagctccaaaccagtttagccttctgaaaggcaatacaactatataacttttgagtttatcttttctaccagatttaataatttatatctctacaataaaagatccatttgcattgttattggacaagaatcattttcatcactaccaggtttctattagttaataactactcttacaaaattgtaaattaccctattaaacagttcactcagctgatctgggaaatccaaaccctgcaccttccaaagaaaggtctggccattaaccacttattgggagataacctctaagcccttggaatgtcattcctgagaagaatgtctttgctcatctggggctttgggccacactagacagtttatgctaacaatgtgatttatgaaggggggtggggaggcaggtggctacatgatgtcagtttgactccaaagggctggagactgagtaactaaggtcagctatgtgggcactccaagcctatatgactgacccccaataaaaaccctggatctagggccgggcgtggtggctcacacctgtaatcccagcactttgggaggccgaggcgggcgaatcacaaggtcaggagatcgagaccatccgggctaacatggtgaaacgctgtctctactaaaaatacaaaaacttagccgggcatggtggcgggtgctggtggtcccagctactcgggaggctgaggcaggagaatggtatgaacccgggaggcagagcttgcagtgagccgagatcgcgccactgcttccagcctgggtgacagagcgagactccgtctcaaaaacaaaaaaaaacaaaaaacgctggatctcaaagtttagataagtttccctggttgacaatactacttacgtgttgtcacacatcactgctggaaaagttaagcactatctatacaactccactgagagagaacaagtagaaatttgtgtctgcactctctcttggactctgccatattgtccttttaccttggataataaatctaaattctttttctataataaaccataactatgagtagaacagcttttctgagttctgtggttctttccagcaaattattgaacccgagggtggtcttaggaaccctataccacaaataattaacagcaaatcaaaaaaagttacaaagtttcccctgaggggaatcagtccttgaggaagcctgctagacaatccccacaacaacactgaaagtggacacattttttttcatccactttcaaattttagataatttttcttaatgtatcttagagaaaatacgaagtgtgagactttaatgagctgtggcaggaatacaataatacctttaatgtcatgacaggcccttacctactctacaaatttgtggtaacaaagtatattgaaaactgtatgaatcaccctgatgcccacagaaaatagatgactgtgcacactgagcactactgaattcacatcccttgataaagaattttgccttcatattaaactatttgtaatttatgtt

SEQ ID NO: 820 - DNA, 1113 bp, Homo sapiens
atttggttgaggacgcagccaaactatgtcagtctcttatttgccaacaaaagcatcctaactgatagaggccagacagatttgtttctttttgttttttcaatcttttgttgtgaagaagtaagcataaactctcaataggttacgttttacaagcctctgatgaagttcaaaggacaaccatgcttaggatttccaggacaacctggaaaaaaaaacaggttgagaaataggtgtgttaatctcccttccctctgctcctccctctggccttcctttctttgatggaataggccctaggacacctttctaaaaagactccctgtggtgttcagaatcactcctacagtcaggttctccacaatggatctcagtgctgcaagtcaccgcatacctctaagtgatggaaacagcattcccatcatcggacttggtacctactcagaacctaaatcgacccctaagggagcctgtgcaacatcggtgaaggttgctattgacacagggtaccgacatattgatggggcctacatctacgtgcggagggaagatatcttctactgtggaaagctatgggctacaaatcatgtcccagagatggtccgcccaaccctggagaggacactcagggtcctccagctagattatgtggatctttacatcattgaagtacccatggcctttaagccaggagatgaaatataccctagagatgagaatggcaaatggttatatcacaagtcaaatctgtgtgccacttgggaggcgatggaagcttgcaaagacgctggcttggtgaaatccctgggagtgtccaattttaaccgcaggcagctggagctcatcctgaacaagccaggactcaaacacaagccagtcagcaaccaggttgagtgccatccgtatttcacccagccaaaactcttgaaattttgccaacaacatgacattgtcattactgcatatagccctttggggaccagtaggaatccaatctggaggcagctccataaacttgccttgcttgatcttcccatactacgagtaactctccattcagtgcatactctgcactcagagaaactggttacaggtgacctgcagtgtcctggt

SEQ ID NO: 821 - protein, 250 aa, Homo sapiens
MDLSAASHRIPLSDGNSIPIIGLGTYSEPKSTPKGACATSVKVAIDTGYRHIDGAYIYVRREDIFYCGKLWATNHVPEMVRPTLERTLRVLQLDYVDLYIIEVPMAFKPGDEIYPRDENGKWLYHKSNLCATWEAMEACKDAGLVKSLGVSNFNRRQLELILNKPGLKHKPVSNQVECHPYFTQPKLLKFCQQHDIVITAYSPLGTSRNPIWRQLHKLALLDLPILRVTLHSVHTLHSEKLVTGDLQCPG

SEQ ID NO: 822 - DNA, 2986 bp, Homo sapiens
atttggttgaggacgcagccaaactatgtcagtctcttatttgccaacaaaagcatcctaactgatagaggccagacagatttgtttctttttgttttttcaatcttttgttgtgaagaagtaagcataaactctcaataggttacgttttacaagcctctgatgaagttcaaaggacaaccatgcttaggatttccaggacaacctggaaaaaaaaacaggttgagaaataggtgtgttaatctcccttccctctgctcctccctctggccttcctttctttgatggaataggccctaggacacctttctaaaaagactccctgtggtgttcagaatcactcctacagtcaggttctccacaatggatctcagtgctgcaagtcaccgcatacctctaagtgatggaaacagcattcccatcatcggacttggtacctactcagaacctaaatcgacccctaagggagcctgtgcaacatcggtgaaggttgctattgacacagggtaccgacatattgatggggcctacatctaccaaaatgaacacgaagttggggaggccatcagggagaagatagcagaaggaaaggtgcggagggaagatatcttctactgtggaaagctatgggctacaaatcatgtcccagagatggtccgcccaaccctggagaggacactcagggtcctccagctagattatgtggatctttacatcattgaagtacccatggcctttaagccaggagatgaaatataccctagagatgagaatggcaaatggttatatcacaagtcaaatctgtgtgccacttgggaggcgatggaagcttgcaaagacgctggcttggtgaaatccctgggagtgtccaattttaaccgcaggcagctggagctcatcctgaacaagccaggactcaaacacaagccagtcagcaaccaggttgagtgccatccgtatttcacccagccaaaactcttgaaattttgccaacaacatgacattgtcattactgcatatagccctttggggaccagtaggaatccaatctgggtgaatgtttcttctccacctttgttaaaggatgcacttctaaactcattggggaaaaggtacaataagacagcagctcaaattgttttgcgtttcaacatccagcgaggggtggttgtcattcctaaaagctttaatcttgaaaggatcaaagaaaattttcagatctttgacttttctctcactgaagaagaaatgaaggacattgaagccttgaataaaaatgtccgctttgtagaattgctcatgtggcgcgatcatcctgaatacccatttcatgatgaatactgactgccgggagttcctgaacagatttttcactcccatgagtgccaagacggtgcaatgggtagtcccctagatgtgaaaatgaagagagagggttttaccatcctgagaagaaataatgatggaaacatgtttaatgtttgtgcagtgtaaatgactttgactcagtcacattgaagtaaaaatattaaaatctgttgaaataactcttaggaaattatcaactaattttttcagatcagtatcttctagattccagacagaaaaaaattacacttcagaaaagacatcaaaggcaacatatgacaacaagtaatttatgaatctgggtagtagcgttggtaatctgagttctttaagggttaacaggacaacgaagtgcatgtggcagtgtgctggcagtggccttgaggctttggaccattggttacaaaacagacacagccaagataagatccacacacacattattaacaaggaagtgatttgctgcaccttgagttgagagggctacatgtagaaaagtcttaaaatagagctaaacaccacagtggtcaacaaagccatcataatgttggtgtttgtttccctccaatgtatgtatgtttagtttttatccaacctgaggaatgaaaacttaactggatctctcttgcatccttaaagggcctgagtctcaacatggctgctgatccatacttacacatcttactgtcaatcttgcctacattgattatagaaccactattacgtgaaaaggcttgaaacaaccaacatatacaaataaaaccctgccttgtaaaatagtaaaagagaagccatatattggcttttcttcttaacttgggagatatattgaaacaaggtgctttataagattattgtacttaagactttaatagtgttacttggatagcttatatgaattttgagaattttatatgaattttgagaaagcaagttcaaaagaactctggtaattttcctgtatgtacaatttaaagagtgaataagattattagaattcagcaatagagatatatctattttcaattcaactacagaaatatattttattggccgggtgcggtggctcatgcctataatcccagcactttgggaggccaaggtgggcagatcaggaggtcaggagatcgagaccatcttggctaacaaggtgaaaccccgtctctactaaaaatacaaaaaattagccaggcgcggtggcgggggcctgtaatcccagctactcaggaggctgaggcagaagaatggcatgaacccgggaggaggagcttgcagtgagccgagatagcgccactgcagtccggcctgggtgaaagagcgagactccgtctcaaaaacaaaaaaaaaagaaaagaaatatattttattcattcacattaggtcactgtcatactgtcataggatgagagagttcttcaaaaattatgttttcccaagatcagttgcttatagataatgttcaatgacctcaagacatatatttttgagaaattatcattttaaaaaatttggtctatactgattgttttcactgattccaatattattacttataacactgacctctggaaaatattttgttcacaagaaataataaagtataatgatttgttgcatc

SEQ ID NO: 823 - protein, 326 aa, Homo sapiens
MDLSAASHRIPLSDGNSIPIIGLGTYSEPKSTPKGACATSVKVAIDTGYRHIDGAYIYQNEHEVGEAIREKIAEGKVRREDIFYCGKLWATNHVPEMVRPTLERTLRVLQLDYVDLYIIEVPMAFKPGDEIYPRDENGKWLYHKSNLCATWEAMEACKDAGLVKSLGVSNFNRRQLELILNKPGLKHKPVSNQVECHPYFTQPKLLKFCQQHDIVITAYSPLGTSRNPIWVNVSSPPLLKDALLNSLGKRYNKTAAQIVLRFNIQRGVVVIPKSFNLERIKENFQIFDFSLTEEEMKDIEALNKNVRFVELLMWRDHPEYPFHDEY

SEQ ID NO: 824 - DNA, 96690 bp, Mus musculus
  misc_feature (1)...(96690): n = A,T,C or G
gttgggggacttgaagaaacaggaggcttcatctgttacaatatatttgagaagccagatttgttgaaagactactgtcttagttaagggttttactgctgtgaacagacaccatgaccaaggcaagtcttataaaggacatcatttaattggggctggcttataggttcagagaatctgttcattatcatcaaggtgggagcatgacagcattcaggtaggcatggtgcaggaggagctgagagttctacatcttcagctgaaggctgttagcagaatactgacttccaggcagctaggactagggtgttaaaaccacacagcacagtgacacacctaacaaggccacagctcctaatagtgccacttcctgacccaagcagatacaaaccatcacaactatgttttaccaaaagattccagatgttgtctaaagcatccttggaatctcagtgcatcaccattacagcttatttattgccaaccagaagaagtcaaaatcatcattttgaaaccttcccagctgccgtttgcacaggttaagtctgatgttgcttcctaaaaggcattcaggtttgtcctttttgctagcttttcagaagcaaccaaattctggaaatgtttgtacctctcttcccctacattcctcacggtcaaaactggctcaggctggctgaggagctgtcttactggttaagactttgcctcggcaagtgtgaagatctgagttccatgtaagcaatgggaggtcccagcggcctgtctttaattccagccttgaaggctgagacagggtctcctaagaacaccctaggaaggtgccaagtgagactagctacgttagttacctctgggtttgactgagagacccccatctcactgaataaggtggaagaatgatcaaggatagttcatgacattatctttgggcctctacacacacatgtacccacataagtggtcccacacatacacaaacacactcgcaattgctttactgcttcatggcacccttttggttttggtttcctctggtaaatctgaatttttttagtgtcacattttatttttcccttctgtttgatttgctcaaggctcccgatacttatacgctataaaaatgttctaaatgtgtggagaaaaatggcacttccttgtaaaatctgattatattatttcatgatatcacggtctgtctgttttgaggggcagccgtaggagtgtttaccatgaacctcctaaagaactgagagtccgttcacttgcacttcatcagcccattttgcttccaaggatgctatggggaatgcgagcatcccgtcagacctggggagtctcccaattctgctgctgccattgtacagccattcgccctgttttaaaatctttgatgagaatacataatatttatcactctaagcattttaagcctacagttcaaaggcatgacatatatttacctcaccatgcaatctcgcatcatttttttttttttaaattctcgggtcactgtaagtctttaaaatgcagcttgggagcttggggtgcatttcagtggtctagcgcctgcttggcatggataaagtgcctggtatgatccccaacatccaaaccagaagagaacagaacaagaatccctgttgacttctgacctagtcccagtgtggagagaaacagaggtcttcgctggcgtctgcctgttgcccagaaggaaaagcaaaggcacactctttgtcagcgcttcaggactctggcctccagacttcttacaacgaaacccagcaaaggtctcagggcaaggaagcacagggcaggctacgtaggctctgtctctgcattgatgtaatttcagctcagaacagcagagcccaaattgatttataatgtatacaaatcataaatgctcttaaaggtctcattggccattagaggccaagccacccaaagcacacactcataaaagtttatttagaagtaaaatctttagctttaaaatatgcagaagaagtgatttctacataggtcccagtggataggcctgtccccatgcaataccaacagcactgagtgtgttcgatgggttacacacacacacacacacacacacacacacacacacacgaagttgggagggaagtgtaggcataggaagagtaggagaggagagagctggggatggatttgatcaaaacacatttgtgtataagattttcaaattcacaagttttaaatgtaaagtaataaagagctaaacccttcacacggctggccaacccttgcatggaagcacactaagatgtgacatgcatgactcaggaaagcgtgatgtgcctcagctgaagcaggagattggtggcaggttcacatccacaggagagtccccatccacaggatcccatgggaggcgccaggaaggaggagtgggaggctgccaacagcttctccggaagcccttggcactgctactctgtggcactattggcactgctactctgtagcactagatgtcagtgtggactttcccagctgccacattttcacctttgcatgcagaagacagcagcttagggcctttaacacggggctgtcctcagaaccaggatttcaccaagtattttgtctattttaatatttccattctccagcatctttaaaaactcaaacagacactctaagttaaaggtcgttcttttgaataccacaactttctaagctcagtgctcgcatcaggaaggcagcctgcaaggactcccaaggcaggcaatggaaaattctgctcagggggtcttaaaagtagcactgtcagtcagaaacctacaggcccagcctcaggaagccacagtgtcctcctctgccaccattgtcttcaaagggggacaggaagctgtggtaaactgttcatgatcacatggggtacagttggccttgttaccagtgttggggttttagctgtcttttttttttttttgagatagttagtaatcaggagatttctgtagccttgaggaaaagttgctgtgtcgttatcactgtcacaggagttatctggaactgagtagcttagaccagcacaaactcacagcttctgaaggtcactgagctcaaatcaaggttcaggcagagagctgtttcctgctagtggctcctgaagatcctcttcaggcttttttggcttgcccctcacccctactccctctgtctccaaaaccaacactgatcaatccagccccccacccccacccccaacggggagggaatagaacatagaccctctaaggttctcaattgctcccatcccccacctcaattttatttatttatttatttgtttatttaattttattttgagcactagctcactgactggcccagacaggccctgaacatgtgatgctcttgcttctgattacagatccaagcttggctctatctagccttctctctctctctctctctctctctctcttcctcgctctctctctctctctcttttcttagacagggtttctctgtgtagccctggctgtcctagaactcactctgtagaccaggctggcctcgaactcagagatccacttgcctctgcctcctaagtgctaggattaaaggcatgtgccaccactgccccactacctagccttttcttgatatcactctagcctgcctctcctgtttgcctcttttgcttatgaagaactgagccaacccagttcattcagggcagtcttcctagctcaagacccttccacctgcaaaggccatcttgccatataaggtaacatgctgacagatttcaggaatgaatatatagacaccatgggctctggagttgggcaggattctatctctaccacagtaattaattaaaaaaccacgtatagcagggtgatggtggcacatgccttcaagcatagaactcaggaggcagaggcaggtgaatctgtgtgagttcaaggccagcctggtctgtagagcaagttccaggagaaccagagctacaccaaaaccacaaaccaaaacaacaaacaaacaaacaaaacatacagtgcaattccaagagcctctgagaggtgctttttatatcacaaactgtcagaaaattttaaggcctgaattggcttagctcatgaaatctcaaaaatggaaaaaaaagagttaaattttatagccccaattaatattcagtcactctccggcctcaccgcactaaccctgcttcccctgatgacccctactttgaggataactggctgagttcatgcatggacagcattgagaagcattaaccccagcgctggggcaggcaggctggatgagcatcccacccaaagcctatgaaagggctggatgtgactcagtaggagagcgctggtttaggatgctctggttttagcccccaacacaacaaacaaaaacatccagtttgatccctggccttgctgctccaaaccaaaggttggtttccttctgcctgcatagagctgagtttagttcctcttcccaagcggtctgcccctccatatttatacccggtactgaaagcactgtccagaaagttcacgcggcatctttgccacttccttctttcagacagcctgttaccaggcttcagagccttccactcctctcatctccatgcctacatctgctcctaacgggtgtactttcctctctcccatcagtccattctccaaaatgctgctggagataagctatcctttcaaaaatctaaatacagccatgccagggctgcctaggggagccgttctccttggtgttttggatctttgcccatcgggccaagccagctggactcggtcccagcccactcttccagctggttctcagacttccttgtctcctcctcttcattccagctagtgaaatgcttgtagttcctcagctgctcacagctctcctttgcattcaggctcctacagcctaggatacctacagatgcagaagacggctgtctcaagattggggcgtcacttgtgggattgcatctgtgttttccacccaacttccatcctacggctccaggatgcaattactctgaactcgagccatctaggcatggtggctgcaggccatacagttttgtgggtccgtgattaactttgtgtatctaatgcaaagtaagacattacacatggggaggcaatgtttgcttacaaatgaagagatcttccataggggtccggatgtctcttaatctttctgtgtaccagggatgaccgtgctccgggctatgttccaaaacccttggttcagacttggatctctagagttcagccaaagaccatctagcttctgggaaacagggtgtggtaagttgaccagtagctcttaccacccagtttgctttctcattccctgcaaaaggtaatcctgccttgctgaccttactctttcccacctgccctaatttggggcaaagatcattcaggtaccactgcaagggagctggccacttgaagtatagactactttgacagaaaaatgtagagggcaacaaacttgacatggtaataacagttaagtcagtgctaatccagggcgtgcattaattactactccctgcccttaagatccacaacaggccctgaaaactggctcagagccctggagaagcactcactgtggggagttaaagatactggagactagagcccctgtgcttgggaggtttatacaatctaggccttatacagagcttgcctctactggggcttttggctacccttgagggagggaggtggtactgggaaatgtcttatactactttttaaatcattcatgcattaccatagggattcgtgaaagtagcaggaggctcaggagatgctgcttatgcgctggaggagagaaagcatgcattatgtagcagagagctattttttcctctaagctccttttcacttctataggctgggacatccccttggtactgggcccacgatactctttccactatgtcttatacctttgcaatggtatggccccaggtgtctgtgcatgcacgcggagaccagagatcaatcctggttgtcattcactgggagccctccacattattatcattattaccactattattgttgttattattggttgttgttgtttttttttttttttcccgagacagggtctctctgtgtagccctgtctgtcctgtaactcactctgtagaccaggctggccttgaactcagagatctgcctgcctctgcctcccaagtgcccagctcactttatttatttatttagccagtctcttcactgagtcctggagattagcttactgaatagggtaggatagctcagtgagccccaggaatcctcctatgtccatctccttgaagacaggattaaaagccatacccccaagtctatcttttctcatggcactggagtctgaacgctggtctgcatctttgagtggcaaacactttatagaccaagccatttcctcagtctaagatgctgttttttttttttttaattaaaatattgtttgcaagccaaagtgaactgagagcgaaatataatacacatatttaatctcttattaataacattatactagtctgataagcaagaaccaagttgtttttattagcaggtgctgacattttgtcttagctatctttagaaataataatgattccaaaatctatgttaaacataacatagggctttgttaaccagctgattaacatgaagcattttttgacacactgaagcctatttaggacaccaaagactgctcaaaatgttagctacctcatgaaataaaaaaaagttcatttacaaaaaaaaatcctttaactacaaagatttcaaataacctctgtcttttctacatacgcttatctggtcaagccagtatggtgatgtatatactagtaatgactactaaacggctacaaataatacttgaaggcttaacaatgtacttcaattgtacaaaatagtgagatcaagaccactaaattttagcatactcaaaactttacagtatcacagtatgctatagacaacatgcatattattattccataataggaaggacgaggaatttgtattttcaaatagacagcggatcttctgagactctcggccactctgagactggtcctatgatcatgtgcactttagacacttgacaacaaacaggcttagctaaggcaaagggcttggattgccccagtcccaaagtcatcactgaatagaatcaaggtctaatcctagctagaccatactactctggcgtgtgtttacaatcctgtcttgattcctgtccattgcttctcattaaagaaccaatggaggtaccagaggaagaatgctgtcttaaggaacacttaagagcacacctaagaacaagtttcttacgtgtgaagaactggtggggtgtgacaaagctacagattgtaagtgaagtcccagctgcttggtaataaaacacagtcttcataggattactatctggagagagaggagaaggccctaagagaagcagaccaaggaaaggacagagaagaatctcctccacactgctgctgtcaaagagcaataatgtaagggtacgagtgactttcaagaatcattttagggacagcgtggtggctcaagcaagtaaaggcagcaatcccccagaacctacaaggaagaagaactcctgtgagttgtcctctgacaccacatgaggccatagcttgaggtagccacatacatacatacacacgtacatacatatatacaaataaataaaaagtaaaaaccctttttttaaaataaaagagtgattttaatatgacaggaaaacatgaatgcactctttcactgaaaagctactatactgccatagtctgttgagtgtctaatgaacaccttaatgagagctatgaagccattgttgcacagcactgtcttcagtcctaggaatggggtgactggtaacatctgcaggaaaaggcatttgaccacatgatgtaatacaggatatatcatatgaaagctcagaggatatatcatatgaaagctcagagtaactatatatcacgcactatgcacatatataaacatatatatgtaaaactacatttcttcctcatattcttctcccttcttcctctttttcttctttctttctccctcttctcattgagactggtttttgctgtttcttaggctgaccttgaattctaaggttcaagtgatcctcacgattcattctctccagaagctgggcactacaggccagcctgttcataaagcctcatttctcctatttacaaagtccaacttgtggctgaagcgatggctcagcggttaggagcactagctgttcttgcagaggaactgggtttgattccctgcacagccatgtgacatctaactataactacagttccaagggattgaataccttcgtctgatcttcagtctgggcaccaggcacacgtggggaacttacatgcaggcaaaacatttatacacacacacacacaaattaaaaacaaacaaacaaacaaacaaacaaccctccattcccttatcttctgaaagaatgtctagaatcactacttaaatgactcaccacaaatacaaaagcgtaaaacagcgacagtgcatttttgcagtttgtacaaacacacttgcacatagacaatgctaccagtacccgccaaatgggagggtcagagcctgctagaccaagcaccacacacaggaaggcatttagaatcctgttaagttccatttagagaaacccacaagattttaaagctactatcgctctggagatttaactcaaacattctgggcaaggaagctaaagtccaaaaaggtaaaacaatttacagcctgcataatttggcttggtgttaggcccgaaggctggatctcgggagaagatagtctctgcacctcagtttttgctctgcctttgaaggtcaagctggattatcgttcgttcttccaattttttgctcttcccttcccctagcataattctgatcaagttggcttcagccttccccttgtttcgttctgtccttcgctcctgtactgttttttgttttaaatcgtcttcattgctgagactgttgtttgcttaatcagtgtatacaataccaacgaaggtcattatctacccactcaaagctccagacacgggatactgccacgaacgccctagccaggaaaaggtgcacttggttttcttcagcgctcacaggccacgtgcggcaggaggggccgccttctgattggtggtgggggagtctcctggagggcggagccaccggtctgtccatcaccacatgctgggcggggcctgggcgggtcggcctagttgtagggcagagctagagcagcgggacccaatctctgcgctttgcctcgattcggccgccgctcctccagtgccggccgcgaggcgacggttgccggggcgcgcgccgcccgttcctctttcccgttgcaagcggctggcgcgcagggaggcggcccccaatccggccgggcgcctcccactctccgagccgccggggagccggaggatggcggcggtgacagcggccgcccgggaggaggcggtgcggaggccgcgaagcgcggcagcaagcggcagcggcccgtcgcggcggcccggcagcgaccgcgtccgcacggctacctgagcggcagccgcgagctgcgtcccgcctctctcgcttgctcgctcgctcgctcgctcgcggccnnnnnnnnnnnnnnnnnnnnctcagagaagatagtgattgaaaaaaaaatgaacatggggtaaataaataagaattagaaaagatagtgaaaagattagatgtaaggaaataatatgaataagaaaggggggagagggagtgggaaggaaaggttgaataaaagagagtggtatagaatagtaaaaaaaaaattaatatgtgaaataatggcccccaatccggccgggcgcctcccactctccgagccgccggggagccggaggatggcggcggtgacagcggccgcccgggaggaggcggtgcggaggccgcgaagcgcggcagcaagcggcagcggcccgtcgcggcggcccggcagcgaccgcgtccgcacggctacctgagcggcagccgcgagctgcgtcccgcctctctcgcttgctcgctcgctcgctcgctcgcggcccggggcggcgcggacatgggcgccaagcagagcggccccgccgccaacggccgcacccgtgcctactcgggctcggacctgccctccgggaccggcagcggcggcggcggggcggacggcgctcgggcggcccgtttcgcggccccggtgtccggcgcgcagcagcccagcgcctcggccggcgcggcggctgcagcggcggcggcggcctcggccccggcagcgccccgtagccgctcgctcggcggggcggtgggcagcgcgtcgggcggccgcgcggcgcagtcggccttcagcatccccagcgctggcggcggcggcggcccgtacggctcacaggactcagtgcacagcagcccagaggacagcgtcggcgctagggaccgggaccggccggcgggcgggggccctggcgggccgcgtctggtgatcggctcgctcccggcccacctctccccgcacttgtttggaggtacggctccctgccctggcagcggctccccagctagggaagcgcaccccccactccctccttgcaacgcggtgaatggaagaagtattgttttaaaacaaactgacgaaacagcctcgtggttgtagcttttagtaccaggaagtcaggggagatcagtggctgagtgtagttctgccccggagctgaagggcgagcagttttaaaggcccaaagccagaagggactcacgtggatgtttgagtgtttgaaaaaaggaagttatctctcctttggatagactcctaacaaagctgtgatccttgcgtctctgtaaatagccctgcctacttactggatacttgttttctggttaaatgtgttaatgcaaagtgttgcttcataacccccgaaactgctacttttacagtgtggctaatgtcactactgcttagtttgaagcggattgtggaaaagttcaagaacagttatttaaagagataatctttataatgatcacaactctacctatagaggcagtaattgggcaaggtctttcgaagagcggtgttcactagagttaaggaacaatttagagatcagtgatgtgcttttaattaagttgtttgaaacaggagaaagggtgcagttgatcctgaaaatgtgaacttagccgcatattgccacctcctttcggtatgagactggtattatacatttacacgtaagcacagaatgatgtaaactatatcccttcaggttttttatttgtttgtttgtttgtgtatttttttgagtcaggttttctctgtgtagccttggctgtcctggaactcactctgtagaccagactggcctcgaactcagagatccacttgcctctgcctcccaagtgctgggattaaaggcgtgtgtgcgaccacgcccggatcatcccttcagttttaaaaacccttttattcatgtgtttgaaactgtaagacatgtggtgaagcagtgtttactgattcctgttccaaagcaatcagaagctagtgttggttcgtgagaatgtcatgtgtagtttctaccatcttaatggtattttgcacgcttggtatgaaagcacctagcttttagctacctttattattttttaagtgtttttatttgttttgcttgtgaggttctgggactgtaacctaagttactgagcttgttaggcaagctctttaccacagagctaacacctagcctgacaaataacttgctttatggtaagttctgcaatgtcaataattacagcagtgtttctgaaagttaaagcattttttttttaaatcttgttttttgaggaaaagaatatgtccttaaagtgatttgaggcactgtagtttcctgagaattggagagtaatggtacatttaaaaaatatttttttaaaattaagtttcattgagcagttatcatcacaaataggaacaagaaaaaggactaggaaaagtatttcgaagttaatattttatgtactgaatactacttttattcagtttttctcagggctgatgattctctctgactagagtcgtcagtatgtatgtatgtttttattttgttaaagtaactgtttggagcaaggcagctatctggccttcctgctattcctaaaaaactggcaagacctatttgccaagtgttggaatgcaaacctttttttaaaagctaattcttgtagctttgctcatccagatctctgaggttgaggcttaaagtcatcaattgtgtggaatggtttcaactttttcctccagttcattaagaactatcacagacatgtattattcttgggacatttgagaaaagtaatcatttatgtgagaaacttcagttgacaaaggcctaaagaggatcagaaatgaccttacttgagaagggatcaaacttgtggtgaccttaaactatttacaaacagtgaagtccatccttaggggctttaattatgagacttgtgtgtgtatgtcggtgggtggagtcacgaggaaagctaactgaagcacgtttctagtcctcctgaggtggagggggcatgatgtgctgccttaaggaatcagacttgattctttacattaatttcactttactatgttttataccagtgcgtttattcagttacaggaaaggttgggcatatgcagtgtttattgagttatgaattgttagggcatacataatggactccaactgaaaattgagaaagtatttctaaatcaacagaaagtacttattataactctataaagcactaatgtctatactgtttcttaactagaaagtatgctactaaaaatacaagaatcgttccttgtagaccctcaatgctatatattgaaagagaaaacgtaagctgtcactctttacactgttttccgttcagcagtatagccagtagatttgtaagcttctctgtggcactgagttcccacactgagccaggttttctgtgatgattgttgctgtctgctctctggtttggctgcacacattctttattttctctagagaattaagtgactggaagggaggtgagtgaccagatgtttcagcttgtagccattgagttctcatggagattaggagataattagaatctgtgtggagtttttagagcaagcagggctgtcttgttttcatttactcctagactgctgaggtgaatactgtatatacagtgaacacaagtcgtcccccccccataccgataatattctggttctagatttgtttttaaactggtctctaagagcattgttgacatttgaaagccttgatatcttaaagaggatttgtttgactttattttttgcctatattttcccactacattgctgatgttcataaaatctattaataggagtggtaaaatagtcttttctgatgtagctgtcaaaggaggtgagttagactgttaaaatgccccagtgaatgaagattatttctagagaaatcctatggacttgagtaatgtatctgggtctggtagtaagattccacagtgagttactttaagacattgaaccagcagttccttccttgcttttggctgcttaattgtcttgagcttatttgggtgtggcgtgcctgggaggagttaagcagcctgtaattcaggtgtctcctgttatttatattgaaaaaaaccctgagccatcatttaaaattgagtgtgttaagtaagatttgtattcctaggaagatttatttaaattaattttcagcacagatgtgaagttttatggagttgttctcagtcactacttagaataattacacaatatttgaattttggagattatagttaatctgctctccattttggattttcctttacacagttgatgattttcttggggaggggcagaagttgcttggtgatgtgaaagggaagccatgctggtaacaaccacttctgctgtccctgccaagggatttggatggtgaatatttctcacttgtaaactccgtctatctttgaagaccacaggtgatagcttatgttgcttgcagaagtgtggcttccggcctggatggtcctgctttggaaattgtttggaagtaaccttgaggttggaggagtgggatgaattgcccagggcgaccctttgagagccttctgttgtatgctcacatggaaagcctgcctgctggactctcttctgcttggttgctttgcctggtacccagtaagtaggatcttattgctgtttgtccaccgatctcttactcatcttgtgcataattttccctggctatacatacaatctgggatgtgggcaaatgggctgagaggaaagagttcatcgactgctttatgtagcaaagacattttttggatttactttcttatataaatactcctaagcatttttaaatgcaagtttgttcaaattctgtaggttctgaaccgtttctaaacattaacatgtttagaaattggagaaaccatggtactttgtgttaacaaaaggttcagaaaaaaccttctatgttgtaagagtcctatgttgcttgttagtagagtattagaaatacagctatttgatgcagtacatgttcatcaatatctgtaggtcaggagtctgggcacagcttagtgggccagggtgttggtgtgggcactggggctgttgcttgctctcacctgaggaggatctgcctgcagattccttcaggtggattagcataatttatttctttgtggtggttaggttcacagtgcctgactcttctccccactcctaattcttagtggaggcattgtagaataatgtgttttggtgtgacatttcctttcctctctcctttctttccttctctccctccttccctcttcctcctcctctttttgcttttgtttgtttggttggtttttgagacagggtttctctgtgtatccccagctgtcctggaactcactctgtagaccaggctggccttgaactcacaagagatctgcctgtctgctccctagtgctgggattaaaggcgtgcgccaccactgcctggcaggtgacattgtcatacattgtttactttggtcctattcactctgccatcaacctctcctgtcctgtctcattcatcctcccaaatagtttcatcctcttttaaaatctggatttcaaaaccatgaagtattcatgttaaatctggcttacttcatttaacaattactctccatttctgcccattttctgaaaatgatatgtcactttaaaagattttatttcatgaatgtgagtattttgattgctcgtatgtcttgcacatgtttgtgcctgctgcataaggaattcataagaggatgtcagatcccctgaaattcaaaattgtgagccagaagttgggagctgtggtgtggatattaggacctgaacccctctgcaagaggaacaagtgctcttaaccactggctcctatctccagcctcctagttgcattctttatggctgagagaaccaaccccactgtcggtgcattaagtcatattttactcatttattgaaggagtcctcgactagttctatgacttagcaatcttgaacaaggtcactgggaacgtggatgtgcagtttatccctgggatacactgacttagatttgtttgggtatgttcccaagggcagtgttgctggttcatagggcagttctatttttagtgttctgaggaactttcctactgacttccgtagtggcttgttagctttagtcctaacagaggagaccatatttattctatctcaggctgagtgcatcacctttaccatatcatttagtgtatctaggcctgggctacactcaagggggagggaaaggtttaaacactagaaagtgggaattaaaagtggttattctaaaatctgtttatcacattgagtatagacttaaattgatcagcttaacatataacttaacttaacctcactttctaaaagtgtggtcatttatgtggcaggtgtaataagtgattgtgatggtttgtatatccttggaccagggagtggcaccatctgaaggtgtggcttgttggaatgggtgtgtcactgtgggtgtgtgcttaagatcctcaccctagttgcctggaaggcctggaagtcagtcttccactagcagcctttggatgaagacatagaactctcagctcctcctgcaccatgcctgcctggatactgccatgctccctctttgatgataatggactgaacctctgaacctgtaagccagccccaattaaatgttgttttttataagacttgccttggtcatggtgtctgttcacagcagtaaaaccctaactaagacagaagttggtaccaggagtggggtattgctatgctaggcctgaccatgcttttatttgaaagaatgtggattttgggactttggatttggaaagcagtggaatgctttaaatggggcttaatgggtcatcctagtaggaatatggaagattttgttgctgggagtgatttgaactgtgttgacctggcccaagagatttcaaaggagaagaatttcagaatgtggcataaagactggttttgtggtattttggtgaagaatgtggctactttttgcccttgtctgaaaagtttgcctgaggctaagtgaagagacttggattaattgcattgacaaaagaagtttcaaaaaagcccagcagagactttgttctctggttaagtcttaatgaagagaagtttgaacaagcatagcaagcttagaaaggaaaaatataaaatatatggttcgagtattaaaggggtgccaggaagtgaaatggagcaaaatcttgtgttctaggagataaaagattaagggaataggaccttggggcaagatcctacccagctaaatttagatccaggtatggtggtacatacctttaatcccatgagacaggcatgctgatctctgcattcaaggtcaatctacagaggtgaaggtgaagcctcagctgtagttgatggcccaggactgaaggggtcatacaaaggatttgaggcttggcaccctgaagagagcctatgagaggctattggtgaagcctagttggagtggaacaccccagtgtattggagatgtcagtaccatgggatgatcaccaagaacagcagccatagtggagtgaatcaacctgagcttagagtgctacagagggcagagctggaaaagtgatgccagcccttaggaggagtccaaaagatcaagtggaatcccagacactgaaacaagaagctgtaatattgaaattgccttggagactcaaagatgttaaagatgtcagagccatgggatacatgctgaggaaagctgataacagggagtggaaccagcccaggagaaagcagtttgttgcagtcaacaaagatgaaaaaggagtggagatctgaagaccgctttgacatcagccatagagatgcagtttggagtttgcccagctggtttcctgccttgctttggggattacagttaagttgaatgaatctcagaagagaccttgaatttaggatttttaacactgttgagactgctatagactatgaggactttgaaagttggactaaatgcattttgcattatgctatgtttaagtatggcccccatagactcatgtttttgaacatggggaccagggagtggaatgtgatggtttgtatatcctttgaccagggagtggcacctctgaaggtgtggccttgttggaataggtgtgacctggttggaatgggtgtgtcactgtgggtgtgtgcttaagatcctcaccctagttgcctggaagtcagtcttccactagcagccatgaagacgtagaactctctgctcctcctgcgccatgcctgcctggatactgtcatgctccctctttgatgataatggactgaacctctgaacctgtaagccagccccaattaaatgttgttttttataagacttgccttggtcatggtgtctgttcacagcagtaaaaccctaacgaagacagtgaccttgactcttagtcctgtaagaggtgtattgtagcgttaagaatacaaacatgaggctggccttgcttcgtcccctgtagaagctgagaagactgtggcgccatgtaacaacttgcaaaatgcttagttaagtatttattgtgggagtgggagaatgcttcacaaaggaagtcacgtttgaactgttttcttttgaagaatttagaattttcggtagggatcacactgtagactttgtaaaagtctgcagaagcttgacatttgtgaagtgcatctgcgttacccagttggggaaggaatagtgagcatagtaagctaaaagagtgaaaaactgggctggttgttggagtatggaggggagcgataatggaatggaggcttgtctgaggtttctcttttgagttgacctgatgacattcttgaaaggagcaagtctctaggttgggacagaggcacctaagtccccaggaacagaagttagaaaggccccgcggtgtggctactccaggtatcttggtctagaacagagttgtagtgtggtgagcacgggtggaatgccttgtgacatggtcagggattcttggctttgctctaaacagtgatacagtggcctagaccagatctgagaggagagttgatggaaccttgatgggttttaagagaggactgtggcccccatgtgggagtagacaaaaattcaagtcagtggtggctgtagacgaggtatagctcagagatggcagtgagaggtggcaagagccatgtatgtttttaaaggtagagccaagaaaggatcaaggttttggcattggtttttagttgttttattaacaaaattttacatttcttctgttcatttcttctgttcttggaaatttattagagagatggaattcttagaacccaagatatacatttgatcaaggtggatgattttttttttccaagggttcagcctaaagcatggcaagtttttaggtatatgtgaatgtttattttcccttgatgaaatcttcctgtagtgagaatttttatatacgtgcagaacagtaaacacaccttgagtatgcttttcaaaaacaacaaagttaggaaatagacctgaagctaagtgaaataattcaagcttcaaatatattcaatcactgattgtaacttgagtaactaagactaacctgaactgttcattaatctatcttatttgcatatatataagcagggtggggcatacattttatatatatatatatatatatatatatatatatatatatatatatacccacacacacacacatatacacacacatatgtgtgtgttatataagtgtatatacatactgggttattgcatgatttattcctaaatgtcagtttttgggttgaacaatacattccatttttattgatttttgtatcactagcttttttcttatctttattgctttagttttcattttagagttacatttgttttgtagctgctttatttttcatgtattctctaattgttaaaaccacaattgggctttaattacctcttagtacatgtaatgcttttccacagcatctggatacgtcatggcttcattgtcacacactcgctgtctcaagagaaattagagttggcattttgttcctggatattgtttaaagtctggttttaacattggtagttggcagctttggtgttgtttggccactttttgttaatacaagcaacactgtaaactagaagtagattgcatcttggtcagaaaatgttaagaaagagagagagagagagaacacgagaacataatgtggtgaagaacacttgctgttcttgcaaagggtctgggtttggttccctgtatccacatggcctgtaactccagtaaaactaaatatataaatttaaaaaaattaaatcatgttgggcagtaatggtatacacctttaatcccagcattcaggagatagtcaggtagatctctctgtgagttagaggttagtctggtctataaagccagttccaggacagccagactgttacagagaagaaaccctgtcttttaaaaaaaaagaaggaagaaacctagctcaaaacagcattaactagaaagaagtaaatctgtttgtggtgaatcctagtccaccttcttgccaactgcttgtgcttcaatccttttttcattgtgtgtgtgtgtgtgtagggggggcagggggcatgtgcatgcagtgtgtggaggtcagagttcaatgctagatgacttttctgttgcttttcaaccgtgtcatgtatgctgacgcctgtatgacagggtgaggtggaaacttaagagttctttggaaagttggttgtgttagatggtgttttgctgggacaaacatgtgaaggagcgtttcactgaatgaagcagacataggagaaaagatgttctaaagcaagcacgtgaaaggacgagggatgaggattctttgctaacaacactaatgtattggcctgccttacgatgtgtagttgagctctgttgggactccttagagagaaatgcactaaaaaacttgtggtggtgtgccttggatttttgctgcttctgtggacttggcagagtgacgtcagctgagacagctgcacgtgcaagacacaagctgagcaagactggtggaggacatgtgatatttggagggcaaatagaaaggactagtcggacagggatgggagctgagctagacttgcttattgagccagctgtgcaatgcttcgcttcactgagagagacacagctgagaacgtctcctggcattcctcctggtccttcatgctgactcctgccaaggccaaggcctggctgtctctactaggtagtgccacctctgctgatctgtgtttgctagcccaactctactgaactgaactgctgttgtatctgtgaggtgtttgcaagtggatcgagctgccgctgctaacctgtgaactgaactgctgatttccagacaacacagaagggagttgctccatagaacctttctaaacaggtccacttcccccgtattcttctttcttactacctctggtgggtggtgggctaaaaggaaagttaaagcactaaagaaccatcatcaaaaatagattttgagcagagtggtggtggaacacatctttaatcccagcacttgggaggcagaggcaggcggatttccgagttcaaggccagcctggtctacagagtgagttccaggacagccagggctacacagagaaaccctgtcttgaaaaaaccctaaatgaatgaatgaatgaatacattttgaaaaagttaaagttataacagggtgtgtggataatgtgcatgtgtgtgggtgatgtgcatacatgtggaagccagaggttgacactgggtgtctttctctgtcattgtccacctttagtttgaaacatagagctagctttctgtttctgatagactagctggccagcattgcagaatctgcctatctccttcctgtcagcagcagggtaacaagtgtatctcactcttccgtgtgctagagatctaaccccagaagctagctgattctaagcaagtgctacacactgagccatctctccagcccctccaccttgctttttaagacagcttcttgctggactgggagctcacctggagctgggctagactggctgccagactcaggttctcatgcttgtgcaacagccactgtggtgactggtccctctctctagtctctatatgtttttaaatttcttcataattctctttttagactattgacttacgcttcatagcacatttgctgtgccagagttgtagtaaaaactttgcaagtattgattgcttcctaagatgtacttgacggctacattatgatattttaaaacagcatcactggtcactaaaaccattgacatttaaatcatacaaaaacgtactctagaaaaaggtagtatgctgttggtgtaaaaatctctgtttccttgctactgaacaaagacaggcgacaggcgatgttctttgagctctgtaaatgagatggtcgtagttgccttagaaggagagtgaaatacactgcttagagcttggcttttgttttgtttctttaacatgtttattgtgagatagcagcatccttttctggagactcctgataatgtggtcacactgtgttttgcatgtgcacacatgtgtgatgctgctgtgtatgccttctcccctcctgactattcagttactagttgctcttactctttgtttagctttttgggtctttggaggggggcatttattttcctcaaatatgtgatggttttgttttgactggtcacgtaaacactaaattgaagcacttgtaagctaattagaagctttctgcacaaaataatcatctgtctgagcacttaggagtgtgttctcttggacttggtcatattttccagaactggcttttcttacatgtaagaagtcaccatccacatgtcccctgcaaagactgcatgcaggctagcctcatacttgtgattaatactctagcttgagcctcctgagtgctggagttacaattcaaaggtggatttattttatgtatatcagtgtctgggtgacggtatatgcaaatgggtgttgggtgtgtaagtgtgtacaggagggtgttcaccgcctgggagttgggatgcctgctttgtctgtggatcttgggatccaaactgggacctcctgatctgagtaggcgctcttgacctcagagctgtttctctagctctgggagacatgcttgttttttaagccttacttttaattttatgtgtgtgaatggctggcctgtatctatgaaagaatgcctggtgcctgctgaagcaagaagagggtgtcatatatatcccttggaactggagttgtgggagactgtggaaccaaactcagactgtggaactaaactcaaaattgtctacaagattaataagtaataagtgctcttaaccactaagccatctctccagccccaagacatagctttttattcccatgttacaggagcatagcaagaaagatttttttgttgttgttgtttttaaagagaaaaagttgtttttgtttttttttccctcggattcagtatcaaatgtctctttgcctttgaccattgtgttgtcatggtccaggaaggtacctctaaacacagcatctctagtagaactgggacttcctggccatccaaagcccaggagcccctctgggcgggtccttaccaattcttgtgggcgggcttaccgcttcttgcctcacctgggcagtgctgccctttggacagaccttcactccaaagaggctgagtctgcctctgcttttctgattttatgtgaaaattatcactcatttacatgccttccaaagactgagtactagtttttcattgtgtcattagattaattttgtatattaacttatatattttattttgggaactgtgagatggatctattgataagagagtacttgctgccaaacctgacaacctgagtttggtccccagaacacacacagtggagagagacctgtcagagctcgctctttacgccctctgctccccaaactgtaagccagccctagttaaatgcctccttttactccttttaagagagttgccttgccatggcgtctcttctcagcagtacagtctttaattggcaacctcagacagttttgaaacccacttttctgtttaatgtgtttaggggatttttctgtgagagcatataaacccaactcttgttgttagccattttgtgtttacatttctatgatacataggcactgtagctccttaaatctttcctgttactgagcatctaggaacgttctagtttttgtgtctgttagagattaagtaggaccttgcatgtgctagtcgtcaagtgctctcctgctgagctctttccagtattgtaataagtatcactgactatgtctttgtacatgcacaaactcttccagtatggatgctgttttgacagcagtaggtataatagagtgaggtatcaatcacctaagattagtgttagattcaagaaagctgcattcatatgcaagccatgcttcagggcttcccaggccactacttctcaggttttttggttatttcccagtactggcattgagtccaaggcttcctgtatgccaagcaagtgctctggaacaccagctccctcactgtttgcgataagatcacattaagttgcctaggcaagcctcagacttgtgatgatcgagttctagcttccagagcagctgggctaacaggctgggctcccatcctgaacttctcaggtttggtaactcagcactgatgtacacagctcaggagaactcggccattactattgcagcttgattatgaaaattagaacagggccagcaaaatggagccctccctctctgagagttgcccactcctacacctgcctcccgggactgtggctcccacagaacacacgctctgtgtgcctgcaccagagagctcgtccaagtcttgctagccacatcacttatttggatttcattatatggacatgattaattggaaatttgccagtccatttactgactctaaccttcatccagcttcgctggagcttggggctgactcagagctacattctccagtcaccaggagtcctttctagcttctactctaaatgtctctgaaacatgaagtcgggtgtggttcaatcactaaactaaaactaaaaacaacaacaacaacacaacaacaacaacaacaacaacaacaaaaaaccctgacaggttctttatttattatacaacaattaccaagaaataaaattttctatttaaacagaatgcacaacttaattttcattagacatcaaccctccctaagggcatactaatttattctgtgccactaatatgatttctgctaactttactgttagttttcttctttttagaaaactattttccctgttttgctgataaaaccttttcacttgcattttttgagtactagtgaaaataatcatttccatgtgctcattgctagccatgtctgtgtttttctcattgctagccatgtctgtgtgtttttcttattgctagccatgtctgtgtgtttttctcattgctagccatgtttgtatgtttttgcactgcctatttatcagctttgctcattttttagctgcacatttattttatattgcattctggttctctgtctaatgtagatacatagaaggttttttgtgtgtacatagttcaaatatatcttctcataccattgggttataaaataaggttttatgaatgaggttcactgtattgatctttaatagacacaggcttatgagtttaaattaaaatgttatttataaatttgttcctataattgaagaagaaaagatcattacttcccaccccctcttttcctttttttcttagaccagggtctcactaagtagcaagtgtccttggctagcatgtgtagaccaggctgaccttgaagtcatagagatatgtttgtatggctgtttttgatgtgggattttaggttttttttatacataaatcatatgatgttgaatttcataaattaaattatttactatatagagctatgtatgtctcactcttttgtacatttttgtttaataggagtaaggaaaagttgaaaatcaagaggatactttatgagaggctagtaccatagtctgtgcatagtatttctataaatagctgtgtagtattgtgttcttgtatagaaatatatagcagaagagttaattcttaccaataaaattgatacttgggggcaggtgagatggctcagtgggtaagagcacccgactgctcttccgaaggtcaggagttcaaatcccagcaaccacatggtggctcacaaccatctgtaacgagatctgactccctcttctggaatgtctgaggacagctacagtgtactttaaataaataaataaatctttaaaaaaaaaattgatacttggaggcaggagagagatgggtgctcttttcttgcagaggacctgtgtacagatcccagatcccagcacctccatcaggtattaaactgcctagaacttcagctctgccaccacagtgaggctcctgtgctcacttgcacatacccacataattagtaaaatctatcaatctctaatggattaccgacaaatttagaagactggagtattttgggcttaaaactgagaaatatgtattgaaagagcttcaataacattagcagcatttgatttctctttatgggtattgttttccatctgtagatacttcagttagcaaagcatacggatgtactcacagttacgtctccaagtaacactttgcacaagaaaggtaatctcccattttataagtcagaaactctgaggctctgcattattcagattttgaatgactggataaatccagtgttggttttttttttttttttttcgtttcactgggtgttagtttcctactgatgctgtaacaaatctcctccaatgtggcagctttaagccacacacatttgtgatctaacgatgcttgtgggcagaagtgtgcagtaagtaagtaagcctctgagtgggctcaagccaaggtgttggcagagtgcttgggggacctctagggtagtcttttcttgctttctccagcttctagaggctgcttgcatttctttccttatggccctgttcccattctccacagctgcccacatcaagccaattgcttttcacacagccatttctctattttagacttctacattttaaggaccattgtaatgtatagtcttttggggtgggcctgggagataatctgatgtttctgtgtgattctttttggagtcttttgaaggtttattttttaagtgctagctggaagcagcagaaagaaatctgtatttttgtagagtgtgatgattgccaggtttttcttgtaaactttattttaaataaactatttcagtgttttcttcatgaatgttttctaattttattaagagtgctgagctctgtgtacacacaggtcctgaatgtaagagtggatgattttaaccagtgcatacacgatgtcatgaacacactattaacctgggggaagtcatttttctgtccttctgagaatctgcttaatgctttctgtcgttgttactattactaggtcttgttgttggacttcatgtaaatgaagctataccacgtgtatttgctgactttgcccaatgtaaagaaggatgtaaagttagggtagaaaggaccatgaaagcctctccccttgcactgaaacgttgtcctgtgacttgggaacacaactgaaaatacccagtgttttttgtctgttttttgttgttttgtctttttttttttcatttcattttttattagatattttcttcatttacatttcaaatgctatcctgaaagtcccctatgcccttcccctgccctgctccccaactcacccactcccacttcctggccctggcattctcctgtacaggggcatatattctttgccagaccaaggttctctccttgcattgatggcggactaagccattctctgctacatatgcaactagagacacagttctggggggggggggggtactggttagttcatattgttgatcctcctatagggttgcaaacccttttaactccttgggtacttttttctagctccttctttaagggccctgtgttccatccaatagatgactgtgagcatccacttctgtatttgccaggcactggcatagcctcagaagagatagctatatcagggtcttgtcagcaaaatcttgctggcgtatgcaatagtgtctgggtttggtggttgtatatggaatgaatctctgggtggggcagtctctggatggtcctttctcagctctgacctttgtctctgttactccttccatgggtattttgttccccattctaagaaggaacaaagtatccacactttggtcttccttcttgagttacatgtgttttgcaaattgtatcttgggtagtctaagtttctgggttaatatccacttatcagtgagtgtatatcatgtgtgttcttttgtgattgggttacctcactcaggatgatatcctccagatccatttgcctaagaatttcataaattcattctttttaatagctgagtagtactccattgtgtaaatgtaccacattttctgtatccattcttctgttgagggacatctgggttctttccagcttctggctattataaataaggctgctatgaacatagtggagcatgtgtccttgttacaagttggagcatcttctgggtatatgcccaggagaggaaaatacccagtgtatataactgatgacagacatttagacttaagtgtgtggatatctctagtaagcataatcgaaaatacatatttaactggtttccacttaatccgttctttagtttttagttattggttaaattttaggatttcattaaacttttagataattcactgcaacagtggggtatagtggttggtatactttcaggttgttaatcatcacaaatgcaaagttcagagaattttattttaagtccgtgttttgaagtatagaagagtgtgtacctgttcaaggaatatagaagcaacatgagaacaaagatttgcatgttaggaacttatacttgtagttagatctgaatagttttagaagtcaggtaggcaatggcagatttgttttgttgtcttgtatttggattccatgaccactctgatggggaacatggcagcaggcagtcatggtatgggacagtggctgacagcttaacattctgaagcaaccaggaatcaggaagagctccctgggaaatggcaagagtctttggaatcctcaaaacccaaccccagagatagacctctttgaacaaaccacatctcctaatccttcccaggcagctctaccttccggggaccaagtgttcaaacatgtgagcctgtggagaccattctcgttcacaccacctcctaacagggaaatactaaggtgattgtcactggtccaggaacttatactcaaagaagcaagaggtaacagcaaacttgtctgaaacgcaaaatcccagtccaccccaaatttactcaaactgaaactgttggaatagggtccagctctgattctccaccatcatgaaaatttaaaccacagaataataaataaacaaacaaacaaaaattaatttgggaaatactggcataaatgagttaattatattatttctttattgaagaactttagtaatttacaaatttgtgtggctacaggattcacttctccagagaattttaggaagccagtcttctacaaactttttaatgatgccatttcaattccatcttgttcagggtacacatctgggatcaaatacagacaaacccgggaataaactaagttctagaagcattagtgataaatgggtaatatcttctgtcttttctcttcatgcacgtacacacagtaataaagttgttggaataaacaaaatacatagcacttttctatattacaacaatttctttccaaggctatttatttagtaagcatgtttttcctatggacaacaatctttctttatatttggatgcctaaagtctacctaactactgcagtagtcactgaggttttttttttattttttattgcttacacacaacaataaaaatatgatacatttcagagattaaacatttaacattaactgctaagaaattgaccatttgtggtttggtaacattcctttggtgtgtctcctgtgctcttgtggtaagcatagttttcctcagatgtcagacagacaggaggctttggttttaaatgctatgttcctgttatctttaagtagcttgactttttgtagtgatatgttacactgagtgaatgtgccatggttgctggttggttttgcactataaaccatactgtgggaacatgtggagatgtggttttggatatacatgttctctctggcagtgctcttcacactctttcaaatactcaaagtaatttttaatgctgtccttttggactgggcttgtaggtgaatgatagatcacttccttgccctgcctgatgccctgtattcggtccccagccctgagtcaaaacaacacaactcggttgccttgtagtgtttacatttcatgctttgtcataattgagcattcaatagttatatactgtgagatctattataaatactagtctcttaaaaatacccttttaaggtagtggagagatggcttagcagttaagagcactggatgctcttcctaaggatccaggttcaattctcagcacccacatggcattcacaattatccataactccagttccaggagatctgacattctcacacagacatacatgcaggcaaaacaccaatgcacataaaataaaaataaataaatcattaaaaatatttttaagccagccgtggtggtgcacgcctttaatcccagcactctggaggcagaggcaagcggatttctgagttcgaggccagcctggtctacaaagtgagttccaggacagccaagggtatacagagaaaccctgtcttgaaaaaccaaaaaaacaaaacaaaacaaaacaaaaccaaaaaaacaaaacaaaacaaaacaaaaaaccccccaaaaaagtccaaatataaatattattatatatgacttcatgttttttaaattttattaaaatgtttaattgctatcagactctacatagtaaacattaattgatattttaataatcacaggtaattaaaaataaaattgaattgttcaaaatgtaatatatacttagcctaaataggattttattgttaatgcatttttgtttctccaatttgggggatataatccaaagtctcatgaatgtgtttctcgatgctctaggtaagggatctactgatggggtgatttgattaaagaaaatgtcaagatgtccactgcttctttggtgtctggtatttttgatgctgttttattctgtttgttgtttctgtcttgtgtattaaaacaattgtaatgagtaaaagatgcagctttctttataaagtagaagaacaaatgaaatgggaattggatggaacctggatcatttccatactctgaagtccatgtgaggaggagacaactattagattgtatgctttttaattgataacctgaaaaaaatttaggtcctttcagctgtaacccaatccttcactgtaagggatgagtttatcaatttaaagtgctactaacattgagtagctacccagtcattccacgctgtcattatattttttcttttctcaaattttttagtttttatggtattctaatttgctcctttttactgtgatagaatcccaagtgaaagcaacttgggaagaaaggggtttattagattcaactttcaggttacacagtccatccttgaagggaagtcagggtgggtactcaggggaggagcttaaagcaccacagaggagcaactgcttactggctagctttccttggctcttgtgcagcctgctttcttagacagctcaggatcacttgcccaggggtggcactatctacaccaggctttgcatacctacatcaattcagaatcgagtgcttcacagtcatgcttataagccagttctatcaagacagtccccagttgaaactccctcaggttagcactgcctgtggcagattaacagttagtcaactaggagaggtgggaatatgctgtttcccattcatatttgttctttcatttttcttcctcttcatttctttcttgcaacatggtgttaatatgtagcccagactggctttgaacctatgatcctcctgctcaactttttgagtcctgtgtttgtacatgcttgctatcatagctgctttataatttctttttccatgattccatgttccttctctttatgtcttttgtacttttctgctagattgttggtattttacttagtgattcgcagggtttctaaatgtattctgttggtttttgttatgtaagttccaaatatctcttgacttcaatgcttttttcctcttataaggaaaatatacataaaggttaaagaaaaacagtaccataaaaacccttatcacacacatttaatgttcatgaatctgttatctgatccaaccccaagtaagtcccagacatgtcatttccaatgtggacatagtcatttatttaatgttagttgtctttccctggtcttttgatgtctcctttctcttcagtctgaaagggcctcttagtgactaaaatgtaagcatgcagtttgcccttcatgctcagacttaactgctcctgggactcatttttttttttttacaagatgcaaggtagggctcagactttttaaaaatttgtctgcatttttatacccagttgtagtagcaccatttatcaatcatctttagtgcaaccatttcataaaataaatgtcttcttttcctgaagcttgggacacttggagcacttgatgtcagtgtttctggcagagtgtgtcccatagaccagcaatgtcatcatcacttggccatatgtagattattgccactcctcccttgcacactgaaaacatagcagggcaggacagctgcagtctgttgcaatagaacctcatgtggttctgatgtatgcttaagtataggaatgtcagtgtaatgacagatgttaggccaccaaagaattataagtccagcttcaaaaactgaaggtatctgtttgtaattatttttgtttttgttttgttttttttcttttggagacaaggtttctctgtgtagccctggctgtcctggaactcactctgtagataaggctgacctcgaattcagaaatctgcctgcctctgcctcctttagcaaatcctactggtgggtgtgcatcaccgcaactggcctgtttgtaattctacattcctatggttttctactccatctctacctcgtatcatgaatttgctggtgatgctggaggttatggaaaggaatcatacctaggttatggtaacaatgaaggaaagccctttaagggtatcattatagcagcaaaaagactgctgctgctgctgctctctatatctgtatgggtttccaccttgttttcaggcccaggaatgtgtgacagctcatttgatcttatcattttttaatttggggtattgaattaatttctatcagaaggataggtccaagtacctattccactatatttctcagactttttctgttgacttgaatagatttttttccctagctttctgtttaggaaaatgcaaactgaggtgttagtatgacattgtcaacctgttgtgctattggaacttaggtgaaatctttttaaattatgactcccctaacctgcccaggcagggtttctctgactgttctggacctcactctgtagaccagcctggcctcctgaactcagtgattctcctgcctctgactcctgagtgctggaattaaaggcatgtgccacctttgcttggctatgacttactttcttgcatactcaaaagtaacaggaagatgagggaaatatgcagaaggcaagcatccactgtaatgtctccagagatctgcttaacagaggagtcgccacacttgtgcagcgtgctatgtggctgctggggatcagacgcctggctttatgctgtgtggcctgtgcagcaaggtccttattcgctgagaagccagcccagcctcagtctttgatccttgtgcttctatctccccaagtgttgggttgctgctatgcacactgttccatttgtgtttcatacataaatatataacttgaatgttattttataattatatataaataagctcactgtaattttgtacagcctttttagcttcacacatttgacctgccatgaggtcaggtgtgaatcttttttttttttttttaaaataaaacttgtgtcatgccagcactcaagtttgggattttggactgctttgtgtttgctctttgaggcagggtcttataatccaattgtcaggcttctgcttcctgagtgccaggatgtcaggcatacaccactgacctgacacactttgaatcttggagttggggtgctcaattggtatctgttctgggggtcatcactgttaaatctgtttgatgggacttctgtataagaatgtgctagtgtgctactaccagtctctttgagactgtatagagtggtagtgtggcaacttgtaatcacgtgcattagagcagctggtaagtatctaccaggatgctgcttggtatagcatcttgcttttagataccattgatctaccattctagcaaatgtgcttaggcagttccataataatatgaaactattgaattttcttcaaatgctttaaaagatactttaaaattagagaggatacaacttgtttcattttctgctaatttgttcttttagttttttgtactctgattggaaattaggactttgagcacaactggcaaatgcttaaccactgagctgtctggatcttggtcttttgagacagtgtctcactctgaaattgaaatgttccttcctgccactatgaaactttatacttttttttgttggtggtggtggtgcttagctaactcattgctagctaagctttctaccctggctacaactccttagcctttaaagcatacagtatttaaagggatttttgaaaaaccttttcttatatcaaatagccacccccaatttacctgtcttatataaatcactagaattcattggaacaagaaggaatatactttttaaaaataatggacatattatatgtgtgctttaagtcatttgaactttgtaagcatgtatctaaacaataataatgatgataatagtaataaagttagatgaagtagaggagcatttagcaaaatgtttttggcttgaagtaaaatcttttaaaatgaaagctaacatcctattagatttattaaattctctatcaacaatttatgttcagtgccaggtttcacacaatgtaaaagagacatggctggaagtaaggaagttcctgaagcagccttctgtggcatgagatacaaacgagtggattaggtattgtgagctttcactgtttttcaggagaatggttagttatcaaccacaccagtagttaataaaggcatttattttgcttagtgaaatgttgaaaaggcatttgagctgtgtgggtccattgtggtggatggcattaacttgctgaagtactggagagaagtaaggcagcaggatgctgctgggttcctctgatgactctgattgcacacaccattgcaggacagctattggccttcctttgttgccttcccacatctgttctctggaatagtttagtgagctggatttccacgggagtaaagtagactgagaagcaaaggggcacatctggttcctgggcttgcaggagagtggatgactgcccgtgtgcgcccccccccccccgtatttgctggattatttattctgggtgcctaaatttgatgctactgagctgccacttcttaagcttagtattcattgggttttccctctttttttcccctcctgctctgctacccctagtccttctggaaccagtagtctaatggtaagtatttaaataagacaaagtttttgacctagtggggatctttttgccctcactcatcttggcgaaaactttgcagactccagctggtctctgtggttttgcaggtttcattgttgccttgtttgtgtgtaggctgataaaacttctgttttgaggtccccctgtccttgcatgttgtgtcaaaaggcatccattgtttgtgtttcatgtttttcttggagcttgcattacctccccctttcctttttttttgtgttttgtttgcaggctcagtcagggagggagggaaaggtgtcctggctttctcactactttgtttgcttcagtactgggaagctaagcttctgttgagtgggcagcgctcaaagcacaggagctagtatttttgagctttagagttagtctgagtctgctaaccatacttctatttgttttgttttttgagacagagtttctctgtgtagccttggaagtcctggacttacggtagacctgactggccttgaactcagagatctgtctgcctctgcctcccaagtgctgggacaaaaggtgtgtgccacctcttctggagactagtgatacttttgaaaaggcattgactggtatctctggtaaattttctgccaaattctgtgttgcattagaactcatttaaatgtgaaaaaaatcaaacgctatgaagtattttttaaaggtacacatgtttttagggtttatcaaaccatagtatgcagttacctcaggactctgttgtaatgaaatttacatttgcaaccaggtcagcttctttattcattaagtttagattatgatctataattggaaaacaattaagagcaccaggctagactaagaagactaaacttttagtagtgaaatttggagaaagaactttgatagaattctgtcatcaaatcaaatgtgtaatttttatacatttgtaaaatatctttaagcaaaattagtaaaaggatacagttatacagcaagtacccaactgtcactgtgtacaggagaatctgagttcctagccatgggccattaactctaaagctcccttttgtcttagagtaattgtaagccttgtttgctgataatgacttctttgcctttgtgtttcattattggtacattttaaatagcattttgccaccttgatataaaagcagttcgttacactcctgttttggattttgcttctttccctccaatattacatttataaagcttgtttataaagtttatttatattgaatatagctgttatagagtctgtaatattcccttttatgaatatatcagaatttattttctagaggaaaaaaagtaatgagtactaaggaagcagacgaggcccagtgagataggagaccagcttgcctatcaggagatgttgttttacatttgaaatccttttccatgctgtttttcattgtttttaagcagctacttctggttgaggaagtttctcacaatgttctggaatgatgaattttatcttatttcataattgggcatttgtttccattttgctactaggaaaactatggctgggtcactcgtttgtagtgtggtgcattcatgcccatactcctttagggcatagttctcaaagtgttttgaacgttttagaaatgtagaatccttgactgctccccacccaagctgccttcccccatccctttcagtcagaatctctggggataaatctaggaaactaacgttaggctctcagatgaattctccacacagtaaaactaggggagccgacaccccgatacaggattgggctgtctgagccgcagctgggtgcccttgcagatcggagttgaacttttctgtggaggtcgtgtgtgtgtatcaagtgctacttagcactggggtggctgggcatctgtccctgtgcagcctgtaatgggaacttattttaaactttgaattttgtaaggagagtttgaatagtttctaagttcatttttaacaacagctgagttttgatttttcacattaactgaaagaactgacagttttactgtgaattttgtacatattttattagaaaagttttcaagcatactctgaagtataaagagtatactgaacaaataaagtgtcatgtcatgcccgttctacatctactgtattgtcttacatttgcttcattgctttttttgaattattttaagccaattttctggcatgatgtcatttcactccctgtactcaagcatgaatatctaaaatatgagccattttcatgatgtaaacacaatgtcatacatactaaggggcattatttagcttgagttagcataagaataagttaatgtgtataggaattctaaaatgatgatataatttctatttgtatacttagagccttaggttttgagttaaattattctttaaaaattttcactctaataagttcagttagtcacaagatccgactgaatgttttctcttcccaacaaagtgagaaatctacttttgatataattacttaaataatgttattaactttgctaccatggtataaaggaattatatttttcatttttggacatgttcctcctaacccccatgattcttttaagaatgagaaagtgtttcagattttatgtagtttatagcttatttaccaactcaatagatgattttttttgctagcaaatagagaattaaatggcactcagttctgaataacaatttctggagatcccagacagacgcccctctaacctgctgagggcttgcttttgaactgttcagtattagtgtttagataacccaagcaatgggtagttaggggtttgtttttgtccactatgctggtcattggattaaaaagagagagagagaaggacttttacagtagttaggaaggcaaaaattaagaaatatactatgttattaagcagttcagattggtacttagtaattgtcttgaaattacaatgattgagttaaatactaagttgtgttgaatatcgtagtatgtaatatatatttaaatatgttgggctggagagatggctcagcagttaagagtattggttgctcttccagaggatccaggttcaattctcagcacacacattatttgtccctccagtccctggggatctgatagcctcacaaagacatacagacatgcaaaataccaatgtatataactcaaaaaataaagtcatttaaaactgtaagtgtagattagggttgatggagtaagtggacagtgggtaagaggtgtatatgccatacaggggagagaagagaaccagtttgtacaacagtttgtcagtgaggacaggagcctcggtagcagggatctctagtggcatttcagcaggtagcagacttgtgtcgtcatactccagtggataattaaggttaaatttagggtggtggctgtcacgaaaaatggttaaatgtgatatactcaggagggcaaacctaccactgtggagaggtgctcgagcatagacaacactatggggagcactgtgcccaggcctgactgcacccttgtcctcagccttgctgagactgggacctttcatcacattcactgtaactcacaacatgccaaaagcaaaccttttttgaagagattttactaggtcctcttttgaaaacaggaattctgcgcagctaataatttatatgatacagactttcaggagagtggcacatagcaaatgtttttggctgtctcttctctctctctgataagtgagctgagccatagaaaataaataaatgaaagagtaaaactaccagtgtgcactgaaatgtcattttcctatactttcagtgtgtcacattattccttattcagccatttacaagtgtaaaggatgtccttgacacagttgctggacaaaaacaaattgttacccaagtccatttcccttacaagaaactttgaagcagatagagtgagtagaccgagatgctaattccctggatccctaagggccatatgtccttatggtttttatagtcatggtgtattttatttttctgtttgagtttggggacccaagagacaaaacacaaacaagcaagaaaccgccggtcagtacagaatattggggtaaattcccagaagagcagtctctctaggaaggtaattaacacataccaataggttccagaggctagtctccataggagagaaagctaacaggatttaagacttttaagtacgtatgtgttaggaagtggagttggagatcactgataatggtggtaaaccctttaagagtacactgtaaaagtttcctctgttgtttccatttgataaaaatatacttttatgacgagttagggaggattcatactacagacatttaccaggagattgattgcctcattatgttgctttctcaagacctcatatctctgtaggtgagtggcatgtgaaatcatttaatatatggcttacctgtgaacttcagtataaaccaccagctattgaccaccaaatagttaacatttacattaagaaagtacaaggcttgggatttttctgtgtagtcctacagtgtttaccaccatcatttcctccagtgggaaagtatctagaaatgtgttgttcatcttttgttgcttttgcttcaggctgtttcttgatagtgggtggcatggtaaaatctccatcttggagaaaatgcgtggtgaacaccgtacaccatttaaaatgtcagttatctgttcagagctgcttttgttaatgggagcattacattaaaagagtgtgtgcagccaggcgtggtgatgcatgcacgcctttaatcccagcatttgggaggcagaggcaggtggatttctgagtttgaggccaacctggtctacagagtgagttccaggacagccagggctacacagagaaaccctgtctcttaaaaaccaaaccaaactgaaacaaaacaaaacaaaaagagtgtgtgcattgtcttctagtctgagcaaggtggaaaggtattctggagaaagggcctgtttgttcgttcagtaatagcgaatgaacccctcgctttggcatagctttatgaaggaaatgggtattttgctgtgaaacaagatatactttacgatcattgtcttcttagttagagctacttactattttatttttgaaggcatttggtggtttaaataaggctgtaattgcccctgtggttcttgataaatttaaatctattgaatttattgcctggtcacactatgttaaaagcaacagttctttatattttaatagagattttagatttgagatagtttcagcagaatcttcagcagatgtttatttaatagggatccaataatgggagtttgttagacagaaaccaaagtaacaggtgaaaacagttagggcccaggggcctgtgctcaacttgatactctgattctggacttgctggtagtttttgtcacatcttttctgaaactgaaaagaattagtaatacttatattaagaagcaagttattctgcgacattaggcttaaaagaggagagctttagccatggctggtacaggtttagagtgtgttgttttaagccaaaaaggataaataataacgacagtggttagcattctgtgttgtaattacattaatcccatgtatgttctgactttctatcttggcatgtgacctcttttgcacatgttcttgttgcctgagtcctgtaacaaaaaattggtacattctaaagaagaggaaaatgttgtgtagaccagtttggagggctatatatccaagagtctgaaggctccatcaagtttgcctttggcgaaggtctcttaatggttgtaccacaatgggaggagcctgtatcaacatccctgggcaaggcaggagcctacagggagtcaaggactaattaatacatttgttcttgcagaaactggtacagtcctttgagaattacatgcatactaggccccaccccttaaaatgtctactacttctcaacacagccaaactcttgaacagatttccagaacgtaaaccgctgcagtgggtggaaacactcaaagcatttcctgaattgttgttttgtttgttttcctttagtgatcatcctgtccctgtctcactgcccttcattactagttatggggggccattttgaggcattgatctttgtttccttactgggtactttaccaaaaatgtttgcattacctcctggggtttgatttgattctcatggaactggcctgtccccaacttttcaaccattccacctcacctttgtttctgttccccttttctgttgtttggttgatgagagcaattgcattttactggacatttttttgtaagatacataaattcactcacagattagaaataaagaagaaatcccactcttcattttctgtgttggtcaggcagcattgctttctagtcacctgtggttttcaatatcagtttttctctacacaaagagcatccatgaggatgacccactcctgaggttttatagtcattctagcttccagatctctaggcttcacacacacacacacacacacacacacacagagagagagagagagagagagagacagagacagagacagagacagagacagaggcaagacagagacagacagagacagacaggcgtgcatacacaggttagggggaagtcacaaatatgatcatcttgattgactgagcccagtgactgtttggcactgagggtgaggatagactaagagagtgttgtttaagtataaattgtaaataagcaaagggtagaattcttactgcattggcttttctctataaaaggagattggatgctcctgtaggaccgtttccagcctcacaaccttgagcatgaagtgggagtggtttactgtagcgtcttttggactgcactgaaggtgtgtgcactgggtaaagctggagagtgtctgctcctctgctgtggctttgttctcaggaagtaggagggtgggggagggtgggggagggtggggggagggtgggggtgattgttgtttaaaaacagaaacttacagaaaactggaaggcttaattgtttttaaaagctattgtaagacatttagtgaatcctttctgtatccttcagtctaaacaaccagcaaatctttggatgacctttcactcagatatttgaatgcttattactttgtgtccaaagtagtattaatgacttttggactacacaaaataggtcacctaaaccttgcttcattcatttcctgtttccattatcttcaaaagtaatgattttgtaaagactaccggaaaaaaatgaacaaagacttatcagacacaggcagacaatagaaaacattgactttccttaatgggcttaaaacttggacccatgtgaaatacatttccaagaatctctgctatgcagtgatctctgttgacatgagttatgtatgttccttcaggattactttggatgattcattagagaatcttgtctttagactataaagcacttgttgaacaaggttacaatgtagcaagcaaccttgttttggaatgtattttgctacattgtgctcttccctggtctggtgctttcatttcacatattttgctcttaatagaagtagggttcagtgctggggatttcatttgctgttttctccattgacctcttgagctgaagttattcttattagaaagtcagggtaggcgatctgtgtcttgtcctggcttaggaggttgtttatcttgtatttctaggagaattttttcctagcagttaatcctatacatgcctaccatttaataggtctccctagcagctgaaatggctgtcttctcaggttagacttcagaactttagctgtgtattataaaacttgtttgcttacagaaagtggttaattttagtatgtttgaaacagtttttctttataaataaatttggaaaatcatgagcggtttaggacttgactgcttgtgattatgattagccataattagagttctttgttctgcttcttaattttgctgctattccctctgtagaattgaagctaaggtggtttaggtattcagtgttgtctgtaggtctaggtgggagaggaattgggaatagaatatatacacagaatatataaggatgtataacttctgcctcacagagggtatcacacttgagagagaagatgtacatagcagcagtgatgtcacatagagtgaatatggaggctgttgggctcacgggtgagcaggtaatgaggaaaggaccccccaaagtctgaagtaaaccaaaagcaacttcgttcactgcaggggggggggggtgggatgggggggtgcttctaactggtttagagtgttggtcaggctaggagctgacacaacaaccttgaaagggcaaaagcagtcttcttttgaagcataaacccactggcaggtagaaggataaattgtactgtaattggcctttgtgtcatttaaaatgacagacttacccattaccccactaggttcctgtgatatcaatggctttgttggggacacagctccaacaaaggatcagtcttcagctaccaggccccacacatctgagaggccttcctgtggaggaggaacttggtagagatcccctcaccttgtcttaagcaacacgtggcagttgttctccagtgtcctctgttcacagtttaaaccaggccctggcagcaggtaaagcattggcacatttatgcccagtggttagcgcaccacactccaggtggtgtcctctggtattgtgtgtccttctcttcttggaggtttgggggaatcactcttaggacttgggagtctctgtcacagtaagtttaaacatattaagtggcatatttagcagatttctgacaggttagagggctgctaaacacctagcatatatgaattaaacaatcttggtctgctctacggtatctgttttaaactgtactttacaaacaaaacaggagactaaatagaatttcatattgtaattaaccgcatcagttcctaggacgatgcacagataatgaggaaaggatcaccaaagtagtaaattaaaagcaactttacgggaaaatgctgctaaccagttagggatatggtcaggctcaggggctgacacaatgaccttgaaagggcataagcagtctccttttgaagcagatgttcaggggataataaaggaattcatatgagggttagttctggagcgcagggtgtggcagatagcaggatgttgctcaaggctattttaaggccttggtcttatcttagcctttatggggctcctgcagacccggtggttttactgcaattgaaaagacctgcttgaaggcttgcatgcagtaagaggagggtggaattactctgggctcttcacaggctaagggaggttgtttcgggcttaagatctgaagagattacatgataaaacttgatttgaacttgaagagatggaaataggtttttaacaaatacctgaaaacaaagtatatttacttgagcaaaaacaggtgacatagttgttctcttggaggaaaagaatgaaatggtttcactaaatttgtattaaggtaataatgggaaataatatgaaaagtcaagtccaaagacagatggcatgtgtgtacagtaatgatcgtgcataacaggagccaagatgcagcaagccagaagcagagctcagttctgctactttggatttctttccagttggacctatattcattccctttatactttgcactattgaagagaggacagctgccatatttggaggtccgtattgcctggtatagccaatggagattactttataaaatgtcttgtaaacacatttgtctcattaatttgttcagctcatatatacttagagtaagcctatctattatttccttatagtaattattagtcaattaaaacataaaggttaaaatacaagaacctgcgagcttggatcagtgccatccacatagccagcctagtgttgaacctgggctaccttccccccgccccccccccatccccctcaccccctgcctggactctggtttggagaagataacctccccttctttgcctgcaggagctaggacctcccatggctaatcacattgcatctgcataacttactgcttttgtagaataatgcattgatatgtaaatctcacgaggaatggagatcaggactttacttcactgataaggcttgcctttttttttcccccctggaggcactgggggttgactcctggcagcacaaactgttagaatggggcctgagtacttagcttccctgccattctgcagaagcttctgactgatggtaagggtgatttttgccctcgtttggaggaggggaaatctctccgttacctgtcctgttaaaatattcacaaggctagggctgagcatcagtcttcttttacttgtcattggttggtttctagaagaaaagaacagccactgtttgttgaatcctgtgctttaggctttatattctctttaatcgtcatcaggatgccattgtgtacctaccgttatcaacattgtcatcgttatagtttgtagtgcaactagtatttgtacccagatgttaggtctcaaaccagggacaaacacctgagatgcctacttaacatatcaaaaaggacctggcctcccggttctcccagccaacagtcccgttgcagcaggcatacaatgcccactaccctcaactcattacgctgaactgtgcagctcagggctggcagatctctcccctgagactcttccttctgtaatgcagacattctggttgccctccctctttgtacctttggcctcctggatgccgcaactggctcccctacttgctactttgcacttctctcctcacagggctcagggtcttgaccactctgcattctccccaggtgtctgcctccggccatgctctcccttttatctacaataaactgtctcttctatacctaggagcaatcatgtccttttctttttatattttactgttttcattcatctggtgccaaaacctgggattgaaccagggacctttagtctaaatacttttgggctttaattaagttttattagacctctaagctaagaggctgataaatatgtagaaaatactctcccttgctctgctgtgatatttgaagtattattgaagtccaggaaaaacacaaaagtgggaatgactaaatttactgtggagaaggaatattttaagaaagattaatatagaaacacaacacttaatgaagcttttggtgacaatctttttttgtttgtttgtttttgtttttgtttttggctttttgagacagggtttctctgtgtagccctggctgtcctggaactcactccgtagaccaggctgacctcgtactcagaaatgcgcctgcctctacctcccaagtgctgggattaaaggctttcgccaccatacccagcttttggtgacaatcttaatttacagttgtttatggtaaaagattgggggttaacatttggaagggagttacacagagccattaggaagtgtagctgcgtacatgcttttagccatcacttgcttgtcattcctagattttttgtctttatctgttgggtcctgagtctttgaatatttgaagatacattttttttctcagcttttccttctttatctttttccaagcctcactacagttttaataagatctaaacttcattttttatttttaaagtatttttaaacgtattttatttatataagtacacagtagctgtcttcagacacagcagaagagggcatcagatcccattacagatggttgtgagccaccatgtggtggctaggaattgaactcaagacctccagaagagcagacagtgctcttaaccgctgagctatctctccagccctcagcttttccttctaaagagttctgtaagtgctctcacactgtatctcaattaataactactagtatgtaaataattttgagacctccccctgatatctgctagtgaaatgagccaattcaagccagattagaatacataaaggcatgtttattgggaagctgctctcaaggtgagtccggaggaccaaggccagggaagttggggagaaagacagaaagggccagtacagagagagaaggagaggaagagccaagacccaaatgtctggattatattagaaagaagagcctctgggggaagggcagcccagcccttgggctggaaagttcaaggttggggccagtatgccaggtaggaaccgaggtatgctgggaaaacctgaggggagaggtctgctttgatatgtaaaatatgtgcttaagtttaaaccaaacaccgtcctttctctttcagtccccgcttcacaccttgtaagcaccatggctttcatcaagatttcccttctcatgggcactctctgctcctttgagttaggatttctcgctattgaagcttctggaaaatagtgataggaggtaaaggtttcagtgccttgcctatctgaaacaaaaactgtatgttttcagtcaacgtatgttatactttaaataaatcttaagtgaagtgcctttttagaattttgaagttactgtttgacctatctctaccaaaaatcaaaagtcttggtgttgtgttttatttaaatccagggtgtgttttgtagaggtacagtgaggtggaagggacccaggggagctcatgctgaggcacccttccctctgaggtagcagccatatgaagagaagaggatagaatagtttacttgggtgcataggaaggggagttgagaagggagtagaggaagagagagaaacagaggaaggacagagaggggtaggtagggattaaggagagaagagagtcgaaaagagggggcagagagggagggccaggcagcccctgttagagcaagtcaggcctacctggttattgccagaaactgttaagcggagcctagaaggaatgctaactcctgggttttagatattttactttgactgtttttttgaacttgaacatttcagttttagggttttttttcatttccttttttaagtttctatttttttttccacagtaatatactttggcatggctgttttatttttttcagtcttacattctgtatactgattaactacagttcagaaaaatatgctgggcttcctctttcctcagttctttggttctattttaattggataatagagcacctgaactgatcttattttattatctgtcttccttgacttttggtactacttcctggaagactgaagactgtgtcaagttgtggagaagggctgttagaatccgcttctggccagttcctaggataaccatgctcttagcctgtctgcttttatcttcaaggtgtcaagactgaattcaaagtgtgcaggggtaaatggttatattcacagtatgttctcatacatagtaaatgataattattattaaatgagagtattaccttaaattaagagccatctttctatatgaattttttatttctatattttttttgtgtctatgagagagagacaaagacagagacacatatgccctggtgtgtgtagaggtcagagggcaactctggagtctgttctctccttagacctttgcctgagttcacaggattctgcacagattctctggctcgctgcctgtcaagggccttaatctgctgagtcatcttgccagctctaataccttccttccatttatctatcactgtcttctaacctcttatttcatggatccagtgtcatcctaaattatttcgggacaattgagaacatttggacaatgcctttaacatataagatgaaaaccgaagaaagtaactaggaacaactcccataaatcagagttgtaaaagcctttagggtaggggtcagaatttcagctgttcaagtttccttctctttccagattgacatttttattattttgaggtctcttacatgttaaaggcattttctcaactcctcataattatattcaaattatatttcacaggaatatacataggtacgtcttgtcctcagtatgtcacaccaaggagtgcttggtgctgtttagaaagtttgcccatcttaaaaacttcagtattggtgcttatttgtattgaattttaaagagttctttgtatagtaaagatactgcacatttgtttttgatagataatgcaaatagtcattgtcagctatcttttgaatttacttctaatgtgcttctgtttgtttgtttctttgtttgttttgcattatgcctaatagaaaggagcctctataaccctgaagatagggctcaataacagacaagaacccttggtgcttggttttcttccccccccttaaatttttttattatttaaatgcatcttatacatcaaacatactaataatattaagtattttgagaatcaaataatacataaaaattgttcaacttttatattcatatcttttcataccgtaaaaatatcattaatgaatgtttaatactgtccataactgaagatcctgtatcaaatgttgaatactgaattgtttcaaagcatacaaaatattctttgggagttaagcatagtaaaagagcataaaatattaaaaatgaatcatgaagaaatatattcaaaagcccttatgataccacctgacatagtgagagagtatttaaaacacattctatatctgtgtacatcgtctaacaatcagtttacttaaaaatgtttatcagtgtttctaggagagaaattattttatcagtaagtatatttaaaaaatttcaaaatagcaaaagctccttgaagttaaacattaagaaaatgctaatttcaagcacagtgagaaaaattatcaataatatttccatgtttgtagaacattttaatattttcaactattaatattcaacaaacagaataattattttgacatatttcattgttttgtctccctttttatttctgattttattaatttggatactgtctctgtgccctctggacagtctggctaaaggtttatctatcttgtggattttctcaaagaaccggctgcttgtttgttgattctttgtatagttctttttgtttcttcttagttgatttcagctccgggtttgattatttcctgccatctactcctcctgggtgtatttgcttttttgttctagagttttcaggtgtgctgtcaagctgctagtgtaagctctcttcagtttttttgtttgtttgtttgtttagtttttttggaggcacttagagctctaagttttcctcttaccactgctttgattgtttcccataagttttggtatgatgtgtcttcattttcattaaattctaaaagtcctttaatttctttctttatttttttccttgaccaagttatcattgagtagagcgctgttcagtttccatgtatatgtgtgcttttcgtttttgttggtatttaagaccaccagctttagtccatggtgatctgatagggtgcatgtgattatttcagtcttcttgtatctgttgaggcctgttttgtgaccaattatatggtcagttttgaagaagctactgtgaagtgctaagaagaaggtatattcttttgctttaggataaaatgttctataaatatgttagatccatttaattttgttagttccactgtatttctgtttagtttgtttccatgatctgtccattgctgagagtggggtgttcaagattcccactcttactgtgtggggtgcaatgtgtgctttgagctttagtaaagtttcttttatgaatgtgggtgtccttgcatttgaagaatagatgttcagaattgagagttcatcttggtagatttttcctttgacgagtatgaagtgtccttccttatcttttttgataattttataacttgtgattgaaagttgcttttatttgatattagaatggttactccagcttgtttcttgggaccatttgcttttccagcctttcactctgaggtcgtgtctgcctttgtccctgaggtacgtttcctgtatgcagcaaaatgctgggtcctgcttatgtatccagcctgttagtctattatgtctttttgggggaaattgagtccattgatgttaagagatattaagaaaaagtgagtgttacttcctgttatttttgttgttagaggtggaattatgtttatgtggctatcttcttttgagtttgttgaaagattactttcttgctttttagcatgtagtttctctccttgtgttggtgttttccatctgttatcctttgtagggctggatttatggaaagataatgtgtaaatttgttttgtcatagaatatcttgttttctacctctatggtaattgagagttttgcttgggctgccatttgtattctcttagggcctgtgtgacatctgccatggcttttttttttttttttttttttttttggctttttgagacagggtttctctgtatagccctggctgtcctggaactcactctgtagaccaggctgaccttgaactcagaaatccgcctgcctctgcctcccaagtgctgggattaaaggcgtgcgccacagacttctcaccagagactatgaaagctataagatccagggcaagctgggcgggcgagaaaaaaaaaaaaagggaagtctgtaattctgataggtctgcctttatatgttacttgaccttttccccttactgcttttaatattctttctttgtttagtacatttggtgtttttattattatgtgacagaaggaatttcttttctggttgagtctatttggtgtcctgtaggcttcttgtatgttcatgggcatctctttctttaggttagggaagttttcttctataactttgttgaagatatttactgggcctttaagttgggaatcttcactctcttctatacctattatcctaaggtttcatcttctcatgtgtcctggattccctggatgttttgggttaggagcttttttgctttttgcattttctttcactgttgtgtcaatgttttctatggtatcttctgcacctgagattctctcttctatctcatgtattctgttggtgatgcttgcttgcatctatgactcctgatctctttcctaggttttctaactccagggttgtctccttttgtgatttctttattgtttctatttccatttttagatcctggatggctttgttcatttccttcacctgtttgattgtgttttcttgtaattgtttaagggatttttgtgtttctttaaggatttctagctgtttacctgtgttctcctgtatttctttaagggagttatgtccttcttaaagtcctctatcaccatcatgagaagtgattttagatccgaatcttgcttttccagtgtgatagtgtatccaggacttgctatggggataattgggttctgaagatgccaagtaaccttggtttctgttgcttatgtacttaagcttgcctcccaccatctgattatctctagtgctacctgccctggctatatctgactgggacctgtccttctgtgatcctggttatatcaggactcctcagagttcagaggcctctgggatcctgggatcctttggtccttggtgtgttagagcttctgggagtagagcttcctctgggtgttgtggaagtcacccttatcacacctgcccaactggctagggagttggcacccaaggtctgctcagggcaccagcccagactggaagctctttttctgttttttttgttgttgttgtttgtttgtttgtttttaagacagggtctcactatgtagctctggctgtctggaacttgctatgtaggccagacgggcctcaaactcagagatctgcctgtctctgtcttttgagcactgagattaaaggtatgcattaccatgctggcatcggtttggtttttttgtttcttggttagtaggtttttttgttgtttttttcccccagtgtgagattttttttcattcctagtctcttctttttccactgtcccagtttggtcttctgttgccctgttgctgtgacaaacactgtgaccagaagcaccttgggaggaaagttcatttcagctcatgtgttacagtccatcactgaaggaagccaaggcaggagcttgccatggaaagctcagaaatgctgcttctgggcttgctcagtcacccttctcacacctgcccagtgacagcagcacccacaatgggctggaccttcctgcatcaattagcagttaagaaaacacatgacagccatggcataggccagcctgatctgagcatttctttacttgaggttccttctacccaggtgactctaagttgacctgtgaagctaacagtgacactcagtgtcaggtagaaattctgactttctttgtttttttttttttaatagtaaatctcttatttccttctcttgtatccagttctaagcactttacaactgtggaatggaccatattctgggcttactggctactctccctacccagatgtgaagttttgtttcccccaggagaaaccattggctttcaagcatttagtgttgtatgccatgaactggagcctgaatgcctgtatttagttcctgtagccatgcattttagcctcatgcatccttgtcagggaagccattgggcacccttgttagccattttggtctttgagaattatgaagtgagacttggcaaccttaatagcactcaagactctgttttagcaaatcctgtcaactccttcttgtattttctcactcttgttgctgacttatctcaagtcttcttttctcctttttgaagttttgtttgctcttcatttagtgagttgggaagtagagaaaagcaagcacagcctgtgctcttagctgccagtgcatctttccagccctaataaatgagcccttttcaagtttgggatgatgtagttcacttgggaaaacagaattcctgaatgagtagcttaggaactcttctccgtggctttatatagtttttgtacacgagctatgattctagtctaagctatgaggctgtccatgactttgatcttacaactgagagaaaatggttcctataggaaccttcccatcctagaagtaggtgtagaatgtctatcattactggttattgatctctcagaatgtttctgcctctgcctgcacactggttccagggcctcctggattccctctttcctgcacttgtcttggtttctgtcttctcagttcagcttatatctgagctaccatgaacatttcagattgacctttgacaggtgtgcttgtgccttttacttctagccagagaaactgatcacgctggcccttcattttgttttatttcagatttttcctagccaaactaaattgcatatctcagatcaaagttttccagattctctgactcactttaaaactgtgagggtagaaagaatagtgagacagtaagatgtgtgatcactgcctaagtagagataggtagcattcttctatttagtatgctagtttgattttaacagagcactttaggtaattagcagtccacactgaatattgtaggaaagaacctatcatttaagttatcaaaatggactgaaagtgcctcccttgatttgttgctgtatgtttgcattaggagttaatatggtgtggcagaaactagtgtgccactgactagtcatttctacattactgtaatgaggtatccaagtgtggttgatttggaaggctgctttagctcgcatactggaggctcatggtgattggcaccacagtggcaggtatgcatgtggaggtgatgcattgttttgccagacaagaagccagggagccattaaacactcaagctgagacttgcacaacaatttgctcttgggaaaattgctctagagtcccatggaaactcctgtaaatttttggagcacatgtcctcagtgacccagcatccacatactagaaccccattttaaaaggctgcatgttaaacaagttggagatgagttgaacatagtggaactctggaagtacaaacacaaagcatctccaagtgtagcaactgataatgtagacctcgagacttagatgataaacctgcttttgctcttctcaatgcctttgcattctttatcagatgtatgtttaaaatattgactgggcagaatatttgctaaggtatttcttagttttctgttgtgaagagacaccatgactaagacaacataggagaaagaatgtattgaggcttacagtttcagagggtgagtccattgcccctggtggggagcacagagtggcaggcaggcaggtatggtactgaagcagtagccaagagcttacctgctaaggcaacaacctcaatcagagagctagctagctgggaatgacatgggcttttgaaacctcaaatcccacccccactgacagacacacgttcttcaataagaccatgcctcctaatccttctcaaacagttccaacgactgggaccaagcattcaaacaggaatgtgtggagaacattctcattcaaaccagcttcggtactgtgtagctataaagaatataactgctgatgtatcaaattggaaacaatcattttcacaaagatgatcaacatagaaacctattctatctaacatgaaattgtgtgtgtgtgtgtatggagagagagagattgattgattgattttaaaaatgagaaatgagaataatcttaagtaatagaaataagggaatttatggtggagctcacttttcttatttaatttgctttatacattgatttaagtcatatgggctcaccgggcgtggtggcgcacacctttaatcccagcacttgggaggcagaggcaggcggatctctgagttcgaggccagcctggtctacagagtgagttccaggacagccagggctacacagagaaaccctgtctggggaaggggggtaagggggggggagtcatatgggctctagtcacaaatatttttttcaaaattgagttgtatgtaagtattataatacattattattagtttaatattacagttgtaaaatgcttttggtctaatgcgccttttaaaaactatagctccatattcagaatagttaaataacctggatttcctttatgttttaggatttaagtgcccggtatgctcaaaatttgtaccctcagatgaaatggatttgcatcttgtgatgtgtttaacaaagccaagaataacgtataatggtaagttcactgccttaagataacatttcaatttagcattaccataaattatatgagtttcatgtttgaagcaaaatttaaatggcaggaaggactcaaattctcatcttgagatacctttatatgtgtaaaaaattaatctattaattaggttatatctattgatatgtgaaaaatatattttccaaaacatctaatggcaaattgacactgtcttgtatttttttttaatccttaatagctgacttagtgacaaagaactatcaaaactcttctgcattttccagatgtcctggaaaatttcactggtacataggagagaataagaatcaaaaaggcaaatgatgttgccataacaatagatgtagccaggtgatgatctctgagcttgaggccatcctgggtctacagaggtagttctcggatggccaagacttcctcacctcctgactctagattgttggattacactttgagaactgttgtgctgatgaaagtcttttaggttaggcctaaaagaaaaagtaatgcttgtgatcactgtgttcagagacatcttatcttaatggttaagaacattgttgtgcttccagaggacctgggttcaatttcctgcacccagatgatggctcacaactctatgagactgcttctaagggatctgttctaagggacctgacactcttttggcttctgggcactgcacacgtggtgcacatacatatggcaaagtacctatttgcataaaagtaaataactcttaaacagatctataatagatgatacactgttaagagtagggacaaagttttctcttgaatatagtagatagacagctaatgggagaaaataaatctaggaaacggagacagaaacttactgtcaccaagtacctgtccctatctactcacatgtgaatttcgttcttgcaataactggcagttgctttgggtctggtatgttggactaggttattctgtcttcaccctagtcatacagtcttcagtgtcatcatagagcaagtggaataaattcaggaactaaaaatcaaatagttttctcttggctaataagaaaaacagttgaatttttgtggtatttcctataacttttagcatagctgagactaaagccagcttgggctatttatgtattaagatcctgggtttttgttgttgttgttttgttttgtttttattcatttatttactttatttttaaaatttatttattaaaattttttgagacagagtttctctatagagctggctaacctggaacttgctctgtagaccaggctggccttaaattcacagagatctgcctgcctctgcctcccaaattccgaaattaaagttgtgagccattactacctggctaagatcctgtctttaatgcaaagaaataagtagatgatgaacttagctacactaatgtcattaagaaaaagaagaaaagacatttgaggcttaaaaattttttccaaaatgtaaaagttagtttgaaatatagtgagtggcaaaagtcctagtaactagctaagttcagcagctgtcttttgtgttcttatatctaagacactactctatagaacttctagtctaccaagagtaatgagatgaatacattcctcagataactgccctgtgctttcagaagactcctcaacatagtgtctccagttttactatctcagtggcaacaaagcatttctttcccttcatttaccagtgtataagtaggaatagcttctagcaattactttgaataacaaatgtatgtgttggatagatacctttttgccttacaaaattatcttctttacataatctagttgcaattctgtcacttaagattttcattcaagctcagaatttgaggctaaaagtggataggtttgtttccattcttactccgttgttctgtcattagcatcttcaatgttgccagctacattttattacattgaaaagcataatatatttgtatataatctcagtattctatacatttaatttttgcatatccagaacataatatatgttatgattcgactgctttttatttcctgatttaactatttaatcaacttgtgtgctagattgtctcaaagtataagtaaatgcagtgggctcttatcttgatgagtactaagccagtgaggagaatgaagagaggcttgtaacttgcagcaagtaaaggagagtacaaggttattctcaaagcagtgctcttgtaaggtggggtcttgtgctcagactgtttatttagtatggtaaggaataaggttcactgtaggttgcctaaaagaatgagtcaaagtgactctgtgatcacatttccctgtagagttctaattgaaacaaaaagaaacccaaacaaagcaatttgaaaggcatgttagaagtctttttaaaaaacagcagccttgagtttgcccctaatgatacctgttctgcttggcagttatttacaacaaaacataccacacaggcaggcaggcatgaatacatgcacacacaaacacacacaacacacacacacacacacacacacacacacacacacacacacactactgtgcttggaagcaaagtaaaagccattctcaaagctaggcctgggtctataaacctttacagcaagaagcaacgtttccattaacttttatgtcattttaattttaaaactagcctgtgggctgtgatgatgaagaaaggatctgggactgtatagatctcggggtaatggaaatgtgtggcacaatcttaggcatggggaattctaactgcttaaaaggcaaaggcgcagagtgtcacttatcacactggtggtgagtctgtttgcaggtggcctttataatgccaaagcaaagcatttgttctagtatgttatcataaagtttacaccggtgagtcagaaactctgagactgactcttttggtcacgtgactatagtttcatgtttgaattcctaaatgttgacaccagctcagctgagttgatgtgagtcatgttaatgcttaaacaagaattgtcttttagtatgcttagtaattgtatctgtgcagacttccagaagtacctaggtctgaaattttttaatttatttgtgaaatatatattagctatctacaaaaattcacagaatagtcagggtgctttttggacgctgtatttacagaggagctctgagagggaatgagttccagacaggtgggtgtgagctgaggagagcttcagagatgctctacatgctcctgaggaacctgctctgtcagcatttatttggattcaaagaaaagtgtccttggtgtctaggttactcctaatttgggggttaagaatgacagttctccatactaagtgttgctgcctttgttagcttctcagcagctgtgaccagaaaaaaacaaaaggccagtttgacaggagaaaattcatttttgacccatggtttcaggtcatggtgctttggccccatggcttaggcccttgggaggtagaactgtgtgacaggagagagattcctgtttcttggtggccaggaagtggagagtgaaaggaggatgtggtggtgattctgttattcgtcaagggtgtgcccaaccaaggcccccttctgcgttactgagtcactcacaagcttactataggatccttgacactacggggcatggtgccttttcctagttagcagtaacccgctgagtggatgctgccttccaacctgaggaatgtgtttgccattttcttctcttttaaaacaaaaggcagcttaatttatttaagtttatttttgaaacagtttattttctgtagcccagcctggcctcaaacttaacaaatctctcgcctccccaagggctgggattctgggtttttttttcttttccttctttctttccttttttccttccttccttcctttcttccttactccgttaacctccctccctcccttccttccttccttccttccttccttccttccttccttccttccttccttccttccttccttccttccttcctttcttccttccttccttccttcctgctaaattgtgttggtagatctttcaaatggtctaattaaattgtattgatttcttatgttgtggatttttacatttcaatcatggagtatttaaaaactttactattgaagttacacaaaagcaaagatgatgaattggaaactcttcctttgctctgaagttgtcaaatttaaaagttctgaagctgggcagtggtggcgcaggcctttaatcccagcacttgggaggcagaagcaggcacatttctgagttcaaggccaacctggtctgcagagtgaattccaagacagccagggctacacagagaaaccctgcctggggggtgggagtggggggggggaggaacattaaatgttctggtctccatcagctacagaagtactgtgaaaccatccactcttttaaagacagattactgacagcttcatcagtgaagtccttatcatttcttcaatgcattctaaaagtaattccttgtctaagtgagtgtgttatgacccacaggaggagcaggaccacccaaaatatgtaatagtattttcctctaagtcttagattccattattataacattttacatgatttttttcttctttaaattgtatttttttcattgtaatgtgtgattttgtacttgtgctttagacaaaggagacaatagtttaaattaatctaaaatttattaatactaagtaccaaatagcttatttcttttcattttctatattttaatagaaacattttaagaataccctttaccaagttaatatacattattccttttactagcttcaaagatagatttggtagatacagtggaaagtcatttggattttaatgttgtggagggctgtgtccgccactctgttttcaaaatgtattgatgtgtttatttgtagttaagtccatcactgcttctgtacagaatgcttataagctatcagagttagttgtagctatcaacatgacacaaacctagagtcacctgggaagaggaaatctcaactgaagacatgccttgttcaaattgatctgaggcctgaccttgtctcagggcattttctcaattgctaacagatagagtgagcctgggctgaattaaaaagatagctgagccattacagtatctaactgcgcttgcagagaacccagctttgcttctcagcatccacacaatgatagctcacaaccctctgcaccttccctcctggggatcctcttctgacctcctcaggcaccaggcacacacaaggtccacagacacacatgcaggcaaaacactcacatacatcaaacaaagttttgaaaaagtagctgaacatgagcctgtgaacaagccagtaagcatcatcattgctgcatggtctgtactttgattcttgcttgatttttgagcttcttcctgcaagtatacctatgagtataatccaaataaacacttttatccagtttctcttagtcaaagtgtttatcatagcaacagaagcaaacaagtgagtttctatgaagaaaaaaaaccagttttgttttagtgttaaatgtttgtttgtctgagataggtgctcactgtttatatccctggatctccttgattgactgactggcttggagctagttagggagagcatgtggggctaatcctctgctcagcctgcctctgtctcatggggaacaaaggcatgcgccaccacacctggctgcttcagcacttcactgatacctatggatattgagttggttgtattatggaatagtcagtgtccttgctaggagttgtttggtctacagaagtctaacagatggagaaatttaataaaattctccactataactggttttaccaatttttcttggatttaaagtctcttaagttgtgttggtggcattagccttatagaaagttttctggttttatatgttttatatgtgtgtacatgtttgtgtatgtgcaggtatttgtgtgcatgtatatagagattaaagattgatgttatcttctattacttgctttccatcttactgaacctgtaactcatcagttccactagactagctgaccagagagctccaatctgcccgtctctgcctatgggtgctggaaatccgaactcaggtccttatgcctgcacaccaagtattttacacactgagccacctcgtagcctttggctttatatattgcacagctatgttatttgcagaaatctttaatttgagtattaccttttagactagaactttttaaagacaggtctcatgtagccgaagctgtacttgaattcactgtgcagccagacctggacttgatccactcatccaattcctgagctgctgagactgtccaccttccataaccattaacgtgccaccatggttgtgtaaattctggtataatgtgtaaacctctgatttggggtaagaatcaaaggattttgttactcatgaacagctgaaataaaaagtcctttgttggtcctgaaaccttgatccccccccccccatcagtgagcaactgcaatgaagagctcaaggaacctgtgctctacagatgtccttgaaaagattcccaagggcacagaaacgccagtgtaagacccagggagaatggccttccaagtgctgcttcctctgattgcttttgcctgccatctttgttcttacttctctttagaatcgacttttcttcctgattagatacgtttgcatggttacagtgcagagacagaaaatgtccagtgaaaagtaacctctcaccttagcaagccctcagttctttccaggggtagcttgaattttttgtactctttccactagagaaagggcatttgtgtatgtaaacagctgagaatgtctttgggactagtatcttgtagtcatgatcagccaaggttgtatgtatttttgtattcctgatcgtggacatacattagaggattagatagagttcagcataacctgtctcatgccaggtgtagtactagccaggtattagttatgtctcaccattgctttatgaggtagctgccacccccaaatgttcctaagtaacttggaaattgagaatcacacctaaagctgtctaagctatatacatgctgtaggttttttaaggctttggggttgagtttttgtttgtttctatattcaaattgtttgactctcttattgccattatgagcccacctttaacatgataacttcatgcatgattctgattttaaagcatacagtaacaaggcctgaaaatctgattcttactgtccctcaatgtagtgactcaacatgaatgtacctgaatcttagttaaaagcatagtttattacaattttttaaatgtattcaacagtttaagtttgttggagggtagagtgcaatgtaggacaatatttgattaggtatagcaattgtgatgtttgtttgtttgtttgttttctttttgtgaaatgtgagagaaatggggaatagattgaaaatttggaagattaggaagtaattctgtatatactaattccttagatggcttgtatggctatttgcagcctataaggaacttaccttttttgtacttggctttttgagtttgcttttaggtcaccttgggaatgaacatgtgcttcggaagtcatcttttctccccttctgttccaattttcccattccagattcaagtccatttcactttggtcacatttccttgaaggagatgccaggtgtgcatttccaaaatatttccaggcatatgatttttaaattattaaaaaactctgtttttcagtagtctttttgtttgctctttcaacctatgaactacattactgtgtggcccaagctggctcccacgtgtaaccctcctgcatgcttaagattttagctgtgagccattccttgaagttgaccttatttttatattgtttttacagtacagttgaatggtagctgcatgattaatatgatcaattctttgttatatttacacacacacacacacacacacacacacacacacacacacaagcaaatgcattgaggtagagaagtctggaattccaaggtgagccagaatgagattctgagagagatgagaaccaacacttaccaggggtttgcactttgaggcagactattaaaggttgataccatatttatattgatatttaacttgaaaatcagcttcattttattaaatttcataagctgttacagtataggagtagaacaaccccttgtgtaactgaaatgtcaaatattagcattaactccttctaaactaatttaggtacctgaaaatattagtaagagagccaccacttttcagtatttgagtaattgctttttactaatattgtgattttttttttttaattcttgatttttctagggattatttcacatttcagctgcttttgttttcttctgctatcattgagggttcaagagaaagtaaatcctcaggtaaacgcctgatgtgttatagtgctcggcatcgtcttggctggagagatgaactactgtttggatgcttgtctgaaagtgactgtggtgatagacttgtgcatggagccctggctgcctctcacactcactcggcctttgttgttttggcttttggagacttttggctgtctgcttttcttcatgttgtcttgatccacaataactttatggatatgtgcttggatctgctaaattttttaattttgcacagttggctgcttgaattgtaagtgatctctttggacaaagagcttgagaagctgtaagtgaagtatcaatttacagacgtttataattagcttgtaagtatatgttcaccagctattacatattttaacatttgatatcttaccataactgaagctgaaaattgaagagctgattgcagttggcttgtggccactacggtgatagcacaggtgatgctggcttcttttctgacagagcatgttattggccaggattgcttcaagctgttcaagcagtagggtgtgagctgctctctactttataatataatactaactccccgcagctgagagtggccagtctcaagacttttccccaggagctggagagagatggttcagtggttaagagtgtacgacacttgcagaagtccccagctcaatgtctagcacccatatggggcagctcacaactgcctgtgactacaggcaggacagaggacccaacccctctgacccgagagcactagcacgcacagcacatggtcctctccagctggaaaatttcacacacttaaggatgtctgaaacccttcgtttgcatcaatatttatgctactgtaatggggttttttaaattggaatgaagttattgtttcttcaacaaaactcacaaagtaggcaaaattctacttaattagaacctaaatccaagttatggtcccaaaacacaactactttagtgtttctgataagttacttaacttcctcaagtctttttgctcacatggaaatgtagataacagtcatcattgtgtaaggttagcatcaaatataaggatgtccaaaagaatgcaataaagtgcttatttgtattgccttatgtgaatgaagccacagtgtatgcagtgttgggcaaatcatctgcatgtgactgttgtaatctgcccatagtaatggtgtacaaggtcagagggtctcagacattccatggcaacagagatttctctgaagaactgaaatatcaggatgaggtgtaaaagaaataggataataattggctttgttttttgaagaagtctgtaaagtatttcctattaacaaaaaagttcaggtaacttataaaaattttgtaacttacaaaatatttacagaattctttaaaatcttaactatatttttagtacattccctttgttaatattgaagacaagtaataagatgtttcaaaggttgactagattacagcaaaatggaaatctgtattaagttttcagttttcacgtttttaagttattggggggaggagttcttgatggtttttgaggcagtctaggttgtcctcactgtgtagaccaggctggcctcaaacttacagaggggagatactcctgcctttgcctcccaggggctgggagtagcggtgtgtgccaccatgccagcccataaacctttaactgtttgtgggtattctcaccccagctccgtttctcactgttaccttcagagagtgccctcctcctgtcttaacctcctgggtatagttaggctgtgctacgatgcctggctcaactcaagtctcatgcacttcctagtcttccctctcccctcataccaatctccggttaccaagaaactcaggtatctgatactgccgtgacatggaatgcaaccccaaagtgattctggcagcccacctcttgttaaacatcatcgttttaactttttcccatatctataatcaatggaaaggcaccagagaggtagaatggtgttcatgccaactactccacacatgttaatagcggtgatgaacacagaaaaattgcagttcagttttcacatggcacagtgatttctttttaaactgtaaaaatgttttcatatagattttatgagaggactttacattttgaaaaactgagcaatttttgagacgttctaactcagttgcttacatatctcatttgaacattgagtaactggagtattaaagctgacttcaaattgtttgatcagatgagagttctgcaggaaacccttgccagcagagcttgatctttggctttaagctgctgtttggggtgtttgtgtgtgggtgtacttgtcttgatactgaaaatatagttgtcattgtactgaagctaaaaggaatttaaaatcagaataactgccttaaatccagcattctgaattaagatagggcagttttgttttgttttttaaactaaacttcaaagtgtttgaggttcatactcacctatcaagtttaaaatattatatagaattcttaaaatacaatttttattcttatattcttaaaatataactttatagattggatttgccttttgtacaaattttatgagtaggataaaatttaaaaatatatttaatgaaaaatttaattaattattttagctttaataaatattaaaattgtcatagcaaattcttaaggcattgtaatgaagacatcaacttgattatagatcagtatagaagtgttagagaagtcgggtattatactggctagttttgtgtcaacttgacacagctggagttatcacagagaaaggagcttcagttgaggaaatgcctccatgagatccaactgtaaggcattttctcaattagtgatcaagggggaaaggccccttgtaggtgggaccatctctgggctggtagtcttggttctataagagagcaggctgagcaagccaggggaggcaagccagtaaagaacatccctccatggtctctgcatcagcttctgcttcctgacctgcttgagttccagtcctgacttcctttggtgatgaacagcagtatggaagtgtaagccgaataaaccctttcctccccaacttgcttcttggtcatgatgtttgtgcaagagtagaaaccctgactaagacaggtatttttctttcaacaatataattggttattgatgcacaatactctatttcgtgttgagtcttgtgtgtagacttatggtatatggttaatgacatttgtttctcagatgctcatctcgctcgtctttctcatcatgatgagtgaggttgagggccagtcagtgtcttctgaaccctgagtgcactgtccctcagctagaggagactggtgtgttttaggatgggcgtgtgctgcagttttgtttgcttttcttttgagacagggtcactctgtataactcagggtaactgtgaactttcagtacacctgcctaaagcttcctgtgggctggcattacgtgtcataatttatggaggtgttttttctcattggtacataaaactgtgatacatctcacaatcatgtatggtagaaagtagtgcttccaacagagcttgctgataggagcctgatacagctgtctcctaagggcctctgccagtgcctgacaaataaagaagtggatactcacagccatccattggactgagcacagggtccccaatggaggagctagagaaagaacccaagaagctgaaggggtttgcagccccataggaggaacaacaatcaaatcaatatctccagagctccctgggactaaaccaccaaccaaagaaaacacatggtgggactcatggctccagctgcatatgtaccagagcatggctagtcggtcatcaatgagaggagaggcccttggatctgtgaaggttctatgccccagtataggggactgccagggtaagggagctggagtgggtggtttggggagtaggggaagggggaaagaataggggtttttcggagaggaaactaggaaaggagttaacatttgaaatgtaaataaagaaaataataaaataaaataaaaactattttgaaaactctaaaaaagtagtgcttcagttttgaagtttattagaaaattcattcacatctttattaggtttaaattggttttatttttgcaggtaaaatctacgtggtagaaatatagtttaatttttaagaattagaaatctttattaagtggttttctcagttccgcagtgctggggatgaagcacatcatgttttgctcttcctcttacctgtctgttacctgggtccctgaatgacaggccaaacactcaggcttcagtggagaagaaagggggaggtggagctagaagagaattccaaagtagggaggaaacaggaagagaatagctcgggtccagcgacagctgatgacagtggcccgcccctctgctccataggaaacagtgcagcgcaggaacctgaagggaatgctgtgacacgtgttcttatctctgtgttagctgctggtcatgatctgtcttagcttgtgctgagaaagttgttcattaccaggcttgtattctccatcagtctgctgcatcagaatgaatcattgaggggagctacatagtctctaaagtttctattcatactctacagtgatggcatgctttaggttttcagcggttttttgttttattttagtttggtttttttcggttttttttttttttttttttttggtttttcgagacagggtttctctgtatagccctggctgtcctggaactcactttgtagaccaggctggcctcgaactcagaaatcctcctacctctgcctcctgtgtgctgggattaaagacgtgcgccaccatgcccggctcggttttcagcggaacacaaaggatatgtaacatgcaagttcaaccagggttcctttaaacattaatatagaacattaagctggagtagtggtgtatactttcattccctgttctcaggagccagaggcggggggggggggggtgggggggtggtctctatgcatttgaagccagcctggtgtacatagtgactctgggccagccatggctacatagtaagaccctgtctcattcatacatacatacatacatacatagaacagtagtggggcttaaattacaatttctgaatttttttaaaggaacatctggttttcccttgtgttggtaagcatcgtggagtttttacagttccttcagcactgtctggaaaccacttagatcgctgtctgggtttgccatgccattgttgatgggaaaggctatgaagagtttctcttcttttgttatctgcttttttttttttttttaagataagcagcttttttagcagtttcctgtagggcattgtttctttttgttttctttaattaaaaaacaaaaaaacttagaatggttattttatattcatgtcttcttagccatactacactaaattttttcgaactgtcttagacactaaactaatgttgacacatggggaaagattatgaatttcaaattacacataactgagttgttgactttggatcagaatcttgtgcaagttgagagctatggtagtgtgtccgtgcttactcttatttatgcctctgtggaccgggagtgtaagatgtccagaaggagaagtgaagagcactcagtcatcgtcagcaggacttcaggtgtaggtgctgagttttatgcagttggggaggtgtagtatgccattcattggtgggttgaggttttgtcttttgatttttcagtttgatggctagttttgctgtactgagttctttctctctccacagaggatgtgctgagtaaagatacgggggaatgtgcaatatgccttgaagaactgcagcagggggacaccatagcacggctgccttgcctgtgtatatatcataaagggtaagcgtggtaggcctttaactaagttgatatcacagtaaaatgattattttcttagttcaagcattgtagttagggctaaaaggtttcttcttcatgcaaactcttctgttcaacttaggatcttaataatgctccacctccctttctctcctctgctcagatcaaatttgaacatgcatctgttgtacctaagtggctgccatttttaagccacttagtgttctgcaagtgtttttcagcttggtcagcaggtgtctgtgtagcagccacttcaaattacaactgggaaataagacagttggactgtctccaggtttgtatttcaaccaaatggcaagctgagatcccagcttgttgtacatacatttttcttgcttcagagtaatataggaccaatattagcttgaaaaacaaagccaggtatggcaaggctcttgttcagttccagcactcaagaggatgaggcaggtgggtctctgagttctctgccagcctggtctacatgctgagttccaggcctagcagtgagactctgttgcaaaaacaaccactatttaactgcaaagagaatagaaaattaaggcctagagagttggctcagggattgagagcacatcttggtcattttaattcccaggacccatgtcaaggacctcacaagcacctgcaactccggccttgggagaggctataggtggaaggacccaacacctctggccccagagggcactagtactcacatgcacatacctacatgcatactcataattaaaagaagtgataaaatatatttaaattttaaaagaaaaataggaagttgtagcattggaaccaaggggaagaataaagtggaggtttacttaaaagtgggggctgttgcaacatggagaaagcagagtgaacaagacaaaacggagacacaaaaatccaatccaagccaagcagtcattatatctgtaagaataaactacaggtggtgaaatagtagaatgtgatattgataagaaacatgctttaaaggtacagatgaatgcagagttaaaaggggaaagagccatatatctaggcaattgataactaaataaacaatgagtgctaaaatctcatgaagtcaaccaacacggggagcactgcctagactagagtgactatgcagtgttaaatacggaaaactcttcttgcttatctcgcttgatataagctatcttgattatttttaaaaattcctgactaaaaaataaatgagttaagatataaaaaagttgaacagtcgcggcttgccaagttttgactttagttttgcagatagaatctaacggtatagcataggatagcttcaaaatgtccttgcagcccgggcttccctcacagctgtgtcctcccctcctgagagcgagtgatttggggtgtgtgtcactgtgcctgacttccatactttccacgcctgcttttacttgtcagtgctggagatagaacttggggtcttacaggtgccaagctgttctttaccactaagctgcatccctacccagtgattgagtctgatgaatgtatatgcttgtatatttatccaacagttattgaaacataaggtatctaagattaagacttagtattataaaaaataataattatacccaaattaatctgtatagttaatgctgccccaatcaactcttagtttcttgtaactggacacagtgtttctaaaaatatatgtggactaaaagtgaagggccaaaaagagcagtgagcatactcctgaagagtaatactgttggcacatgtcctaagagatgtggaaataaaacaaggacagaagtgagtccatgcgcacatgagccgcatggggagcccacagcatgggactgggggacatgtaagctgcagtcagcactgccggtcctccactgatgggctcactgtatgatcttagactggctttactgccttgtctctgaatgtttaacataagaataatagtacagacttatttagttatgaggatttaaatgcgttaaaatttgggaaatgttagcactaataaataaatgttaagtaaatgaaagcatttgactagaggtactgtaacagtgttgtagactgagtaagcttttggtaaatggtgctgtgatcaattagttaccgatacaaaaaaagcagttgaatccccttttgtaagttgaaaataaaaattctaggttgtcccaggcagcatacaccagctggtatgaggcccccgacacaaatacagcagagaagtacctggtctggccacagtgagaaaagactcacctaacccctgagaggcttgaggccccaggaagtggggagggtaaggaggtgaggaatgggatgaggaactgaggacagacctcggacggaagggggataacgattggaccatagaaaaaggattaaaaataattttttaaaaaaaaagaagaatgcatctctctatttccataattaaagtttagtgaagaggaactggaaaaaaattctaggttgtctctgcagtacatgtgaaattcaaagtctaaggaagtaggggaaaaaatgaggaatttttttttacctttttataagaactttctttttgcttacaatatatcctttttccctccatctccccaaaatatgcttaaggagtactcagagatggctcagcagcagagagcctggcttctgtttccagcactcacgtggtggctcaggcctcctgtaatcccagctgtagaggctctgacaccttccctcctgacattcaggagctcgtgtacacatatggtacacttaggtacactcagtcaaatttaaagtaaacttagatgattgataaaatggttacaagttgaatcatacctacatttcagatagaaatggtggaaatgccgctgaacatgacaacagagttttatgttggaaatagaagagtcagatctgtggcagatgatgtgtgcagctggcatatagaaaccccgtttctggcatcctaagtgctactgtgtaacagctgcaaatgagaccaagcctgcagtgatgcagtgttgaagggcactcctccccatgacctgctcagtgtcccatcaggctgggtttcagacaagccccagccacagtgctaaggtttatatgcagtggcttttgtcttcatggcctatcaagtctggatccttccttaattatatatatgatattaaactcattaacattccaaaagcacagtatttattaaaaatcaacatggttttgttctggtaacaaaatatgttgtatggttttcctttaatgtgatactaaccatcaagccctgttacttttagtttatgactttgtggaaaggtttattaaaaagcatgcatagtgccaggcatggtgatatctacctggagtcccagtattcaggaggctgaagcagaaagatctccaatttgtgatcagcatagaatatagcaatacttactttatttcagaatccctgaccccacaccaggtaggtaggtaggtaggtaggtaggtaggtaggtaggtaggtaggtaggtagatagatagatagatagatagatagatagatagatagatagatagatgcatgcatgcatgcatacatacatacatacataccatacataccatacataccatacatacctgaataatagtagggtcttgaaaatctgtaaggaaaagaccaaaagggggccatggggaaacagcattgagatggttcagtgggttcagttggcaaaagtactcgcccgcaagcctgactgcctgagcttgctcctcaggatcttcacatggatggagagaacttactcctgtaggctgtagtcaccacaaaacccccctgcaataaataaattataatacaatatttttgaaagtgaaaaattgttagcaatttatttagaaaagaggatcagtatagttggtgggaagctatagctgccaagtatatgttacaggctggtcattttgctctcaggtctatgctgcagaaaaagtctaaagaaagctgttcctgcccaaaattgaaggggaaaggaataaggcttctaaacccggatgtgaaccagcaccgagaaagcctcactgtgacttttaaaaaagccaattcaaacaataattagtgacagaattaatttgtattttttgtatgaccgttcagagactgcccatagataactgagaatttctatagtaaaagaatagataaattgtgatattttctttgtcattatttattttgaaacaggatttcacccacattttctaggctggccttaaagctatcaacctcctgcctcagcaaccaaacagctgggattatgctacatcaaatccatgtgctatacttatataatgaaatacacatttaaaggcatttatgaaaaaggcaaatgaggcataatatttatggtagcattcatttaagtttttaaatatggggaaacactacatgtttttagaatatgcacctttagaattatctactaagaaaatgtctaagaataaaaagtacttacatcagaatgctgcctttctttctgctggagcagcaggagagaggatgtcacagactaactaaacaagcaatagaaactgtgtgggttgatatcagttgacatggcatagattctgaagccacttactgctttctcatcatgagcccaggttacatggctataaaggaagaacccattgaagaccgcataagtactgttgagttgcaggagttatcaccgcatgtagcattttgttttaagatgtaggtgggaggttttttaggttcagtggtacacaccagactgaaaatacgttgtaatcacattgcagtgtgatatttattacagtgccatcaggagttgctaaagcatttagaagtattgacgtactttaccttttatgtctattattgtcacctgtagaatttattctattattgttgggtatgagagtggtagctcttcattcttcactttagcatcagctaacctggctttctaagcatgcagaaattaacgtgttaacaccccccacaccccaccccagtgagaagcctgagcagttggaaccctgctttagtgatttacaagctgctgggcttgttacttgttctttgaagacattgattgtatacttgccacagctctgtgactttgaactttggacagtgaggggaatgtgctacatctatgctgacagtagagcagccgtggcacatatcactattgtgagtacttgaaatgggactgagaaacaggattgtattgttaattaatctaatgaacttatataactactgctttgggcagtgcagatctatattaggaataattatgggctgtgaagacagcacagtaaagtgcttgtcttgcaagaatgaggtcttgggttcaatcctcagaacccacaaaaaagagtgagtgtggtgaccagcatttagagtctcagtgctagggagaggaggtcgtgggttcctgggactcactactgtgctagcctgcctcactacctcacttagtgagttctaggctagtgagaggccctgttgaataaaaaaaggtgggtagcacttgaggaataacctccaaggttgtgcctggcttctacatgtatgcacacattcatatatatatatatacacacacacacacacacacacacacgtgcgcgcgcactcacacacacacacattctctctctctctctctgtctctctctctctcacacacacactcactcaaggaggataggaggatacttataccctgtacatggtttccagtaagatcatgagtgctctataaatggtatctttgtctgtgtatctgtggatttcagagcaggatagaattaaaggttcagtaattacacagaaatatggactttttaaatgttaggcataatgccaagaactaaaaatttagatcatttttattatactgatagacaacctgagcaggcctgtatgtaactttttgaaaaggaaatatttttctaactctgacttgatttttaaatattgaagaaatgttagttttgtaagggaatagttttcctttttaaaattgaaagtacttcattgcataattgtgaggatttcccccgtaataatgtagaagaactgaagtataattaacatcttttctttttaggtataatcagtaaaaataacaattcccgccccgcccccgcccccagacagtgaagtccagtagtagttagttatttttattataactgttaggatgtaattgtacatcgggcttacacttttctgactttgttcttttctagctgcatagatgaatggtttgaagtcaatagatcttgtccagagcacccctcagactaagcacagcagacccctgtgttacgggtaactgtccctttcttgttttaattgatttgtaaaatgttattttgcattactgttctcatcttcatttgttttcaatttatttgtgtgtgtgtgtatgtgcgtgtgtgtgcacgtgtacgagtgttttctagatataagactactatataaaaatttatttttaaagatacactatggaggtttaagagtcttgccagtgttagaatgcacacttaactatcacagccctgggcttaattccccagcaccaaaaaccactcccaaaacaacagcaaaagagaaaaaaatagcagctcttcgggattcttgaatacaattagatattgagtaagtagaatactctgggtactttaaaccacatttgtttatttaattaaagcttaccgctgggaggaaacaggtggacagtgaggtacataccatgaccacattgtccaggaagaattcctgaagggtcagagtagttaagtccatgattttaaaaagcaagttgtaccacacatccaattacacagcatatgcacaacttcgtgtatatcgtttatatctgagccatgtgctttaaggaaagagggcaaaagttatgccacgcaagacctaagttcagatctttccctgagcccatgtaaataagcactggtccagtgatacacactgaatccctaatgctgaggcagggggctccctggagcttaaccagcttttaccagttaaatctagttggctagatttagtaggaagctgtcaaaaataaagtggagagtgattgagttgtcaacttctggctctcacacatgagcacatgcacagatgcacaccaacaatcacacgtaaaagatcaaaagaaacaaggcactcttcaagttccagcttgcaaagagaatttactctacgcacatgagcactgttccaggtgttttcctaggaaataaaattctgctcatgcagaagaattatgtgctggtattgtgagcattattttctgtctgttactcgcttggtgttaaagtaaccttcaagtactgttactcctgttacacagataaggatgttagcgtgcttgggaaagttgacttgttgagggcacacagtctgttggtgctaatttgaacccatgtgttctgatgctgctgactgagattaggtggcagttcctttcaaaagctgcttcatgcgactaaccagtctccttcccatccttaatatgttgtgaaatgtttgtgcttctaataagccaaacatcacagttttgttctgctgacttagtttattaatgcttagtgaattaaagataaacccataactatctctttctttatatcccataaggtaatttatagaagatatcatttaggatggagggaaaaaataagattaataacttaatggccatttttaagtctgaagcatttaactagtctgagtacttcagaggccggagaaggcgcagtagagagactgcagccagcagtagagggctgaactgtgactgcgactggagggcggcagtgttctgaggttctgttgccgccatcctcacacttccgctcagtttgagcaaggtcctgactgtgtcagtttgacacaagctgaggtcaacaggaagaagggaactttgattgagaaaatgccttcagaagatcaggctgtatacaagcctgcagggcactttcttaattagtgattgatccaagagggtccagctcacagtgggagaggccattcctatgcaggcggtcctgggttccataagaaagcagactgagcaagccagtaagctgtacccctctatggcctctgcatcagctcctgcctccaggtccctgccctgtttgagttcctgtcctgactttttttgatgatgaacagtgatgtggacttatgtataagccaaataaactatttcttccccaaattgcttttggtcatggtatttcatcccagcagcgataaccaaaggcagtgagcggggtttaggtgactcaccaagcctgaaaacctggacccgaatagtaggagagaaccaattcccacatcgtgttctctgcctccacacacgtgtgtggtcccccctccccccgtctcccccgccccagacaataaataaatgatgtaactagtagctcttgctctttagccttgaagttatgaggatcattttaaaagttaacagatacagaagtgaggactacagctggctccctgtgaaaagcagaggcactgggggcctggggcatggaaagaccatcacctgggaacctagaaggaccctaagtagaaatggggtagtaagatttcttctggtgctgagcagtggggcatggtgtactgggcacatgcacatcagtgcatttctttcactattagaaaggtagagattttattgtttggtttgatgatattgggagtcaaacccttagtcttatacatgccagcagttacactgaggtgcatccacagccctgatggaggtttttgtggtggttttagagcttgaacctgtgttttacgtgtgctggccagatggctccaagccactgagctgaatccccagcctgaaaaaaaatgttttctgaatgaggaggatgctttgaaatgctgtcaagtgttgccctgtgtctgggtcaacacggttatggaaaattactgaagcattttaagagatatactgaaaatcagtgctaataaaatgagagttttgctgggcaaggtggcagaagttccaggtcagcctgagctatattgaaagggggaggtatttttaacttagtggttagtataccaaatatatccctaaacctttaacctgcagataagttattttcttttagtctgtactagcacattgaaggtggcctcacaaagtaccttaaagggctgatgaacagaatcacagctctgtacaggagaatgtcctagatcaaggtgccagaggacagtgtctttgatgactgttccttgagtatccttggatggcacaagagtggccagtggccctgatgggccctgatgctgctgtgttggagattaggagacactgagaccacagcagacctaggctttttgttcatggtctcatcactaaactttttttgttagtgtcacagaaagcttatgagagttttggaacacttcccatctcatagtcaccggcatctttctgttaacctcagacaacatctctgtgttcttaacatcttagttcttaagtagtgagaccccacattatatttacagcataagaatttacttacccaatagtcttaattaattatgaagctgcttactgtttttatttgaggaggtggttttaagtttgagcgggtgtatgtacatgtgtacatgtgtatacttagttctcaacatttattgtggaaaaggagtgacttaagttttgctgattctttttttagactatgttaaactttaactgatcattctgtttcttgctttgttctacagaatagttttataaatttctgaagcagtaaaaggggaggtgtgaaaggctactgtgataaagcactgttcatggggaagtggatattgtatttcatttgcattactgatattgaccatgacttagagtaatttatttttatacaggttttcttgtctttacaagatgcttgagaaatctagaagatttgaagatctgtctctggaagaaaatgagagctgcaggcttattcagccaggatctgagttctgggacacttgggtccagagaaggacaggaagaaccacagaactcagcgaaccaaacttgcatataagggacacacagggattttgaaaatgctgcacagcctgtaccagtcactgcgtagatgacactgataaatgttttgtattcagacgccaaagttaactcatttcaaagttgatttcctttttagtaagttcttagagctgctgttttaatgtgtttggttttggtttgtttgttggttggggttttttttttgtttgtttgttttgttttgttttttagtttggggactttttattttcctgaacataatgtttctgcattcacctattcttaacttgaaaaccacacaatttctttcttacaaagtcttcaacatgaaccaagaaaatgtaatcaaagcagtataatattctgtgaatggagagtataattgaagttcttccacttccaggccccacctccccctacccccatgtatgaaaagtaggtttctgggttggaaagctaaactccgatagtatgaattaaaggttaatatataaaagtgtcatccaaagagtaaatcaaggtacataattacatttagttcattacatgtagagctgtctactcaactgcagtttctgaaatccattgtttcttctaaaaggaaactgtgcaatagcttgttagcagtgaccatcttgcagcagctatgcaactttgaaaagttttgctggtccccgctccggggccacagtgactctgtcctagcaggtgtcttttgtctttctgtaattacttcattgtgctttgcatttccaggaggtttccctatgtttgggtaaaatgtttagcaagttgtaaaacatcagaccttctgaaaagggtgaaataaacacttctgcagtgggacttggagtaatctgagggacattttatatacttttaaaaatcagaatttaattgggatgccagatttctagcaacttgcatctttagttttccagataatctggaagttagcatttgataaatgattttttaagcaaatataaagatttttgttaatttataatttattaatgtgttgttactgtaattgaaaatgttgtggatacttttaaattcagtctttgtagaaagaactgtattaagcaaaattatgtgaataaatattccccaaaaatacatctaatggttaagaatactggaagagagctatcagggctgcaacagtgaatgtctttttaaataactatcaaaatgtcaagaagtagagttcacctttagtctctgggggggacacagccctgctgtcctgctgtgctgcgctgtgctgcactgccctgccctgggtgtggaaggggagtctctggtgctgctctgccgctcttcactctgactgtgcccagctctgttgcttgtacctctccctgctcacagggcatgagcacctgctgctatggtgctcacaagggcatgggcaggagcacctgctgctatggtggggtcgggtggggactgtcctgatatgggaagaacttgcctgctttcctatggctgtagactacatagtacctctgcagttccactgtgatcgcctgttagggccagtggtctgatcctgtgtcacagctgccagcacagctctgtaggtgtccttcagccagggctaaggaggttactcttccttcgagggaaataggctttctctaggtttttgtttggttttatgaaatcggaatccattttacttgttctttcagttcgtaagctttgctctccccctgactttccccagggatgagctcttagaatgtgaatacccactttgccctttccgctggtgtattgtctggaaagactcacttctgctgccttctcttcttggagtgcagctgtgctaattaatgtttagactccctgggaagatgacctgctaagctcaacttgttggtgtctcagcctgagttcccccttctgtcacactgtcctccagcagtcttctgtgctgcctccaagctcctgtggtgtgcgagagctcacggctgcgtggcacggccgtggacacttgactgtgctgatgcttctctggacagtggttcctgaagtccactcagacagcctggttggtttttgtttttatttggtcagattttataaagttgacattttgactttaaattttatctgtacaattacctaaaaagaataaattagaaatagaagaaaagagagaaacttagatgttccagtttctattcacagttactattctgggaatgttctactataagtgatactttatataatattgcttataatacttaacaggctgtatgcagacattgagtagcatccatcataaagttatagaatattcagctgaaactactgaatatggagacaaaataaaaattgaaagcctcagttatcagttatccagctggccatagccttctggaatctttgtaaatactctgcagataaggtcacaggtgtggagagaatgaggaacgtgcttgggtttctgcagtccactctgtccatgtgaatgtattgtcaatgttgatcctgctttaaaccttttcattctctctttgccagtatatttaagagaagcactgttctttgtaaaatcattctctttctttggctcctctctagaagtataatgtttttcaaacctagttacaaatcggactacaagattgttttaagaagaatatctatgattaagatttaagtggtggtctctactcggcttgtctacatgacagcagcagccacgggggtacagccttggtgagtgctggagtgtataggtttgggctttcctgggcagacttctgcattcttaaatcttacatggttagtctggtttccacttagatactagactgcagcccagaataaccatccttagcatatctgcagtatgcacagaaaatatatttccaactgactgagttgccagaaatggcaaaatcttttccagatcgtatttcatactgtgtttctaagtatgagtgtggtgaggtttcagagcactcatttcctactggacacggtgattcatgccaacactcaggaaacggaggcaagaggatagccacaaggtccaggctggcctgggctacctagtgaggtctaggttagactgtctcaaaaaaaaagcaatcattttaatatgttacagcaagacatactccttttagtaagaaggattgtggattcgatgtaaatagtacctgctttttctgtattgacttaagggaaataaggggagttccccagtaggaagctaaagatgagcgaagtatgaaactcttaaaactcgagaactggttgaatttgccacctgactgatagccacactgtgtatggacaacatgatccagatggcttactcttcacagaggaggctccatctaaaccaaaacaaatcatcggagcatacagagtgactcagaggcaaagggtgctgttgtcacaagcactgtgtgctggctgcaggtctctgctgcacttcgccatttttctataggtttggtctaccctagggtaaactccacactctctgacagtgagagacgagacacggagcatcccttgttattcagtatacagagattttaacttgactttaatattgtagcatgtcagtcctttggagtccattctcctacctttcctagagtatataacttctgatattttcttagctgtgtgatataaccagttacctgaccacttttaccctgttctttctccatcccccaaatcctgctaagtttcgatggctgttgcttggggtacccctgaaatcattgattaaattgttggcgagaatgtacccaactaatactttatactgtagtctgtaaatgcacttaagctagaaatagacttttaaaaaaaatcaaagatttctgttttaaatgggaatacctgctatcctaagtctgttgactttctgtgagaaataaaagtccttgaacaccagaaatgttaatatttagtttcagttcaacatacaccatcactgtccttatagggttgttatcagatgttcaaactattcttcatttttgactgtgagtgtgtgtgtgtgtatgtgagtgtgtgtgtgttttcatagagaagcaaagagcagtgtggcatgaactaacatctccacgaaaaaatgaaaaatgtgatactatagtatttactaatgtgtgtgtttcttagctttgatcctgggtcctgagaatctcaagattggacatcaaaagtaacagttctcttatcactgtctgcccatgcctgccatttctgatctaatatgttagagttgacataatatacccatcatttttttttttgaagacttaataattgcctgcgttttgttagcagtaactatggtaccagaactgttttaccagccaagcttgtgcacttctggtatcccagcacccgagatgttgaggcagaggcagaggatcatgggtttgaaaccagcttggggtactcagtgagtttgagacaagtctgaactgtagtgtgagagcttgtctcaaagtttggtcatcatgttagtgttgggtgtatgctgtgtggctaggagactctggtctgggaagaaacagcatgaagagtggacctgatggcactgagtagcaggtcattgcatggctttgcagatgacttgttacatggatttctttgcttgaaaaaccacaatatttacctcttgatttattcgtggtttccacaactcttctataatacctcttaatttcctctattagaaagtattttgttcttgttaaacaagaccctaaaagcattgatcataagaaatagagaaaatgtattaggaacagcctgtatcagtgtgttctgatcggaaacagaacaattcatcattgatattttaataaataaagtttccaaatgatctcattaagctctcctgttctttagaagtagacaattagaatgatcttaagggaagttgtcctttcttctagctgacatcttttcattgacaataaaacaattacttagatgctgaaaagttgccatgctttagttgaggttattgcctctttatttttttatacccataatgacaaagctagttccaaaattgtgaaaatgtctgactagctttggtaatgggagaaagggttttgtatttccttgactgtaggtgaagatgtactttgaaatgtgtcatgtaaccctgctaatgttgtcattgacttgtacccggagcactcagtgctggacactgcaggtgtgcagtcgcccttcagagactggttcttaacttgcctttatttttgaaatcaattttcaagatttaaacacgattgggttttgtagagaagtgattaagaaagactaagctttggggctgaatctcctcatctctgacatctgtggccatgggttttattctccatacattgtcttggtcttgtatgaggtaagaagatgtaaacatatgccgagccagatataaatgttgatatatcagacaaaaacatgaacctactgacatgatttttatcaatatgtttaccataaagtatgatgctaaaacttctgagaactgatgtactaaaagaagccatggagtagcagcgtcagggctctgatttccgccctcaccttgtagtgaacgtgctgtccaagcaactttacatcgagcagcatttgagctcatgctgtcttggaaccaggagcacagtaatgaaagacagcgggcttctaggagcctaattctgttggacaaaactactaagtagccattgtacactagagagtaatatgctgtgagatgataatagatgattcatagctgaaagtagctactagagaaagtaggtaaaaggatgtgtacagtagacaaagtgagatggttgcccttcactgtccagagagccgagcacacaacagatcatgcagtgtatgtatgtatgcctgtgatgagaggactttaaaggacaatcatgtttacatttctgattggggttggtaagacgaggcagaaaagcctgtgaagaaatctatggtgggctggtgagatggctcagtgggtaagagcacccgactgctcttccaaaggtcaggagttcaaatcccagcaaccacatggtggctcacaaccatccgtaacaagatctgactccctcttctggagtgtctgaagacagctacagtgtacttacatataatcaataaataaaatcttaaaaaaaaaaaaaaaaaaaaaaagaaatctatggtaaagagaaacctaaagtaaagagaagatgagggcaggagaagcggcaaactcaggaaggaaaggcagttgatctcggcagccatccttgtagaaaggggtagagagggaccaggacaactcattcattatacttttcatgtattttccaaggttgactctacctgggaaaatccagttatgccaggaatgttcctacagaactttgaagatgatttgatttggggagatggggcaggccagaatagtgttgagaacaaagccagacaggaataaggggcagttgcttcagggtcaccgtgcctcagggctgcagacatcgtcagcactagctgactagttggagagtgagttgctagcttggctgagttggacctcctctcaaggccccattgccttagttcctattgccttggtccttgtttagtaagtgccaacatgcaccctgaaacactcggttttgtcctgtgctcacttcccgtaccctttccgttgtgcctgacttccaatcgtgacatcagaactgaaggtactagttactattagatttgggttcttgatcacacacgtgagcacccgtggtcccgatgatgattgctgttaaagataggttgtgttctgctctgtaggaggacaagaaggctacgggttgctgcttcgtgatctttgcgttgagcaaagggcagaaaggaaagatgggtaaaagctttcttggaggagtagcagcctcagggtagctgtatgggtcaagaaggaggcgcacagtcttctgtccatccacccgtggcaacaccacagcaggttttcttcggaggacaggaagcattatatcacaggcctatggaaacggtagaaacttaaccctgagaatatccctcgatgacaaaaggccccaagtctagatattccacataaaatgctttaaaacttttcttcagtacttaatataaaacttaaaattctgtcaaatagtgctttaataccactagtaatattttctgtgagctcttaaattcactgttttatggaatacaaatagaattcagacaaaaataccgttccaaaaaagtaaatttgaattttaagtatttctgatttacttggtcctttatttaggagctgagtgaccaggacattaactgaacagtggctatgaagtgttggccatagtgtaacactacttcaggaaaatgccaaagaactaaagagctgcctttggtagctcattaatgcctggtgtgtatagtgttaggccaggtgtagtgacagacaccttcagtctcaacactctgggggcagagacagtttgagatgagcttagtctacatagccaattccagacctcatcccgctccacccccacccccaccccctgaaaaaaagtctcaatgctaaagctatttactacgcagatcctctatatcaaggatggcaaaaagcatatagtccacctgttgctagaacacaaaagccacagactaccctagactatccagatacacagagccagcttatcgtgtcattactttgacagtcccccactgatagattactagcctgttttcatcattggaatttagaactgggcctcttcagtgctcagcagttaagtaaccattggttgtcctagaaagcacaggttcaggtagctctacctcgggaatctttaatatatgatcattttgtgcctggacatttctgaagtcttgtgaagattctgaccacatttggagttggtttggtgtaacacctgcctgttggcagctcttaccctgtattggaactaggtagaaacagtgtcacctttatcaccaaaaggaactgaagaaacggaaaattcaggccctcgggtgcattcatggacaactctggccttactgtggctgcagcttttggaggtgatgggcacacaggagctgaagggcttatgaagtctgatcaacccaagttggatgtgcgcctgttttagatacatcacctgtctcagcttctgcctgagcattttcttaacctcagcctgtgcagccaagctcttcccagctcttctgtctgctgttcttccgtttggtcatacttctcatgctgaatgaagactgctcatggtgatgtcataaatccttcccctcttgggttaactgactggctagggctctgactttgattttgtacagccaagcttagtgcattcacattcctctgagcctttttttttttttttttttttgcctccagagcttggcactcagaccaagtccttttgctttcagacttttgtcttcatatttaataaactcagctttgaccctcaggactgaatgccctcaggacctctgtcccttcatcctgaagcagtgactccagtgttatcagctgtcaaaagcaaccagaacacaggcacttaccaggaatgaggagcagagtagtcaaagctagcatccatagctggcctaccagcacacacccacagccccagcacttagacatagatgcaggggaatcagtagttttaaggtcatcctttctacatagccggaggccagcttgagctataccagaccctgtctcccccaccccaccccaccccaccccccaaatagtccagtgagatggaaaagctgcctcagtacgcctaattcatagatgactcttcagctctcatccttcagaggagtgtgtaaggctgtattgataggggatagataaggagttgatattcactataacaagcattagaaaaaaatagggcatggttgcataagctataatttccacactcagaaatctaaggatggttgctgtgagactgccctcagttccgtagtaaatgccaggccagctaaagacatgacaagactatctcggcaacagaggtttgaaactgtcctcaggttttggagggggtgagggacggttgttgcataggacagtggccttgtatattgaaccaaacggatgtactagtgagaacccatgagaaccccgtgggtgcaggtgcaggagagggagtcaggtttactggccctgtttcctcatcaggtgtaatggcgtgtcctaatgaagctatttcttatgtataacagagatactgatgggagaccccacctaaggagttggacagaaatggcaccttcgtggcttatctccacaaccaaaacagaacatttccatcacccaagtcccctcaggtcacttgagtcaattcccatccatcaatcctcagccctaagccactcttgctgggtattagatgaaagcagttagtctggcttttggggggaggaggggtgtgatttcactcagcatgcttctgtggaaaacatccatgttgttacttgagtcagttctcttcagagagcagtagtttgttacatgaatatatcctttggtgtgggcgtcagctgtttttagtttgggatattatgaatgaaatgcttatgaacatttatatacaatgagtgtgaacgtataacttcatttctcttcaataaatactggtggttaaaaattactgagttgtgtggtacttaatgtcataagatactaccaaaccatagcaaagcgaccgttgtgtcccacttcccaccagcatcatacctcattagtgcatgcttgggatccaacattcaagaggtgaaggctggtagatgaggagttcggggccagcctcagttacataccaggttagaggcctgtagtacatgaggtcatttctccttctactccttcccggcctgaggacctctgaccatcatgctttctgtagatctgccaatcagtttagcccatgtcagtgaacgccaatggataccttagatgtcacccatatttagtacagtgtagtcattcttattttagtgaatagtgtgtgttgctatgacacattttatctgtccactagttggaagaaaattttatcatttctgcttttgtggatggctgttttgaagaatactgctttgaacatctaccctctggtctttctatggattggtttctagtaggtattgaagagtggaattgctgggttgtgtgcatgcagttccctccctctgttggtctcatcacccagaactttagattcctggctgtactgtttcctgctccaaccagtcaggcccttgcccttgggcggtgagtgcattggcttctgattttgtgccccttaaatcaacagtgtccaaccctgactgacacctgtgtttcactcaagtctcaatgttcactccctgtctgtttggtcctcccatactacgttgcttcagaacctgctctgttgtgccttttcatcagtttccaaggcttgtcaatgcttggtggggtgacagttggtagacttgtgtggtctttgggctgttcagttttaattggctcttctgtcttactaaatcttacagggagtacaaatcttttattagatcacttgtaaaacgctagtctatggtttgtagtgggtttggtctaatgctgcttgtattatgttaatttgggtccccaaaattgtaccaaaatccccacatcgactcgtaagacactgagggaccctgcctccagttggttttgattggtaaataaagttgccagcagtcagtggctgggcagggtagacagagttaagacttttaagattcagggcaagggatcaaggaaggaggaagaaagagggagatcggccatgccaggaaagggtggaggagaggtgatgccaggccagagaaggtgtgggacagagcttagctgccatgtaggagccaggggagagtgtccccaactgagtccagggcagcaatgatggaatatagattttagtaagtaataacttgggaatatcagaggaaggtggattagccacttggaggtttggcagtagcccagccattgagctgtttaaggcatatcaaaatataaaggctgagtgttgtgtgtcttttattcaggatcccagaattggggtgagtgtcgaatgagccaccaaaggcgctgggatctattcaagtaataattgggtactgctaccatggctagtgttagtggggtactcaccggagaagacgctaggacatggctttaagccaatagtattagccagctacactggctattcaggatttcagtgtagcactgagcctttcttggggtgagcttttgcacccacaaaacatgaactgggttgacatcagttaacaagaacagttttacagaaggtaaaaagcaaggttaatacattttgagactttcccaaaactatgtggactttgatggattaggcctttgtgttagttttggcaggtagtgctgtctacatgctgagtgttacagcctgaatgccacttccatcatggagtcagttgtgcgaaggtccagggacccataaagctctgttacagctagtctcaatgtaatattaaattaaaatgtaatcttttaatgccatcaattaattttgttcttttcctaacttcctgctttttgtcctaagaaattcttgtctaatacaaaaccatagggtttttggtttgttttggattgggtttttttttttggagtggggaggcgttttttgtttttttcttctgtagctcttatatttaggtctgtggtgcagttggaatcggttgtatactgtgtgacagtaagggtgtagatttgtgtttctccatatggcactctagcttgttccagatgatctgttattttttttttttttaagtctctcttttttttgatttatttatttattatatgtaagtacactgtagctgtcttcagacactccagaagagggcatcagatcttgttacagatggttgtgagccaccatgtggttgctgggatttgaactccagaccttcagaagagcagtcaggtgctcttacccactgagccatctcgccagccccagatgatctgttatgatgaatgtattctctgtggaactaatttgatatcttcactgaagatcagtttttgtctttttgtctttttgtcccctgtggtctgctgtgctcatgttaatgtgttcttggcttgattgctgttgagttatgctgactctaaagccatcaccttaagtttttaagtttttgctaggaatagaattatgaattgtgttttctgtttgctctgtgttcttccagtacttcaaagtttctaacaactctattctctttcatcttaacagtaccatataggagtgcatataaaactcaccatctgcaagtgtgcatgacatgttttggtctatccacaaagtcatgcaactgttttcatcatgactatcccagaaaccctgtctctgtaccagaacttccacctccctatttcctgacagcattttatggtaggtaatacttccatatgttgcacaagagattctctttacagaaaccaccttggatagtgaggaccagaagtatctgcctttccaaggagccactctgtccttgagtccaaagggtgtagtaaggtcctgcagcactggcctgagctggtaggcatcaaatagactttgtgtttaggagatgtaacagtgctgtgtggtggagggcatgtaaacatctggccagagagtgaacttctggctctcagtcatgtccacagacccctttgcacttcctccatgcagagcttcatggagctgcaagacggccctaggccacctccaggtttggcacttttttctgtactcatggccacccaataggttctctcctatcccctcttctcttccacacaaagtgttttctcgtcttggggtgtttgagaatcctaaagtgaagagaaatgtttcaacttagagtgagccaggtttataccagagctatggaggcagagacaagtagatccctggaggtcacttggccagcctgaagagcccaataggaaagccaggccaatgaaagaccctgactgaaaacaaggtgggaatgtctcataaggttagcacccatgtgtattcatatagatgtccaccacatacatgtggcacacacacatacagagagagaggaaataaaaggtttaattcatttcatacttccacattctagcccatcactgagggcattcaagggaagaactgatgcagaggtcatgaagggatgctgcttactggattgctcctcatagcttactcggcctgctttcttatacaaccatctgctcagaggtgataccaactacagtgagctggtccctcccacattcatcattaaccaagaaaatgctcccacagacttgcctacaggacaatctgatgggggcattttctcaattgaggtacctcttcctagatgattctaacttgtgtcaggttgatgaaaaaccaaccagaacaatagctttaataatttatcctttgtttccaaataagtttttctacctgcaaaatgatggacatttgttataggaatttttgaaaatgcagggaaggcacaaagaaaaaatatcgattgtgttcccccttttcaatctgccagagatttgtttcctgctaatttctcagtatttttccagactcttttctgtgcatatatattcttggaattataaatagtattttgtaatcatttcatcccatttatcattttttgtatagcatttcattacataattgtgccataatattagatagtattaatattttataatcccatttgataataaatatttagcagtgccatggttgagtaactcctctaaattttgtaaatgtcttatataagactaaaatgaatttttttctaaagttgatgggtcaagctaacaatcactgctgttcctccactgagcccaatcctgtgtctcaatgccaaagcttaagtccttagcatgacctaaaggctccataacacacaggcatgaacacacccctcccacttccttctctagcccttctgtcacctgccctcacttgccttcctgttatgggctcttctgcctataacacttcctcctcagcatccttgtttggtttggcatgattgtcacctaatggagacactctttaaccatccaatgaaaacaccaaacatcgccaggcacgtagttgtcactcagtaagctaaacaatagtaataccaacattggccttgtgaaaggagaggctgtggtataagagaaactactgttttggatgctcaagcaacctttcatgtagttttattcaactaatatttgatccaggatttttttacactacccatatgaaatgtcatctgatctatagtttttcattgttgcattcttttttgtttttgttgctagaaaattgggcaggaggtgctcattaagagccttgggaactgttccttggtttattttaaaagtttaaacagactactagaaatgtccttctgtgtactggttagcctacatgtcacagattgtgccttgcctgaaaagaggccatgccaagatatgaatcagactattctgggagtgtgcgtgagatttattacagcaggtatgggccagtttcttctcttgggaggcagggagagttcctgggggtggtagctagtgtctgcaaatggaggtagagagtctcagaagcaagcagatgagcctcgtagtgtatgtgttcccacgccagcagctcgtgctacagtagtttcaaaagaaggattttgtgaatttgaggttaggctgtgtgcttgttttctttctgtagctgtg

SEQ ID NO: 825 - DNA, 5996 bp, Mus musculus
cggggagccggaggatggcggcggtgacagcggccgcccgggaggaggcggtgcggaggccgcgaagcgcggcagcaagcggcagcggcccgtcgcggcggcccggcagcgaccgcgtccgcacggctacctgagcggcagccgcgagctgcgtcccgcctctctcgcttgctcgctcgctcgctcgctcgcggcccggggcggcgcggacatgggcgccaagcagagcggccccgccgccaacggccgcacccgtgcctactcgggctcggacctgccctccgggaccggcagcggcggcggcggggcggacggcgctcgggcggcccgtttcgcggccccggtgtccggcgcgcagcagcccagcgcctcggccggcgcggcggctgcagcggcggcggcggcctcggccccggcagcgccccgtagccgctcgctcggcggggcggtgggcagcgcgtcgggcggccgcgcggcgcagtcggccttcagcatccccagcgctggcggcggcggcggcccgtacggctcacaggactcagtgcacagcagcccagaggacagcgtcggcgctagggaccgggaccggccggcgggcgggggccctggcgggccgcgtctggtgatcggctcgctcccggcccacctctccccgcacttgtttggaggatttaagtgcccggtatgctcaaaatttgtaccctcagatgaaatggatttgcatcttgtgatgtgtttaacaaagccaagaataacgtataatgaggatgtgctgagtaaagatacgggggaatgtgcaatatgccttgaagaactgcagcagggggacaccatagcacggctgccttgcctgtgtatatatcataaaggctgcatagatgaatggtttgaagtcaatagatcttgtccagagcacccctcagactaagcacagcagacccctgtgttacgggttttcttgtctttacaagatgcttgagaaatctagaagatttgaagatctgtctctggaagaaaatgagagctgcaggcttattcagccaggatctgagttctgggacacttgggtccagagaaggacaggaagaaccacagaactcagcgaaccaaacttgcatataagggacacacagggattttgaaaatgctgcacagcctgtaccagtcactgcgtagatgacactgataaatgttttgtattcagacgccaaagttaactcatttcaaagttgatttcctttttagtaagttcttagagctgctgttttaatgtgtttggttttggtttgtttgttggttggggttttttttttgtttgtttgttttgttttgttttttagtttggggactttttattttcctgaacataatgtttctgcattcacctattcttaacttgaaaaccacacaatttctttcttacaaagtcttcaacatgaaccaagaaaatgtaatcaaagcagtataatattctgtgaatggagagtataattgaagttcttccacttccaggccccacctccccctacccccatgtatgaaaagtaggtttctgggttggaaagctaaactccgatagtatgaattaaaggttaatatataaaagtgtcatccaaagagtaaatcaaggtacataattacatttagttcattacatgtagagctgtctactcaactgcagtttctgaaatccattgtttcttctaaaaggaaactgtgcaatagcttgttagcagtgaccatcttgcagcagctatgcaactttgaaaagttttgctggtccccgctccggggccacagtgactctgtcctagcaggtgtcttttgtctttctgtaattacttcattgtgctttgcatttccaggaggtttccctatgtttgggtaaaatgtttagcaagttgtaaaacatcagaccttctgaaaagggtgaaataaacacttctgcagtgggacttggagtaatctgagggacattttatatacttttaaaaatcagaatttaattgggatgccagatttctagcaacttgcatctttagttttccagataatctggaagttagcatttgataaatgattttttaagcaaatataaagatttttgttaatttataatttattaatgtgttgttactgtaattgaaaatgttgtggatacttttaaattcagtctttgtagaaagaactgtattaagcaaaattatgtgaataaatattccccaaaaatacatctaatggttaagaatactggaagagagctatcagggctgcaacagtgaatgtctttttaaataactatcaaaatgtcaagaagtagagttcacctttagtctctgggggggacacagccctgctgtcctgctgtgctgcgctgtgctgcactgccctgccctgggtgtggaaggggagtctctggtgctgctctgccgctcttcactctgactgtgcccagctctgttgcttgtacctctccctgctcacagggcatgagcacctgctgctatggtgctcacaagggcatgggcaggagcacctgctgctatggtggggtcgggtggggactgtcctgatatgggaagaacttgcctgctttcctatggctgtagactacatagtacctctgcagttccactgtgatcgcctgttagggccagtggtctgatcctgtgtcacagctgccagcacagctctgtaggtgtccttcagccagggctaaggaggttactcttccttcgagggaaataggctttctctaggtttttgtttggttttatgaaatcggaatccattttacttgttctttcagttcgtaagctttgctctccccctgactttccccagggatgagctcttagaatgtgaatacccactttgccctttccgctggtgtattgtctggaaagactcacttctgctgccttctcttcttggagtgcagctgtgctaattaatgtttagactccctgggaagatgacctgctaagctcaacttgttggtgtctcagcctgagttcccccttctgtcacactgtcctccagcagtcttctgtgctgcctccaagctcctgtggtgtgcgagagctcacggctgcgtggcacggccgtggacacttgactgtgctgatgcttctctggacagtggttcctgaagtccactcagacagcctggttggtttttgtttttatttggtcagattttataaagttgacattttgactttaaattttatctgtacaattacctaaaaagaataaattagaaatagaagaaaagagagaaacttagatgttccagtttctattcacagttactattctgggaatgttctactataagtgatactttatataatattgcttataatacttaacaggctgtatgcagacattgagtagcatccatcataaagttatagaatattcagctgaaactactgaatatggagacaaaataaaaattgaaagcctcagttatcagttatccagctggccatagccttctggaatctttgtaaatactctgcagataaggtcacaggtgtggagagaatgaggaacgtgcttgggtttctgcagtccactctgtccatgtgaatgtattgtcaatgttgatcctgctttaaaccttttcattctctctttgccagtatatttaagagaagcactgttctttgtaaaatcattctctttctttggctcctctctagaagtataatgtttttcaaacctagttacaaatcggactacaagattgttttaagaagaatatctatgattaagatttaagtggtggtctctactcggcttgtctacatgacagcagcagccacgggggtacagccttggtgagtgctggagtgtataggtttgggctttcctgggcagacttctgcattcttaaatcttacatggttagtctggtttccacttagatactagactgcagcccagaataaccatccttagcatatctgcagtatgcacagaaaatatatttccaactgactgagttgccagaaatggcaaaatcttttccagatcgtatttcatactgtgtttctaagtatgagtgtggtgaggtttcagagcactcatttcctactggacacggtgattcatgccaacactcaggaaacggaggcaagaggatagccacaaggtccaggctggcctgggctacctagtgaggtctaggttagactgtctcaaaaaaaaagcaatcattttaatatgttacagcaagacatactccttttagtaagaaggattgtggattcgatgtaaatagtacctgctttttctgtattgacttaagggaaataaggggagttccccagtaggaagctaaagatgagcgaagtatgaaactcttaaaactcgagaactggttgaatttgccacctgactgatagccacactgtgtatggacaacatgatccagatggcttactcttcacagaggaggctccatctaaaccaaaacaaatcatcggagcatacagagtgactcagaggcaaagggtgctgttgtcacaagcactgtgtgctggctgcaggtctctgctgcacttcgccatttttctataggtttggtctaccctagggtaaactccacactctctgacagtgagagacgagacacggagcatcccttgttattcagtatacagagattttaacttgactttaatattgtagcatgtcagtcctttggagtccattctcctacctttcctagagtatataacttctgatattttcttagctgtgtgatataaccagttacctgaccacttttaccctgttctttctccatcccccaaatcctgctaagtttcgatggctgttgcttggggtacccctgaaatcattgattaaattgttggcgagaatgtacccaactaatactttatactgtagtctgtaaatgcacttaagctagaaatagacttttaaaaaaaatcaaagatttctgttttaaatgggaatacctgctatcctaagtctgttgactttctgtgagaaataaaagtccttgaacaccagaaatgttaatatttagtttcagttcaacatacaccatcactgtccttatagggttgttatcagatgttcaaactattcttcatttttgactgtgagtgtgtgtgtgtgtatgtgagtgtgtgtgtgttttcatagagaagcaaagagcagtgtggcatgaactaacatctccacgaaaaaatgaaaaatgtgatactatagtatttactaatgtgtgtgtttcttagctttgatcctgggtcctgagaatctcaagattggacatcaaaagtaacagttctcttatcactgtctgcccatgcctgccatttctgatctaatatgttagagttgacataatatacccatcatttttttttttgaagacttaataattgcctgcgttttgttagcagtaactatggtaccagaactgttttaccagccaagcttgtgcacttctggtatcccagcacccgagatgttgaggcagaggcagaggatcatgggtttgaaaccagcttggggtactcagtgagtttgagacaagtctgaactgtagtgtgagagcttgtctcaaagtttggtcatcatgttagtgttgggtgtatgctgtgtggctaggagactctggtctgggaagaaacagcatgaagagtggacctgatggcactgagtagcaggtcattgcatggctttgcagatgacttgttacatggatttctttgcttgaaaaaccacaatatttacctcttgatttattcgtggtttccacaactcttctataatacctcttaatttcctctattagaaagtattttgttcttgttaaacaagaccctaaaagcattgatcataagaaatagagaaaatgtattaggaacagcctgtatcagtgtgttctgatcggaaacagaacaattcatcattgatattttaataaataaagtttccaaatgatctcatta

SEQ ID NO: 826 - protein, 306 aa, Mus musculus
GEPEDGGGDSGRPGGGGAEAAKRGSKRQRPVAAARQRPRPHGYLSGSRELRPASLACSLARSLARGADMGAKQSGPAANGRTRAYSGSDLPSGTGSGGGGADGARAARFAAPVSGAQQPSASAGAAAAAAAAASAPAAPRSRSLGGAVGSASGGRAAQSAFSIPSAGGGGGPYGSQDSVHSSPEDSVGARDRDRPAGGGPGGPRLVIGSLPAHLSPHLFGGFKCPVCSKFVPSDEMDLHLVMCLTKPRITYNEDVLSKDTGECAICLEELQQGDTIARLPCLCIYHKGCIDEWFEVNRSCPEHPSD

SEQ ID NO: 827 - DNA, 6020 bp, Mus musculus
ggggagccggaggatggcggcggtgacagcggccgcccgggaggaggcggtgcggaggccgcgaagcgcggcagcaagcggcagcggcccgtcgcggcggcccggcagcgaccgcgtccgcacggctacctgagcggcagccgcgagctgcgtcccgcctctctcgcttgctcgctcgctcgctcgctcgcggcccggggcggcgcggacatgggcgccaagcagagcggccccgccgccaacggccgcacccgtgcctactcgggctcggacctgccctccgggaccggcagcggcggcggcggggcggacggcgctcgggcggcccgtttcgcggccccggtgtccggcgcgcagcagcccagcgcctcggccggcgcggcggctgcagcggcggcggcggcctcggccccggcagcgccccgtagccgctcgctcggcggggcggtgggcagcgcgtcgggcggccgcgcggcgcagtcggccttcagcatccccagcgctggcggcggcggcggcccgtacggctcacaggactcagtgcacagcagcccagaggacagcgtcggcgctagggaccgggaccggccggcgggcgggggccctggcgggccgcgtctggtgatcggctcgctcccggcccacctctccccgcacttgtttggagtccttctggaaccagtagtctaatggatttaagtgcccggtatgctcaaaatttgtaccctcagatgaaatggatttgcatcttgtgatgtgtttaacaaagccaagaataacgtataatgaggatgtgctgagtaaagatacgggggaatgtgcaatatgccttgaagaactgcagcagggggacaccatagcacggctgccttgcctgtgtatatatcataaaggctgcatagatgaatggtttgaagtcaatagatcttgtccagagcacccctcagactaagcacagcagacccctgtgttacgggttttcttgtctttacaagatgcttgagaaatctagaagatttgaagatctgtctctggaagaaaatgagagctgcaggcttattcagccaggatctgagttctgggacacttgggtccagagaaggacaggaagaaccacagaactcagcgaaccaaacttgcatataagggacacacagggattttgaaaatgctgcacagcctgtaccagtcactgcgtagatgacactgataaatgttttgtattcagacgccaaagttaactcatttcaaagttgatttcctttttagtaagttcttagagctgctgttttaatgtgtttggttttggtttgtttgttggttggggttttttttttgtttgtttgttttgttttgttttttagtttggggactttttattttcctgaacataatgtttctgcattcacctattcttaacttgaaaaccacacaatttctttcttacaaagtcttcaacatgaaccaagaaaatgtaatcaaagcagtataatattctgtgaatggagagtataattgaagttcttccacttccaggccccacctccccctacccccatgtatgaaaagtaggtttctgggttggaaagctaaactccgatagtatgaattaaaggttaatatataaaagtgtcatccaaagagtaaatcaaggtacataattacatttagttcattacatgtagagctgtctactcaactgcagtttctgaaatccattgtttcttctaaaaggaaactgtgcaatagcttgttagcagtgaccatcttgcagcagctatgcaactttgaaaagttttgctggtccccgctccggggccacagtgactctgtcctagcaggtgtcttttgtctttctgtaattacttcattgtgctttgcatttccaggaggtttccctatgtttgggtaaaatgtttagcaagttgtaaaacatcagaccttctgaaaagggtgaaataaacacttctgcagtgggacttggagtaatctgagggacattttatatacttttaaaaatcagaatttaattgggatgccagatttctagcaacttgcatctttagttttccagataatctggaagttagcatttgataaatgattttttaagcaaatataaagatttttgttaatttataatttattaatgtgttgttactgtaattgaaaatgttgtggatacttttaaattcagtctttgtagaaagaactgtattaagcaaaattatgtgaataaatattccccaaaaatacatctaatggttaagaatactggaagagagctatcagggctgcaacagtgaatgtctttttaaataactatcaaaatgtcaagaagtagagttcacctttagtctctgggggggacacagccctgctgtcctgctgtgctgcgctgtgctgcactgccctgccctgggtgtggaaggggagtctctggtgctgctctgccgctcttcactctgactgtgcccagctctgttgcttgtacctctccctgctcacagggcatgagcacctgctgctatggtgctcacaagggcatgggcaggagcacctgctgctatggtggggtcgggtggggactgtcctgatatgggaagaacttgcctgctttcctatggctgtagactacatagtacctctgcagttccactgtgatcgcctgttagggccagtggtctgatcctgtgtcacagctgccagcacagctctgtaggtgtccttcagccagggctaaggaggttactcttccttcgagggaaataggctttctctaggtttttgtttggttttatgaaatcggaatccattttacttgttctttcagttcgtaagctttgctctccccctgactttccccagggatgagctcttagaatgtgaatacccactttgccctttccgctggtgtattgtctggaaagactcacttctgctgccttctcttcttggagtgcagctgtgctaattaatgtttagactccctgggaagatgacctgctaagctcaacttgttggtgtctcagcctgagttcccccttctgtcacactgtcctccagcagtcttctgtgctgcctccaagctcctgtggtgtgcgagagctcacggctgcgtggcacggccgtggacacttgactgtgctgatgcttctctggacagtggttcctgaagtccactcagacagcctggttggtttttgtttttatttggtcagattttataaagttgacattttgactttaaattttatctgtacaattacctaaaaagaataaattagaaatagaagaaaagagagaaacttagatgttccagtttctattcacagttactattctgggaatgttctactataagtgatactttatataatattgcttataatacttaacaggctgtatgcagacattgagtagcatccatcataaagttatagaatattcagctgaaactactgaatatggagacaaaataaaaattgaaagcctcagttatcagttatccagctggccatagccttctggaatctttgtaaatactctgcagataaggtcacaggtgtggagagaatgaggaacgtgcttgggtttctgcagtccactctgtccatgtgaatgtattgtcaatgttgatcctgctttaaaccttttcattctctctttgccagtatatttaagagaagcactgttctttgtaaaatcattctctttctttggctcctctctagaagtataatgtttttcaaacctagttacaaatcggactacaagattgttttaagaagaatatctatgattaagatttaagtggtggtctctactcggcttgtctacatgacagcagcagccacgggggtacagccttggtgagtgctggagtgtataggtttgggctttcctgggcagacttctgcattcttaaatcttacatggttagtctggtttccacttagatactagactgcagcccagaataaccatccttagcatatctgcagtatgcacagaaaatatatttccaactgactgagttgccagaaatggcaaaatcttttccagatcgtatttcatactgtgtttctaagtatgagtgtggtgaggtttcagagcactcatttcctactggacacggtgattcatgccaacactcaggaaacggaggcaagaggatagccacaaggtccaggctggcctgggctacctagtgaggtctaggttagactgtctcaaaaaaaaagcaatcattttaatatgttacagcaagacatactccttttagtaagaaggattgtggattcgatgtaaatagtacctgctttttctgtattgacttaagggaaataaggggagttccccagtaggaagctaaagatgagcgaagtatgaaactcttaaaactcgagaactggttgaatttgccacctgactgatagccacactgtgtatggacaacatgatccagatggcttactcttcacagaggaggctccatctaaaccaaaacaaatcatcggagcatacagagtgactcagaggcaaagggtgctgttgtcacaagcactgtgtgctggctgcaggtctctgctgcacttcgccatttttctataggtttggtctaccctagggtaaactccacactctctgacagtgagagacgagacacggagcatcccttgttattcagtatacagagattttaacttgactttaatattgtagcatgtcagtcctttggagtccattctcctacctttcctagagtatataacttctgatattttcttagctgtgtgatataaccagttacctgaccacttttaccctgttctttctccatcccccaaatcctgctaagtttcgatggctgttgcttggggtacccctgaaatcattgattaaattgttggcgagaatgtacccaactaatactttatactgtagtctgtaaatgcacttaagctagaaatagacttttaaaaaaaatcaaagatttctgttttaaatgggaatacctgctatcctaagtctgttgactttctgtgagaaataaaagtccttgaacaccagaaatgttaatatttagtttcagttcaacatacaccatcactgtccttatagggttgttatcagatgttcaaactattcttcatttttgactgtgagtgtgtgtgtgtgtatgtgagtgtgtgtgtgttttcatagagaagcaaagagcagtgtggcatgaactaacatctccacgaaaaaatgaaaaatgtgatactatagtatttactaatgtgtgtgtttcttagctttgatcctgggtcctgagaatctcaagattggacatcaaaagtaacagttctcttatcactgtctgcccatgcctgccatttctgatctaatatgttagagttgacataatatacccatcatttttttttttgaagacttaataattgcctgcgttttgttagcagtaactatggtaccagaactgttttaccagccaagcttgtgcacttctggtatcccagcacccgagatgttgaggcagaggcagaggatcatgggtttgaaaccagcttggggtactcagtgagtttgagacaagtctgaactgtagtgtgagagcttgtctcaaagtttggtcatcatgttagtgttgggtgtatgctgtgtggctaggagactctggtctgggaagaaacagcatgaagagtggacctgatggcactgagtagcaggtcattgcatggctttgcagatgacttgttacatggatttctttgcttgaaaaaccacaatatttacctcttgatttattcgtggtttccacaactcttctataatacctcttaatttcctctattagaaagtattttgttcttgttaaacaagaccctaaaagcattgatcataagaaatagagaaaatgtattaggaacagcctgtatcagtgtgttctgatcggaaacagaacaattcatcattgatattttaataaataaagtttccaaatgatctcatta

SEQ ID NO: 828 - protein, 227 aa, Mus musculus
GEPEDGGGDSGRPGGGGAEAAKRGSKRQRPVAAARQRPRPHGYLSGSRELRPASLACSLARSLARGADMGAKQSGPAANGRTRAYSGSDLPSGTGSGGGGADGARAARFAAPVSGAQQPSASAGAAAAAAAAASAPAAPRSRSLGGAVGSASGGRAAQSAFSIPSAGGGGGPYGSQDSVHSSPEDSVGARDRDRPAGGGPGGPRLVIGSLPAHLSPHLFGVLLEPVV

SEQ ID NO: 829 - DNA, 120125 bp, Homo sapiens
aggactcttttgttaggggttaatgcagctggtgactttaaattgaagccaatgttcatttaccattacaaaaatcccaaggcccttaagaattatgctaaatctactctgcctgtgctctagaaatggaacaacaaagcctggatgacagcacatccgtttacagcatggattagtgaatagtttatgcccactgttgagacttacagctcagaaaaaaaaaaagattccttgcaaaacatgattgctcattgatgatgtacctagtcacccaaaagctctgatggagatgtacagggagattaatgttattttcctgtctgctcacacaacatccattctgcaaatctatggatcaaggagtaattttgactttcaaatgttattatataagaaatacattttatatgattatagctaccataggtagtgattccttcaatgggtttggataaagtaaattgaaaatcttctagaaaggattcaccattctagatgccattaagaacatttttgattcatgggaggaggccaaaatatcaacattaagaggaatttggaagaagttgattccaaccctcatgaatgactttgaggagttcaagactttagtggaagaagtcactgcagatatggtggaaatagcaagataactagaattataaatggagcctggagatgtgactggattgctgcagtctcatgaccaaacttcaatgaatgaggagttgcttcttatggatgagtaaagaaagtggtttcttgagatggaatctactcttggtgaacatgctgtgaacattgttggaatcacaacaaaaaatttagaatgcttcatcaacttagttgataaagcagtggcagggttggagaggattgactcccaattttgaaagaagttctactgtgggtaagtaaaatgctatcaaacagcattgcatgctacagagaaatattttatgaaagagttcatcaataagtccattattgtcttattttaagaaattgccacagtcacccaactttcagcaccactactctgatcagtcaacagccatcaaaagtgaggcaagaccttccaccagcaaaaagattaagactcgctgaaggctcagattgttagcattttttagcaataaagtacttttaaactaaagcatatctgtttcagacataatgctattgcacacttcagactacagtatagtgtaaacataatttttatatgcactggaaaaccaaaaaaagtgtgactcgctttatgacattattcactttgttttgggggtctggaatcaaacctgcaatgtctctgaggtatgcctgtacttaatgtcatccctaactgtgacagtgcctcttgggcaagtttatctttgaggttattttggaccatggaaggtcacaaagagtgaagcgtataaagggttccctgagaaaagagagttggaacttgaggcaaggtggcaggaggaagaggagagaatacagctaaaaatacttagtatggtgtccctaattggtgaaactaggccaaggttggcaaaacttttgtaggagagtcaagtctgaaggatggttagtggctccctggagtcctgatctggaagaatttctgcagtcacagacagcctcagcggtgatatctacaatgactgattactgatgtctgccaagggcccaggaagaggtgtgtttggcatatttgtcagccatgctctggtggacatgtggatacattttgaactttttggccttttgctgatctttattttcagaaacacacaccagcatttcttttctcctcatgcatattcatggctatctacttgctgctcaaataagagatttatagtagtttaggcagaatctctcagaggtatctgagctaatgagcagtaaacaccactcagcatatgtctctagaaactctgggcagggaagcctctacaagttggtcatccctgtgtagtcactttttctctttgcaacagatgtccaatactcaggttctcccatgcctccaaaacagctgtcaccctcaaatcccctggagtggatcacgactgtggcaggatctatgacatccattatgggtttcacacagaagacatgatagagtgatatgaactgtgactgtgctgtcaccagcacttttagttataactgagctctctggaaatatctgcaccacttgagggagttggtgtcctcagctgtgtcctgctgcatgatgtgaaatggtagaggcaggccatttgcctcactcccttattgctacactgcctggctctttgctatttttataaaaaatcaagttttccttaaatatcaaagaattttggccaggtgtggtggctcatacccataatcccagcactttgggagactgaggtgggtggatcacttgaagtcaggagttcgagaccagcctggccaacatggtgaaaccccatctctactaaaaatacaataattagctgggcatggtggcacacgcctgtactcccagctacttgggagtctgaggtgagagaattgcttgaacatgggaggcggagcttgcagtgagccaagattgtgccactgcattccagcctgggcaacagagcgagactccatctcaaaaaaaaaaaaaaaaaaagaattttatcttcagggagcccctctgttttagtctacttgggctgctataccaaaataccatagactggctggatgaaacaacagaaatgtgtttctttatagttctggaggctgagaagtctgagatcaagatgctggctgattcagttcctggtgagggccaacatcacagcctctagacagccacctttttgctgtgtcctcacttggtggggagagagcaagctgccatctcaagaacagtgatcccatcatgggggcctccctcaagatctcatctaaacctaatgacctcccagaggcccacctcccaataccatcacattgggggtgaagacttccacctagaaatgtgagggggatacaaacactcagtctgtaacaccctcctttatggaaggtgtgtcttcattagaaaacaccaatccttgataatataaccaaactttttaacactaaagagtttggctgggcgcggtggctcgtgcctgtaatcccagcactttgggaggccgaggcaggtggatcatgaggtcaggagattgagaccatcctggctaacacagtgaaaccacgtctccactaaaaatacaaaaaatcagccaggcgtggtggcgggcacctgtagtcccaactactcgggaggctgaggcaggagaatcacgtgaacccaggaggtggaggttgcagtgagccaagatcgcgccactgcactccagcctggatgacaaagcgagactctgtctcggaaaaaaaaaaaaaaaaaaagtttgacctgaacgttttgtgctttgggttttagtggggttggtgtgcttgtgctaccgagttgagagaatagagagctttaataattattagcatttagcaaaataatgatgttttcagttttaaaaagaacagtaagtgactcaattcctattgctaattgtagaaaatgtcatggtggaactgcgtggggaaatacagaggaaactgcagtgggttggggaggaggaccgttttgaactgctttttgttaagagaactgacaattctgcttgtcgagttgttaatacaatgttgaagttcaggtgctgtatctgatttcaattcctgactcctccacttagtagcactgtgactctgggcaagttactgcatctctctaagtctcagctttgtcatttctaaaatgaaagtaataatagttcctactccatgggactcaatgaggagaaggttcaatgaggagctgggagtggtgtctcttgcctataattccagcactttgggaggctgaggcaggaggatcgcttgagcccaggaggtcaagaccagcctaggcaataaagtgagactgttgctacaaaaaaaaaaaaaaaaaaaaagccaggcctggtagtgtgcacctgtggtcccagctactcaggaggctgaggtgggaggatcgcttgagttcaggaggtcgatgctgcagtgagccgtgttcacgtcactgccctccagcctgggtgatagagccagactctgcctcagaaaaaaaaaaaaaagaaaagaaagattcaatgtgaatgtatgcaaagtaattcaggattgtgtctggaacatggtaagtgctcattagatgttagctattattattattagtattattagcagcatggtgggaaagatacagcactaggaagctagagccctttccccaattactgaggtacgttgacagtaaaaataacaacgacaacaacaataatagcaacacttttatgtactaggctcttaatattattactattataatcatcccttacttataactgtggaaattgagtcacagaaagattaaataacttgcccaaagtaacaaggctaatgaccagcaaggccagagcttgaatccaggcagcctgttgcagagctgacatgttgaactaacatgatgtgttgcttttttttgtctatacagttagggccatggctagaggcaacgtgtagacccagtaatctgttgggatccctccatgtctcggatccttgggaatgtccctgagtttagatctactgttatgctctatatcagacaatgaaaaacacagttctaagtccttagcttgggaaactctcataacatttggcttagtgaagtcaaatggtacaaaattcaaaagtaaaaggcacatggtataaagtcttacttcagcatccagccatctagttcccttgcccggagatagcaaatgttagctaatggatcaactttgagcaaattgttaacccaaaacttacctctttatcatccaagacaaacactgcttccatgccccacctcccatctgtgctctgacttcctggctggagacagaattctcaatgaaggagagaaacagaagtagtttctcttcagtgccagcctcaccttcccttcccttctctttacgtctcccctcccctaccactcctgggtctttctttcccaactcaaactatcaccactttacactacactaaaggtatcctcaggagaaggttgggacatctgctttaacttccacaactcctttgctaccgtgactatcattctgggtttatcaccaattaacataccactcacgctgtgaagtataagggctggtgtggctggaccaccaaagaagactcatttgctgtaatattcctaaacacagaaagaaaaaaaaataagattttctttctctaagtattctagtactaaaccttatagctacatatgtacaggaacagagagatatcaggacatgctattgatctcatttgcaaaaccccaaaataatagcaacaacaaactaagcatgcacacattgactagcagtttaaactgttaacagtgaatatgttacttaccaactattttaacttttaataagaagcatgaatttcatatatatacacatatatatgtatatatgattttcagatcgcagatcttttctcccctttttattgtggtaaaataacatacgctttaccattttaactatttttagttagttgtttgtttttaacagaggtggagtctcactatgttgcctaggctggtctcaacctcctggacccaagcactcctcccgccctggcctcccaaagtgttgagattataggcatgagccactgcacccagcctcaactatttttacgtctacaattcagtgacattaagtatattcacaatgttgtgcaatagtcaccactatccattttcatcatcccaaacagaaactctgtatccatgaaataataactccccattcctccctccccaagtgccttacaacctcgattctactttctgtctctatggatttgtctattctataagctgcgttatgcaatatttgctcttcagtgtctggtttatttcaccaagcacaatgtcttcaatgttcaccaatgttgtgatatatattaaaatcacatacatcctttatttatgtaaaagaattttcgttccttttaaaggctgaatgatacccaattttatgtatatactacattttaaaaatccatgcacttgttggttgggttgttaccaccctttagctattgacaatagtgctgctatgaaatgggtgtaggagtatctgtttgaatccctgcttttaattcttttgggcatatacctagaagagaaattgctagattctatggtttatctatgtttaactttttgaggaaacaccatactgttttccatagcagctgcaccattttacattcccaccagcaatggaccagggtcctaatttctacccatcatcatcaatcctttttttaaaaaaatagttaccctaatgggtgtgaatctcattttttatcccttacccccctttttctccaagtccccaaagtccattttatcattcttatgcctgtgcatcatcatagcttggctcgcacttatgagtgagaacatacaatgtttggttttccattcttgagttacttcactcagaataatgttctccaggcacggtggctcacacctgtaatcccagcactttgggaggctgaggtgggtggatcacgaggtcaggagatcgagaccatcttggccagcatggtgaaaccccatctctactaaaatgcaaaaaattagccaggtgtggtggcacgtgcctgtaatcccagctacttgtgaggctgaggcgggggaatcgcttgaatctgggaggcggaggttgcagtgagctgagatcacaccactgcactccagcctggtgacagagcaagactctgtctaaaaaaaaaaaaaaaaaaaaaaggtctccaatttcatccaggatccaggttgctgcaaatgccatcatttcattcctttttatggctgagtagtattccacggtgtgtgtgtgtgtatcacattttctttattcacttgttgattggtgggcatttgggctggttccatatttttgcaattgtgaattgtgctgctataaacatatgtgtgcaagtatcttttttgtataattacttcttttcctctgggtagatagccagtagtgggattgctggatcaaatggtagatctatttttagtttttaaaggaaattccacactgttttccatagtggttgtagtagtttacgttcccaccaacaatgttaaagtgttcccttgttagcacatccatgccagcatctattattttttgattttttttattatagccatatgagtttcatttttttctcttcctgagacggagtctcactctgttgcctggctggagttcagtggcgagatctcggcttactgcaatctctgcctcctgggttcaagtgattcccctgcctcaggcttctgaatagctgggactacaggcacacaccaccacgcctggctaattttttatattttagtagagacagggtttcaccttgttggccagaatggtctcgatcttctgacctcgtgatctgcccacctcagcctcccaaagtgtggggattacaggcatgagccaccgtgcccggcctcatatttttcgtaaaaggtgtgatggtcaattgtgtcatcttgactgagccatggggtggctagctgtttggtcaaacactattgtgggtatatgtgagggaacatcttaagtcctgggcttccacagagacagtttctattaattgcttttttcctgtgtattggccatactcttttgtttctttgaatgtcttgtaattttttgttgaaaattgcatatttaaaatgctataatgtggcaactgtggaaattagattctcagccttcctcagggcttgtcattgttgctcttagttattgtttgtttagtgacttttctgaaatagtctgtaaagtctgtattctttgtcatgtttggctgctgaagtctctgtacagttagtttagtggtcaggtaatgattggatacagatttccttaaatatcagggactaatgagcttcccagtttttgcaaaggggttctgtgagtaaattggggctagccttcaacactcagccagggccttgacaattctgtttgagccttcacagcctgcctgcacacagcttcaaggatatgttgcacagaggtgagaacttagggccttctcaggtctttcctaagcatccacacaaccctgggctcatgcacagccctctgcaggcatgtggccttctagctttcaggaatatgtcaagttcctacagccatctcattccctggcttttccttgaaagctttttggttagcctattgtttgccaactagtatccactacttcaggcacccttgaaattaaatggttgcctccaaatgttttgaataaatgtccccagggaaaagggtttttgcaccgggtgatcttcagatcaagtaaatctgcaattaaagtcttgcaattaaagtcttcctgggaactcccagagagggcaaatcctgacagatctgtgggaatgaggttttgaaggaactctaatactactgtgcctcctccagtggctgccaggctattggctttcactgtgattgtgggctgttgattttcaaggctaccacagagctggaggaggtgggtgatgggaacagggcaagttaagcttgctgcacttactgagattcaaccatttttctggaataaacactccctggattgctgcaagccttgggttaatttacagagttctgaaaaagttgagtctcattatttttgctggttttctcactgctttcctagaggagagaagttttggagatacttacatttttgccaacaatatcccaatgaagtgttaatggggaaagagagtgagttgtgtgagaaagcagtgctggagttactgttagaggtggagtcgtttcaagtgatgacagggcccagggtaaggccaggggaatggacacctggaatggagtgcaagcgaaggtcactgctgcgggagggggcaggcaatggatgttcaggccagactgatgggagggtgtccacatggaggctgaaatcctccaggaccaggatactatttgaggggagaaggagactgaaccaggtgtctaagtcctccctgactgcaggagtgacctgagattgatggatgatggcagtgtcagtgctgggaaatgaatgttgtcacatgcatagccagtatggaaaacagtggcagagatattctgaagactgaagaggaccagtacattttaaaagagaattatgatatgtaaatagatatcttataccaagaagggagaattgttgtcaaattaactaatgtggtctaccaatagggaggattgttgtcaattaaatgaatatggcctaccagtagaaaaactttagtgccaacaaactatttttacttatctctccatgcatcaggaggtgaaggtaagaactgcagccctcgatagatgcatcttcttgtcgttcaccctctgtcttcattcttgttcatctttttttttcttttgagacagggtctcattctgttgcccaagctggagtgcagtggcatgatctcggctcactgcagccttgatctccacagttcaagtgatcctcccacctcagcctcctgagtagctaggattacaggtgtgtaccaccatgcctgactaattttttttttttttttttttttacattttgtagagacagggtctcactacattgccagactggtcccaaactcctgggcttaagtgatcctcccatctcggccttccaaaatgctggggttacaggtgtgagccaccacacccagcctctcttcattctttaagggagtctcctttctctgagtttatattacctgttttatctctgagtttacatcacgttagggaccacaagtccctgttgctggagatgacccaccatgaggatcagattggtgacctgcatatctttaggccaaggttagtgaaggactagagaatcccggagagccacacactgcctttatttttggaaagccatattttctgcaggctctgagggtactgatttagtcatctttggtcttacacacagaatcatgagtattcattatgtaaaattcttttaatcaatcttttcacaatgtataatagctgtgatcatcaaattctaagctatagcagcctacaacagcaatgtgtaaaaagctctatacactgaaatgtcctaactgggccgtcgccaagttatgtctgaatacaaaccaagacatcaagatttggggctggaaaactcactctcagtgtaatttcttaaagccatcatcacttggattcaactctcatgactgtgaaaagcacttcaagttcagctctcaagactatgaaagcagaacccaggggacccgcggtggattcagctgccttttctctaattttccaaccacgtgttcacacaagacgtagcagtaaacagcatgaggaaaatcaagcagggaaaccttgcctccccatcaagttgctataactccctctcctgcctgtcactattaacctctggaaagagtggcctgtaattgctatctagtactcattcccatgcagtctgcaacatgcagtggcctgtcttccatctccaccactcaaaaaagatcaacactgatggatgctgtgctcaagaatgatgccaatcttcaccattccctacctgtttgctacttttgacatcgttgaatgaatgaccttcatcccaaaaactttccccttctttcaccctctgggatacctctcctctatttttcctcctacaactctgactccacctcttccttccctggctcctcttcctccaccagctccttgccatttcctctaagtccatcctaggtttcatattgtctccctctttaccatctctccttcagtatttggagcaacttccacctagtatcctaacgacctaatctacatgttcaatccacacctgtgagctctacgcctcctgttctaattgcctactggatgctgacatacatatttagcaaatatctccagctcaacatgcctcaaattatacaaactgtttccctaaaacctgtttctcttcttgtcttcccagccccatggcacccaggctggaagtgcagagtcatcattagctattctctctctctgtctgtctccaagttcagtctgtcttatttcttacaaaaccaatcgtctatctctctcctcttcattcccactgccttcctagctgtctccttgacggcaggaacttcctcttttttccaatccacattgctgccagaattccctctacaataaacaaatttgatgagtgttagtccttagaggtttcccaaagctaggtgactgtatgcctctgttggcctggaacagtgctgttttctgctgagtgtttggttattctatctgggtagcatgcccattaactctcaaaagtggcgcatttggatgatgaattatgtgatcagcctatcacagagtgacaggttaaaatccaaactctttcacctggcatacaatctgtccccaagctaactttctagtgccatcttcttccatcctgtttaattgccattccccaaacacgccagcctgtttcccagctcactgtcattgttcgtgctgttctctcttcctgaacacctttcccccatttgccacttctcaaatcctccttaaccttcactgcccagccaaggtagcacctcttatgtgaaacagcatatcctgtctgccccattcccatctgtcaagagcctcctctccatcccctgctccccagtgatcctgtagtgatttgttcaactctctgtcacgtattctactttgaatctggtacaatacctggcacattgcaggtcctcaaaacattttgaaggagaggctttcaagaggcaggaagccaggaggttttttttttttttctttttttcccggctgtctctgattagaattaaacgcttttattttcgatatgggacttgcttgagaaaatccaacatatcagagccaaatctatttcttcatctgtagagtaataaggagaataattgctgctgccaaaagctacccatgtgaactcaataaggtaataaaaacaagccctgctgttgaagtagaacgtattgaaatagagagtgagatgagcctcccatcctctgtcatctatccctacaatctgcagcctgtgtggtgtggggggcaggagaagattctgagaactggcaactggttaaatagaaaatgtacctatgggagggaacaatgatttatcccaatacaaatgaaactaatttgaggaataaccacttattgagcatgcacatggatcgaacattgtgctaagaattttacatatagtttctttatctttccaatcttataaggagattgatggatattatgattccccattttacagtgcaggaaactggagctcagagaggttaagcaacttgctgatatagtttggctctgtgttcccacccaaatctcatgttgaattgtgatccccaatgttgggggagagacctggtgagaggtgattggatcatgggggtggatttcctccttgcttttctcacaatagcgagtgagttctcacaagatctggttgtttgaaagtgcgtagcacttccccctttgctctctcttcctcctgctcctaccacataagacttgctggcttccacttcgccttctgccatgattgtaggtttcctgaggccttcccagacatgcctcctgtatagcttgcagagctgtgagtcaattaaccgtcctttttataaattactcagtctcaggtagttctttacagcagtgtgagaatggactaatacacttaccaacagcacaaagctagtaagtggtggaattgggatacgtaataataatgctaataactcacacatgcgtaccacggtgtccgtggtgttctgctcagttctcacacccaccctatgtattatattatgttatatctccatcatcagatgaaggcaactttaaataactagcccaaggtcacatcactaggaagaaagggtgccaggcaatttactccagtaatcatatgcctggtcactacccttgctctcctccaggtctgtctgactttgctatctcagctctttttatgtagccagagaatccatcagatggctcttccctcctttctcaagatgtggtcagcagaccatcagcatcaacatcacctggaagcacattagaaagaatcttgtgcccctactccaggtctagggaggcagtatctgcattttcacaagatccccaggacctggtctacatcagtcactttcaatctcatctgcatattggactccccttgcggagctttaaagaatctgatgctggttgggcatggtagctcatgactgtaatcccagcactttgggaggccaggccagggaatcatttgagaccagcagtttgagactggtctgggcaacatggcaaaaccttatctctactaaaaatacaaaaattagctgggcgtggtggcatacacctgaagtcccagctactcgggaggctgaggcaggagaatcgcttgaacgtgggaggcagaggttgcagcgagttgagattgtaccactgtaccccagcctggggtacagagcgagactccttccccacaccccctgccaaaaaaaagaatctgatgcctggacaccactgacagtgcttctgctttaattgtccaggtacggtttgggtattgggctttttaaaagcttcccaggggattctgatgtgaagccaggttgtgaaccactcccttaagcaaatacactgttgcttgcctccttccttcactcattcaagtgcactctggcacaatttgctggggagatggacgattacaatatagtattataagtagtatgttaagcaccatcccaaaggccaggggagcccagaggaaggcctgaggccaagtcagattgcctggagataccagatgggacctcaggctcaaggataaagaggagttcttggatttgttgagggctatgttgagcagggtgggagaagggagagttctatgctcattaccaaagtgaaattcatagaattttaaggtgtaatagattatagagattgttgaatgaatctaatggttttcaaactttttttttcttttttttttgagacggagtctcattctgtcgcccaggctggagtgcagtggcaccatctcagctcactgcaacccgtctcctgggttcaagaaactctcctgtctcagcctcccgagtagctgagattacaggtgtgtaccaccatgcctggctaatttttgtattgttagtagaggcggggtttcaccaggtgggccaggctggtcttgaactcctgacctcaggtgatctgcctgcctcggcctcccaaagtgctgggattacaggtgtgagccaccgtacacagccaacttttttaaaaactataacctatattaggagaaatattctatgtctcagctcagaatatatataaagtttcataaaacaatgtttagcttcactaaattccatgcactttgatatttttatttatttattttgtatagatgacgccttactatgttggccaggttggtctccaacttttggccttgagccatcctcccacctcagcctcccaaagcactggaattataagcatgagccattgcatccagcctactttgatattttctagtctttcaatactatgctcttttagaaaaaaaaaatactggtcatgtttagctggattcattttccactacactaacgggtcacagtgggcagtttgaaagacctggaccttatcccttcaatgtttccttgaggaaacgatgaccaagaatagctacatggcatggcctgaaagagtaaagaaaagtgtgtctgaattacagtgtgaaggactggtgttagagacgaaaaaaacctgtatggcattggttggtggatacttcagagggacttgccttccggagaaatcctactcatttttctgggaagtaaagataacagtcctgtagagagggcaagatgataaattaataaatgaggtatctgggtcatttctaggcccactggatatatcagtattactgagtgagaattgtcagtttagctggggtttgggccctcttagaaccacctggggcctttgtctagtacatatatgacttccagccattctgatatgcaccctccctcttcaagagcctaagtttctgctgataacaagtcttactgaggctcgagctgatgggggtatatcctatctctccagtatgttggggcaggcagggaaaacaaaggtgagaactgctgatctcttgagcaacagtttccaacattttagatttcacaggtcagtaaaaattcaaaaacagtttaggaatcaacatcagggtgccaatatttctttgtcccaaaaaacgaaatctacatttaaaaaggaagaaacaaaaaaccaaatactccccaaatctatggccatctacaactatcatagggtaggaaggatctaatcttagactaaagatagtcttgtgcatgaaatacatttaactttttatggataacaaagctactgcactgtcctaatttttcttatttcactatgagcaccttattacagactggtgctggtctgtagaccagtgcctggaattactgctccaacagatataaacttcttcctgaggctattcattcttccaatgcggaaatttgtattctttatgtcttgactgacatggaagacaattattttaaatcataaaaatatccattaagttgtctggaaaattatacacaagccattagctagattacattaaatctaaaaaaaagacagttcttattatttagtttctcaaggcatcaccatttcaaatttggccatagatggctatcattctagtattgagcactgaaggtaacaggcacttgcttccttctttcctctgcatgatgactgagtttgccaaagtcctagagaagctggcctcactttccaaaactctcgttcctctcaagttcatatgtgtcaagctaagtaaattttctgcatggtgggacttatttatttatttttaattgttcatcctgtttgtgagctccagaagaaacttttttttgccactgaaattcatgagttattatcaaataaacatatatgaacatttaattcagtataaaaatcctgctgtattaaaatgaaatcctaattgtagccgtcattctccttattaatattggtctagacagtatttttcactttttcaccccatcattagcagttgggggaagtggtgttaagaaacagagcaagatttattattagtatgccacctgttaaaaactgtactggagaaaccagctacgtgtacctctaaacgtactgaaatgctatgttttaccagagaaattctaggtcatttctaatgcctccccagaatgtcaatgaatcactatttcaattgattacaaactctaaaaagtaaaaactcatcattttcaaaacctttgaatttgctgtttgtacaggtcaggtctggagtgccttcctaaaagttatttattttcccctttttcgcttgcttcacagaagcaactgaattctgtcagtgtttttagctctctcgtatatttctgagagtcaaaactgccttaggaggttttttgtttttgtcctttctttgctaagtctgtatgtttttaatgcagcacatgttattttcttgtctgtatgatttgcttgaaggttttgatatttacatattatgaaagaaaatgtccaaagtgtataaaaaacacattccttgtaaaatctgattatttcctaatgttcaggtctgtttgtttcgatgtggaggttgtagaagttttttggcattagtattctaaacagtttagtatttgttcatgtgtacattttgcctatgagaacgatgtgaaaacgtatctgcatccaatcatttgatcagtcctgcaaaagcttcttccattcctactgttactgatgctgtccagccttcattatttttttaattgaggtaaaatagacgtaacacaaaatttaccattttaaccaattttaaatggtttagtggcattaagtacattcatattgttgtgcagcctcctcattctttttcacctgggttactgcaacaaccttaaaaatgcagtcttgcttctaactgtgccgccattaaggaaggaactagaaatcgtatctctgctgacttattttcattggtgtatagaagaaaaatggaaagacagaagaagcattctctgtcatttcttctgtaccttagacttctgagttgctgaaaatgaaatgcagacagtgttctcagggcctaaaaaggacaagtacctgctgtactggttccatcccctgctgcagatcattccttgctcaggacatttcagcccaagcatttgttctgagaacatatagaaaataaaaaaattcacttggcattaaagggtctggccactgcaagcacaaagaagcttttagcagtaaattctatagctttaaaatgtgctgaaatgatcatttcaaaaattaagaggcaaaactcttagatggccaaactaagtttgtaagtgaaacataaagaagcctgaactgctttggcccccaccagggcagctgaaattggctggtgtgcactgagtcttcaagccctcttggggggcagtagatgcatcagaattgaggagcccactgctgcaaatagcttcagttggagcctttggcagtgcagttttgtatcactagatgtcagtgtggactttcccaacctccgccttcttgcctttgcaggaggtggactagacatcacttgggggccttcctcaagtcctggcaaacataaggctattttcagaactgtaatttcaccaaatattttgtccacctacatatattgacttttaagagttctagaaaatacaaacagaaactttgaaccaaaggttgttctttttaatgctgtgcccttctaatctcaatgcttacatttggaagcctgcttacaaggatgttccaaggccagcaatggaaagttccatgcggttcttttgacagcagcatgctagcccagatacctgcaggcctagcttcaagaaagcatggctccctacactaccagggctcaggagtgagggcaggaagtcaagaagaagtgtatgtgattaatgccggatgtggtggctcaggcctgtaatcccagcactacaggaggccgaggcgggtggatcacctgaggtcaggagtttgagaccagtgtggcccacatggcaaaacccggtctgtattaaaaatacaaaaattagccgggcgtggtggcacacacctgtaatcccagctactcgggaggctgaggcaggagaattgcttaaacccgggaggaggaggttgcagtgagctgagatcgggccactgcattccagcctgggggacagagcaagacgctatctcaaaaaaaaagaaaagaaaaaaaaagaaaagtatatgtgattagccacatagggatttagtggccatatttatcagattttttttcgaagtagtttgtaatcagctgccttctgaaaccttaaagaatagtcattgtattagttttcccattgctgatgtaacaaattatcataaattcagtggcttaaaacaacacaaatttatcttactgttctagaggtcagaagtctgaaatgggacttaagttgactcacctaaaattgaggtgtcaggagggctgtgttcttcttggagtctcggggagaatccatctccttgtcttttccagcttctagaggccacctgcatcccttggctggtggccctcttcaggcttcaaaaccaacaatagccttgagcgtttctttgaaccactctgaccctgcctgccccttttacttttaaggaatcttgtaagcaccctgggaccacagagaccacccaggtctagctccctatctcaagattctgaatttattgacaactacaacgtctctcttgcttctgtaaggtaacatattcagaggttccagggatgaggacatggacatttttgggtgggcagaggcagcacttttctgcctactacagtcattacttttaaagtaatatatgatgcaatttttcaggtatgaattttttaacaaactaattcagtgtcacaaacaactgtttctactggagactatgttggaaaataacaagggctgcatttccctcgctcatggagtgataacaatgaaaattaatttgccacacccagcattcatatttggtcaccttccaactgaactgagcactaactccactcctttgttgacccctgtgctcagggtgtccatccccagaacagcactgagcaggcacagggtgaacacatacagagagagctggagacgtgattcccacaccaagaaacactgagcaaagtgaaatccggtgcgctgagggaccagactagggtaacctgtgcatacccctgtgcaaattcaacatacagctggaggcctaaagccaacagaacctaaccccatgccttgccataactacaaggctggttttgttctgcctacgtaaagctgaattcagctccctctcctcaaatgtgctctttcccccatagtcctacttagtgctaggaccagggactatctgtccctggtcatcttgactctgtcatccttgactcttccttcttggtcacgtaggacatccaattggcctccaagacctgcggtggctgctctctcaagagttttagaatctgccctaccaccactctaattcaggttctcttcacttcttgcctggatgactacgttagcctctggactagtcttccacttcactgtgcgttcctccctcccatcaatccattctccaaaatactgctggagttgtctttccatactgtaaatgcgatcctgctacttccctgtttgggaaagtggttcccttttgctttctggatgaattccaacttcttagctcagcacaccaggccggttacatgcagctttccagcctattctctcaccctctcacctgttactcttcattccagctataattaactgcttgaagttcttcagctgctcaaagctctcccttgcttcatgctccctcagcctggaatgcctatgggtgctgaagccagaagtctctcaagactcagcccagcgtcccttctcagactacatctttgtccttcaccaatccccatcccttcagtcagctccagtatgcctttaccacatggtactctgaccatctcttcatttctatctaagtcccttgattagaagctataaggtttttgaagctatatggtgtttagttggtttaactttacatccccagatgctcagctactctgtttaaagaatgaaaatatctccattgggggtcctaagttattccgatgtttccctgcaccaggtatgacccagctcagggctatgttccaaaacctacccagtttagacttgtatccctagagttcagccagagcccagctaacttctgggaaacagagggtggggtaaattgaccaggagctcttgttgctctatcttctcatggtggaagaaaggcagttctgcaactatgaccttaccctttccaacctggcctaacttgggggcgtagatcattcaatagcaactcaaagggaattggccccctaatgcacaaacttgccctggctgaacagtgtagaaggcagccaacttcacacacaaacttaatgtggtgacgacagtctgttaagttggtagtaattccggacatgcattaatcactgctgcctgtccttagcgagccatagctgttactcaaagtctcttgcatatagattgtccttgagctctctataagcaggcactctggagagttaaaaataaagcagaaatagagttcctgtacttgggaggcttaaacaatctagtcctaaaatgtagggcttgcctttacgggggcttttgactaactttgagggaggaagtggtaagggaaaatgtcttataatacgttttaatcattcatgtacaacagtcattcacgtacagtattcatgatttaagcaagtgacaggaggcagtttggagggtgcatctgcactggaggagggaccacatgcattatgtagcagagggctattttttctccaagctagtcttcacttccgtaggctgggaaaatccccttggtaccgaccccatgatacatttttccactaaattttatgtcttttcaacagtatgtccccagtaaagatcttggattcctttcaaaacactatgtatggaatctgagagtttcctttataatggagtaaaagcatcatgggttgtggttggttggtattaagggtttttaaattagggctcttacagataaaaaaaaaaacaacgtttgaaagcccaagtgaattaattgagaatagaacacaatataaatatttaagctcttagtaatactacataccattttggcaagcaaaaattatttttattagcaggtgctgacattatatctcaagctgtttttagaaaggaaaatgattctggaatctatgttaaacatagccatagggctccagtcattgattaattaacatgaaatacttttgtgacacatttaagtctatttaggacccaaagactctttagtcaaagtgttaactaccctgtggaatcaaaagaaaaaaaatgtttaagagtttaaatattggagatttcaaataggtagtctctgatatcttaatgataatttcctttcaaatttcatctatctagctatctatgagtatatgtacacacacacacacacacacacacacacacacacatccatccatcccatggtggaaagatatagatgtgtcatgacatatcatactatcatcattattatagcagtgatgtaaatacttattagtaaactactactaacgaattattaccaatacatccttatgcatcaataatgtattaaaatttcacaaaatggtaaaatcaatttcattgagtattagtatatattaaactgtacaatgtcacaacatgctagagatgatatggaaattattacaatctgctagggataataacattgagattaaaatttgtttctctattaacacatttgaaagtactctcaaatagagaatgaatcttttgagaatcatagccactctgtgagactggtattgctatatgatcatccatgttttacagaaggaacaggtttagccaggttaagtggcttgccctaaatcccacagccagtgtcagacaaagccagggcctaaccccagcttgagctcaaccacttcacggcatgtacttttaatcctgtcatgattggctcttgtcttttgcttctcattaaaaaactaatacaagtacaggggagggaggataaaaatttgttaaagacattacataaacttttgatgttttctgaacaattacccaacaatgtgactcctaaatactacaaactaagattttgaatttaagatgtaagtttctaatcaccactaagatcttggacagtgtatgtaggatgtattaacacatatgtaggatgtattaagattcattttaatgtttagatggtccatttgtttctttaaaaagcaaaataataggaaaataggcctatttaaaaataggcaattatacatatagtcctattttggtagagatgaggtagtgtatgaacacttacttgaaaaaaaaaaaaagcaaagccataaccatctcttaaatcctataacaaggggaaaagtgggatggcaaaaccttagcaaaatgtgtagggctactgctggctgcaggacagccctgtagagaggctgtggtccccgaccaagaggactaatgggtgtcactatgcaaatttgctgtcccacacatcaaaggtctgatccagcagagttttaaaagagaaaccaagagaggaaagaggaatgcaaaggagagtaagggaacacaaagggaagaggcttgccccaactaaacttcaaactagacaacaacaaactgattggtcaggcatttttattgaaagcccagaagtagcttacctgttccagtgtgagtttgtggacaataattttgtcaatgtgaagtgctttaacaatacattcagactaattttgcacccccaaagcctttggtcaaaatatcattgaactgcatcaggaggaatatagtgtattttaaaaccttcaaatttgaaaaattttaaagagctggggctctggtctcttgataagtggtgaaggcattaaaacaacagttctgattgtagaggaaagcgtcatttagaccagtgcttctccaaacaagagtccgaagtctgatggcagcaacatcactgggcagcttgttaggatgcaaattctccaggcccaaccctgagctatggaatgagaatcattgagggtggggcccaacagcctgttttaacaaggttttcctgtaatccttgtgtgtgctaaagtttgcaaagcactgatttagactactgtttatcaaagtgcagattacatccccataggggggtgtaaaatcaatccaataagcagtgaccagcattttacaaaagtgaagtcaaatagaaagcagagtgcatttcaggtagcatgggtattatctcaaaaacccgttgcagttctacatgtgtgtatacctgtgtgtactcatttggatgaagcagcacttttaatttttgaagaactggtaggtatactaaagacgtgatggccaggcatggtggctcacgcctgtaatcccagcattttgggaagccgaggcgggtggatcacaagttctggagttagagaccatcctggccaacatggtgaaaccctgtctctactaaaagtacgaaaaaatgagctgggcatggtggcacgtgcctgtaacccagctactctggaggctgaggcaggagaattgcttgaacctgggaggcagaggttgcagtgagcccagatcgcaccactgcactccagcctggtgacagagcgagactctgtctcaaataaataaataaataaataagcgacacattttcaacgaagtcagaactgtttggttgacaataacacacattgacagcttcatgctggtgactggagagagatgagaggggtgaggagagaggaaagaaggccaaggaaagaacatagaaggccagcattttatctccagaaccttcgtggggaaagaaacaaggctcaccagagaggaggtggaaggggcacccaccacaagcgaaatgtcaaggagaataagaacatgataagttaatgagtgacattcaagaaagaatcgttttagtacaactggtgaggatacatgtattcactcactcattcattcattcattcacaaaacatttattgcaccatggcaagaccagacactgtgttaaacactggaggtacagacatgaagtttatcatggagccaattgagtagtgacaagcaagatatctaataataataataacatgatcagagctatgaaggaggtattgtacagcactgagtgggaacactgaagtcagtctgtgatgctgggatgggggaggaggtggcaggaaacatctataaggagagggcacttaaccaaaatgatgaccatatcttaacatgatactgcatataaagcactgggtacctttgtttttccatgtatatatgtgtgtttgtgtacacagatacacgtctttatatgtatacatatattctccatttgtttaaaaacttgattcccataccctaagagtgatgaaaatcattacataaatgacttattgcaaatagtgaaaagatgacaaagtatttctgtagttttataaaacaccacttgctattattattttcaagtagagactagacattttcataatgggagtctcagagcaggctgttccctgggtatccagaccctgctctgccgtgaagagaccacaccaacactgaggaaggcactgaggagaattttattacattttagagaagttataggattttaaagaggcaggtgccctaggatttaacacaaacagttcaggtaagaaacctaaagtcggcctggtgcggtagctcacgcctgtaatcccagcactttggaaggccgaggcaggtggatcacttgaggacaggagttcaagactagcctggccaacatggtgaaagaccgtctctactaaaaatacaaaaattagccaggcgtggtggcacgtgcctgtaatcccagctactctggaggatgaggcaggagaatcgctcgaactcgggaggcggaggttgcagtgagccgagatcacaccattgcactccagcctgggtgactgagcgagactccgtctcaaaaacaaaaacaaaaataaacctaaagtccaaaaaagtaaaataatttgctcactacagataatttagtttggtgttgggcctagattctaggttttgtgagtcaggtgcagcgttcctggcaccacagtatttgccctaccacagagggtcaacctggattatcccgagttcttccaactctgcgcttcctcccaggttggtgtttcatgagtaagtctgagatcaagctggcttttgagcttctgtttttttttttaatcagtgtgtaacaccaacacccaccgaaaccaaacggctctgggcagaggacacagccattcacgccccctgccaggaaaagctgcagctgacacaggctcctacagcgtcggcgggccacgtgcgggaggaggggccgccttctggttggcgcccggtgtccgttcctcctatcggcgtaggccccgcgaggaagacaagggcgcgccctggctgggagggcgtggccagagacctgtccatcaccgagtccacgagtggcagcacctaccacaccgcagtaccttggcgaggcggagcaggggcaggcaggtcgcggaagggggaggcggagcaaggccggcgggagccaatcggcctggcggcacgagggggcgggggcggggtcaacgcgcgcgacccaaacacacgggccgggcgcaccctgcagccgcgccgctccgcggccttccggcgcggggccggggaacctcctccccatctgcgcaccccccgccttcgcggcccagatcctcccgccagcccggcccctccttcgcagggggagcgaggcgacggttgccgggaagcgcgcgccacctctccctcccatttttcgttctcccctcgcgcgccacccgtttttcctctttctccgttaataacagctgggtggctgggggaggagggaaggtggccccggcggagtctgggcgggcgcctcccactcagccgccagccgccgtgggagccggaggatggcggcggtagcagcggccgcccgagaggaggcggtgccgagatcgggggcgccgagcgcggcagcagagagcggtagcggcccgtcgtggcgcaccagaaccgaaaccagcggcagccgcacggccacttgagccgccccttcctgctggagccagcgaggggtgcctgcagccgggaccccttcctctccgcgtctcctcgtctcccgcgcccgcgtcaggccgtcggcctcgcccgccgccccaagaagagcgcgccgggcgccgactgcccctctggacgccgggcggcggccctggacgtgcgggggcctctctgggccggccgcggcgcctgggccctgccctctagctcccgcgctcgctcccgccctcccggctctcggggcgcagcgcgcgggcccggcccggggcagggcggacatgggcgccaaacagagcggcccggccgccgctaacggccgcacgcgcgcgtactcgggctcggatctaccttccagtagcagcggaggcgccaatgggaccgcgggcggcggcgggggcgctcgggccgccgccgcggggaggttcccggctcaggtgcccagcgcgcaccagcccagcgcctccggcggcgccgcggcggccgcggcggccccggcagccccggcggccccgcgcagccgctccctcggcggggccgtggggagcgtggcgtcgggggcccgcgcggcgcagtcccccttcagcatcccgaacagcagcagcggcccgtacggctcgcaggactcggtgcacagcagccctgaggacggcggcggcggccgggaccggccggtgggcgggagccccggcgggccgcgcctggtgatcggctccttaccagctcacctctcgccgcacatgtttggaggtacggacccctctccgcgcacccgcgctcggtcctcccgcggctgcacgtgggccgtggccgccggctatttttacccttctccttttctccttctgccggggcgccgggggctgcctcccggaccagcccgcgtcggtctccatcctggaagaaacccggcgcttaacaccggcggtgccgctaccgcatagacgcgtggttttgtttttaaacatcctgagcaccctcacctcagcggctgcccagtagagaaagtctattttccagtgagatgactggagcaaatgttgttttacaacaaaccgacgaaacagcccttgtggttgtggtttttagtaccaggaagtcaggaggagaccagttgctaaatgtagttctatctggggactcgagtggggaacagtttttaaaggccaaaagtcaaagcgtctcaaatgaacactgagttaccatgtttggaccgacttttagtataaagctgtaatcctgaaatctgtgtcagtagtcccagttactatgtcattttaattggatgaatgcgttaatgaaaagtttgtttttaaacctcactaaactgctacttaagatcacagttaatgtgagtcctgcttaatttggaaagcatttaaaaaatggaaaagtttcttaaggaagtaaaaattttgcacatctgtcttcaaggtacaataattggctaggttcttttgaagagcagtgttgactagagttaaggaaaagtcagttgtgaaaaatggacatttttaatagcaaagtgatgtactttactacagaaacaggaggaagtgtgcgttgtcctggggaaaatgaatcctacttcttcagttatgttttatgctgatctactttattgcaaaacgctaatagtaaatgaatcaagaccacctcccctctcccctttatgaaaataaatagaagtatagaagataagcattcccatttcatcgcattatgtatctggtattagaaaaattagcaactgagcacagatgagcagcgaaaacacgatcccctacatttttgtgccgcttttacttatatatttgtaaacgtaggaactttggagacttagtaaagtggaatacgtagtaatttatccgttctcatgttctgtactatcagcacacacgccagcataaattaaaaacaggaatgtcatgtttcatttttcccatttttttagtaacgctttgcaaattcaattggaacgacgcttgacttttaattagctaccttgttttaaagtaatttttgcttcttaaaaatattcatccctcttaaaattgggctatttttaaaagtcatttgcttttgattttgagtaaaagaactctactggtgtccttaaagtgatttgatcacaactaacctaacagttgaagttgctgtagtccgcactgaagaatataaaaggcagtttctgagaattggtgattagtgcgagaatgaagggcaaactggtttttaatgtttatcattatctttttaaagtgaaaatttgcatttagcaattattagaagatgaatatttaagtttgctaaagaagggtgaataggaaaagccttgtcaagttaatagttaatatttatttaatatgctgatttctaaaaattcattttctaagagctgataattccctttgagaaacattatagttctgtgggtttattttgttaagtaaatgcattctattcagagcaagagacagttgagccccatgctattcctagtaagtaaaaatacctagttgcttaaagttggagataaagcatttatcttttttcttatctaagttctagatttgtgcactcattatagttcttttagtgctgttggggttgggtgactggggcctagtagtacagtgacactttctgaggaacttacagcagcctttctcacccggctttctggagacaattgtgccgtagtgtgcaatgaattttaacttttagctccagtgcatttagaacggttttagttatgtatcattcttggaacaattgagaaaagtcactgaaataatttcctgtgtttggtgattcagatgaggaacctcagttgagaattgctggaaagacatcagagaaattacctgttcttattatatgacaggatcagatgaaagtgccacatcctgaaatctctgttgaggcagggagatggaatacatttacgtaaaaacccatcttagtggcattgccttactgagatttttacctatattttagtggacgggttattaggaaaacaatagaagcatgtttctcatcatcttgagatttagggagctaaatgaagaatcttataattaaaaaagacttgactagttcacatttacttaactttttagtatctattataacattattgtgtttattcagttacaaattgtataaatggttatatacaaataactgcatctgaaaattgataaaaggattatttcagaattagtggaaagttcgtattgttttttgtaaaactgttgttttaattgttgtttatattattaacgtctcctaataagaaaatgtggtactaataagattcaaaattattctcttgtgagctctcatgtaatttatagaaaatgaaaaacagtcccccccttttatttttaacacttaagagtctagcaagtggaattgttagtagttctctcataatgaattgccacattgaacgaggaagttttctgtgttggttttatgttttgatgtcatttggacatctgttttggctatatacactcttattctctctagagaactggaagaaaaatgcctaatccagatatttcagtgtgtagaaatttcctagaattgagttgccagacatcagaatgtgattatatttatataggagtttttaggtgaagtaaatcttgtccttattattcttttcagactgaggagtgttaaagtgaacagacgctttcttgactactgctagtgtcgtccatcacctttgttttaaaacaggtcttaagggtatttcctaatatttaaaaatgttgatggtattttagggtttgtttggctttaatttacgtctacgtttttttttccactgtcaagtagctgttgttcataagagcataatatgagtggtcaaatagcctttaatgatgcagcaaggatggggtagatgaattgggctatagaaatataccaatacatggagattatttccagagaaatcgtgtggacttctataatgtatccttgagtccagaagtgaaaatgtaaaatgacttaatctaagacaaccagtggtgctgggttgcttttggcctcctgattttcttgagcttttttgggtgtggcttgctcatgagtatttcagtagtctgattgtaactcaggtgccttgctacttgtgaaacatgttttcttatattgaaggagtgtgggttatctcttaaaactgaatatgttgaataagacctgtatttctaggaagatttctcttaatttttaaggcagatgtgaagttttatggtgttaggttatcttcatcaattaaccattatggaatcggtctcagttatcacttcttaccaatatcaagtgccaaaatgtttgaatttgggatattgtaattaatctatttcctattcctgaatgttattttgtgccattgaaggcttttatggggagtggccgaagaggaatgtttgcctctttctaagaaaaatgagccttctaaccacaacccctgccactcctgaagtaataagaattttggtggttattgttcctcacttgtaatttcataccttcgtgttacatgttttgctgtgtgtaagtgtggcctgtgtcatggaagtttctgctttgggaattttttggaattattcttgactgcaaggtggggaggattggtgagttgcacagggcatcacctgatctgagagcagcgtgacctaagaacctggtattttgatgctttgctggctggtgcagtgcctgagggagtaagagccctgttgttgtaagatagtgtcttactccctcaggcacatctccaacaagtctcttgctctcctccaatttgatcgctttgcctggtgaccagtaactaagttcttctgattaccaaatatcattaatgagatatcaacttttaaactatttattattatttgggttttaaggagaattgccctaatattaaacttattacatgtagtattatgtataattgggtatattggcaaatgtgttaaaagagagtgtaggaactgctttatgtagcaaattacttcctaagttttatgtgaatattcttaagaactgttatttgaaatgttagtctgtgttttaattttgcatgtacatgacatttatttgttaagaaattggacaaaacataggcctttttgtgaacaaagggttcagaaataccttaggttctgattttattcgttttctaagctgcttattcacaaatgactgcaaatttagtggttctaagcaacacgtttattgccttgcaatttctgtgggtcaagaggctgggcacaacttagctgtgtcctctttaagactgcagtcaaagtgtaggtcagggcagggttgttatctagtgactcaactggggaaaggtctgcccacagacttccttgggttattggctgaatttatttccttgtgtctgttaggttcagagcagcttgcttcttcaaagtaagcaaaggaaaggtgaactggtgctatgttcttacataatcgtgtacatgtaatcacatacaacccattgcctttgctgtatttcattcattagaagcaagtcataggtccagttcacgtgcaaggggagggaattatacaaaggtttaaacaccaggaagtgtaggaatcaagaatagtcacatcagttctttctgccacatggattatagatagattgacagctgaacatgtaacttcttttttaaactcattttaatttacttttaaaaagttgtactaatgcatatggttaagtatagcattaataaacatgaacttaaccccttttaggggctggacattatagatactgagggtacaaatatggagcttctttatgcactgctcaactctccattgaatttgagagatggatatatgtgatcattatacaatgcaacaaattctgtaatagaactgttaacaaaacacttagtgaagtatctttgtctaggctggtcaaaaaatgcttcacagaggagggtacgtttgaactgtagtttgaaggatttagaagttgtacggagagagggcagtacagactaaagaaaaatccacaaaagtgtgggttttgatagggcatactgaaaagttaaatatgtctggattgtagggtgcatagaggaatgatgagaacctgaagctagaaaaatagaaagtggagccagttgaaagattttatagtgctgtaggtttgttttatctaatgaagtttgaaagcagggggagtatcatgattaggccattgggcacaattaacactcgtagtttacatggatggcaaccttctctagtggtgcagacttcaggctgtatgcagcaaccctgatcaggattcagttcttaaggaggagagtgtgatagcaggagaataagttaggattcttttaaaatataactgatagaagatgcctatgttgaaaacatggcattggtgagggagaagaaaagttagatttgattgagatttctaagctagaactgatagaattgacctgggtacatagtgatgtctttaaccagtattaaagatgaaaagaacaagttttaggaaatgataatgagttcctttcaggcctgttaaatttgagtggctacaggattttcatctggatagaagtatactttaagtggttggaaacatgagtctctaattcaggatattacaaaaaactgagaaatcaatttgcaagttataaatgaatccagaaagtggataagattactaagggatgaatatagattgacgaaggacaaggatggaatccagaggagcaagtattttaagagacagggagaggaagaggccagcagttagaattcaaccagagggaaaggaagttttttaaaaacctgggtttttttttaattataaaaataatacctgttcactagagaaaaactaacatacggaaaagcaggtataaaaatcgcaaattgcttgtaattttaccaccagaaataactgttaatgtcttttatatatgtatttgttttagacacaaaatttggaacattcatttttatattgttttgattttaacctttctgatgttctaatacaaagttttaaagctacacattttcctccaagaattgctttacctgaatcccactgatgttgaagtgttcttgttaacattcagtgaaaaatgtattttaatttcccatatgatttcttcttgatccatgggttacatattctttgataacatgctgtttccatttccaccagtttctaacatcacattaaaattttttataacatgatttttaattattacccagtattccaaaaatcactcaaatatttaatgaggacgcgcttttccggacactattctgggggtacagcagtgaagaaataagataaaaatccctgcttttaggggccttattattctatttgggagagatagtaaacagacaagtaaaatacatagtgtgttagggcattgagtgtaatggaaaaaaaatggagtgcaaaggctgatagagattctggggtggaggcctatctatagttgctattttaaatcgggttttaaggatgacctcactgacaaggtgacaattcaagcagaaagtgaaggagcaagtcatgaggatctctggggtaaaaacatattcaggcacagggagcagtaactataaaggccctgaggcatgagtgtacctgatatgtaggtttacttacagctggagtgcagagggctgtagaagatgagagcatagtggggtggcatgaggttgggacagaatcataaactgcctcataaccactgacctgtggtttgcggcttttgttttaaagagggatggggagtatttttgtgcagaggattgacataatctgacttgggttttaaaggattactctggctattgtgtgaggtggcaagagtcagcaaggaggcaaaaatccagatgaaagataacagtggcttggactgggtggcagtgctggaggtgctaagcagtggccagattctgcatatcccgtgttttgaagatagagccacctggattagatgtggaggtatgagagaaaatgaagagtcaaggatttatttcgttgttccttatggttgagcattttgtttgtttggtacagatgtaataaaatactgttgccatgaacaccctggtaagcaaatttttacattttttttttttttttttgggatggagtcttgctctgtcacccaggctacagtgcagtagtgcgatcttggctcactgcaacctctgcctcccaggttcaagtgattcttgtgccccagcctcccaagtagctgggattacaggtgtgcaccaccatgcctcactaatttttgtatttttagtagagactgggttttgccatgttggccaggctagtcttgagctcttggcctcaagtgattcgcccacctcagcctcccaaagtgctgggattacaggcctgagtgcccggccagttcttagaaatttatcagcgacatgggattgccagaaacaaagatacacttttgttcaaggcattggatctttattgccaaattgctcattagagatggaaacagcttctagcaaggtataatctttgggactacgtaaaattttttaacccataaaaacttgtgaggtttttgatatttataagtgcagattggtggatatatttcgagtaatgtcacctatcagagtcattatttcattcagggctctttttttagcgacgaaaatattagtgtgtcagaaaattatagatgtattcagtcatttgaatttcataagttccgaccatgtggaatatcctaatttttgcttgaattgtgattagtctgtaatagttctttaatttacctatttatatgtgagctgaggaaaaaaagaagaatgaagccatgcatacataatgggttatttatttttatttttattgtcttttttttctttcctttttgtggagaacagggtctcgctatattgcccaggcaggattatgtgtaatatgtttcagagagccagtgctcagtttgaacaacacattttgctatttttgttggtttttaattttttctactgttacctctattctgttcgttctcattttgtaaagttaattttgttctttctcttagcttcttttattttttatttattattttttaatgataaaagcgtttaaggctgtgtttacttcttgttacatatagtcacttcccaaagctttggatacttaccattttcattatcattgagtacacatttttgtttcttttaaaatcagttctatcggggaataatcatgttaactgcatttcgatattttcttttacttggaagttattttaaagtgtggctttattgtggtggtccttactagtaccctttcgttacttctagtgttaatttagaaatattgcaccgtggctgggcactgtggctcatgcctgtaatcctagcactttgggaggcccaggtgggtggatcatctgaggtcaggagttcgagaccagcctggacaacatggtgaaaccccatctctactaaaaatacaaaaatcagccgggcatggtggcaggtgcccgtaatcccagcttactagggggtgctgaggcaggagaattgcttgaacctgggaggtgaaggttgcagtgagccgagatcacaccactgtactccagcctgggtgacagagcaagactccatctcagaaaaaaaaagtattgcaccatggtcagagaatcttaagcctttcagttgtaaaggatagaagcataactcaaaatagcattaagtggaaaaactgtatattgtttcaaattattgaaaaggatcctagggtaacttagagaattgaaggaacaaaggcaggacccaatgcccctggagctgaaatttagagagagagggagggggacagagagagagagggagggaaggagagagagagagagagagagagagagagagagagagtgtgtgtgtgtgtgtgtgtgtgtgtgtgtgtgtgtgtgtgtgtgtgtgtgattgcaggtgtcagccactgcccccaggcagtatgggccttctttaagctggggccttgagactctctgtacttccaactacatgcgatctttcaggcctgaagggagtacctttctctacctccagcagaaaggactcagattagctcagtttgagttccgcatctgtccataaattacaaaagcagagatgggatgcactttatgtccaggctgtattctgttattatggggaagagtttaagtcttcaagtcatgtttcttgggctgaccttaagcaagttgcttagttcctctgtacctccgttttctcatctctagaatcaggccaggtacagtggcttgcacctgtaacccccagaactctgggagacggacgggggcgatcgcttgagctcgggagttcgaggccagcctgggcaacatggtgaaacccaggttctaccaaaaatacaaaaattagccaggtgtggtggtgcgtgcctgtagtcccagctactccagaggctgaagcaggaggatcgcttgaacccaggaggctgaagttgcagtgagccaggattgcaccactgcactccagcctgggtgatggaatgagactctgtctcaaaacaaaacaaaaacctgcttttgtagtattgtgagggttaaagtagtccacatacttcatatctccgtacttttaactattgaatgaacctcttcaatgaatgaaaaaattgaaacatccaagatttatgccgcacttccagtctcaccctcctcagaaagaccatgtgctttactctgataccgtattcctttctcttcccaactgctcagattttgcaaaaacaatccagttttcattatttttataatgtgtcttccttatatttacaaaattctcccctgaacatttgaattgagtttttcagcacatttactatgccaaacacatggtaaaaactttgtaaatattgaatgtttcccaaaatgtatttgataactacattattatgttttaaggtaagattattatcaaaattattgtcatgtttaaattatatatagaaatgtattgctctagaaagaagtggtaggttatgtttttatttgtataatgtaaatataggtaaattaatttttgaaccaaataggtataatatagattgtacaaatggaggcagttataaaattgccttagaagtaaaattatactgtgcttatagctcttttataatcatttgaatgtgttacaaagtgttatcaatgtgagcgtgttttgtgggcggttggagatggttggaaggatggttgataaggtaggtcagtgttttcattaagtgtgtgctgctgcttcagggcagaggctgaaaaacttagattattttagttacatgatttactacatctcaggcaacctggatgacttggcatttactaaagcaattcactgctttgctggtgcttcaacacccttcagtctgagagccctgaagtcttgatttgtaattctccagatttcctgtctatcatagcacttcttcaaaaacagcatatctggtcaccttgaaatctcagttccttaataactccttttgtccactcttcctaccaccttaccgtacgcagagttctttggaggattgccattagtttctttaaaacaaaataactaaaattaagaatatttaatattattattggccactttaagtgtctttataaatgttgaactaatatagttactttcatatagtaatgtatgtgttaggaaagttacttcataagcactgtctcttttgagcctatgtcataagaagtcggtggtagagtagataatttctttagctgttatctggagatgagacttagaagttagatcaaccacttgtagtattttaagtgtgagttattctgtattttagttgtgaagtgtacagaatctaattagcttttaataattcagagtccttttcacacttggctgcttttcttttcctgtacaattttgtgttttctcttttgtcttttaaaaatttgttagtttaaaaattgtttagttttacaaccctccctcatttgtataaatctcctctcagattattcatatgatgagtattgcctgaatttcattttcttgttaaagtctcttttgagaccctctgacctaccctgttccgaattgattatcctatgagatctgtcttttttcatcatcttggagattgtatttgcctgcctctctcttatgttcagtttcctggttccttgaatttatgtgtcttctttcttgatgttctccattgtttttagccgatacaatttcatagttcctactgagaaagaatatgtgtaaggtaaaatttttttgaggcttccattcctgaaaatattttatttctgccctcatttttgattagtactttgacttgatatagaattctaggttgaagttattttccctgagaatttaaaatgtgttgccttgttgccttctggcttctagtgttgctgttgagcacatagatgtcattatggtttttgatcctttgtatgaaaatttcattattacatgtcttgggagggaactgttttcattcattgtgcagcatatttggtaggctctttgagtcagctgctttctgtgattttttttttttgccatttttttctttgatgacttagatgttgtacacctagagtaatcctttgctttttcttttttctcttcaatttttgtatgtctttggtttttgttctttttttctcttgagggatttatttatttatttaaagacaaggtctcgaggctctgtcacctaggttggagtgtagtcgtgtgatcctagcttactgcagccttgaactcctgggctcaagtgatcctcctgcctcagcctcttgagtagttgggaccacaggtgcatgccaccatagggacttttaaaaacgtgatcttataactcttttgtcaatttttatttgtttctgtaattttaatttttaacttaatttttaatgtttttaaaatttctgaggtctttaaaaatagttttttttcatatattccatttttgttttgtgggtacaatacctttttctaagaatattactgatacgaatttacatgtgcatctgtttgtgtatatatgtatgtgtatgtatatatatgtatgtgtatgctttgttccctttcctgatgactcggtttcttcccacttgctttttctgtttgtttggcttcattcttttgttagatattttctttaaatgtttggtgatctttggctaactcctgatacttttaaagtggggggcactaaaaagcaaattggaagctctctgtgcatgtagtgtcctctgtctgggccattttcttagggatattactgtcttttctcttgggctggtcatattttccagaaatggcttttcttgcctggaatacacaatcgtttatgctagtgatctaggagcagagtgagaagaagattgagagtcttaatactcaaaatgatactttcatttaatctcaatatttagtatcaatacaggacctctgccttcagctattcctgttgtctgcaagtctagaaacttttccctttcctaataacaagcttgtagtagagtgccagggttggggttgcttagctgctgcaagtcagggaggacaactaggagatctcacagctccttacgcagactggcgatgaatctttctcttttaggcctgccttcacccctgcttccagggatatcttgtgcttgccagttcttgtgcctgctgtaaatcagtttgcttctctgctttcctagttctgcagtgaaaattattattctttaattttctttccagagtctaaaggtactgctttttatttcatcttcttgattttttataggtgtattccctttaaaaattacatttttatcattttagtaggatgtttggactgagcagaaactaatgaatgtgtacaactagttatctttacttagtttttttttaattgcagaagaaataataattcactcctataaaaatttggatgatgcccctgggcgtggtggctcacgcctgtaatcccagcactttgggagtctgaggcaggtggatcacctgaggtcaggagttcgagaccagccggactaacatggtgaaacactgtctctacaaaaattagccgagcgtagtgacgcatgcctgtaatcccagcgactcgggaggctgaggcaggagaattgcttgaacccgggaggcggaggttgcagtgagttgaaatcgcgccatggcactccagcctgggcaacaagagcgaaactatgtctcaaaaaaaaaaaaaaaatcagatgatgcaaaaaaagtgaaagtcactttcagtcctctggtatgaacatgttcaattagtcctctttaattggaagttctctttttttaattgcaaaagaaataggaatcaaccccaaaaaatcaggttagataaaatgacagtcacttccagtcttcctttgctgatcccattgtcttcccagatgtaactgttattttttatacgtatacttctgttttaattcatttacatacttttaagtacatagaaaaaagtagtttcattttgtatgtgattttgtgatggaggctgttattggcaagaatgtggtcatactgtgttcttctaaaacctgctttttttttttttttttttgggagacagagtctcgccctgttgcccaggctggagtgcagtggcatggtctcggctcactacgagctctgcctcccaagttcatgccattctcctgcctcagcctcccaagtagctgggactacaggcgcccgccaccacacccggctaattttttgtgtgtatttttaatagagacggggttttcactgtgttagccaggatggtcttgatctcctgacctcgtgatgtgcccgccttggcctcccaaagtgcagggattacaggcgtgagccatcccggccgtaaaacctgctttttctccataacatatatttagaggattttttcatgggaaaacatgaatacaagtctttttttttttttttttttgagacggagtcttactctcttgtcaggctggagtgcagtggcacaatcttggctcactgcaacctctgtctcgtgggttcaagcaattcttttgcctcagcctcccaagtagctgggataacaggtgcacgccaccacgcctggctaatttctgtatgtttagtagagacagggtttcaccatgttggccaggatggtcttggtctcttgacctcgtgatccacccgcctcggcctcccaaagtgctgggattgcaggcatgagccaccacacccagccagaataccccaaatgtttaattaatgatagataagtgaggcctgagtatgtggttagctctaataaaagatagacttaattagaatctaacacttcctgttttatctattctttaattttacattatctgattagcagtttttggatgatattaagtgttttaaataggattcactacagcaaagtgggatatagtggttgattcatttgcaaattccaaatccccaggaaaaggagaacgttcagagagctttatttttaggatcattgtttccaaatttgggagaaatttcactgtccaaggaatacagagaaatggttgaatgaaaattgtgagttgggaatttattatgttttgttataggctgaatctttaaatattaggtagacaatggctagatatatgtagttttctttctgcttatatgtttcttttttgttttcatatttaagcccaggatgtataaatgaatcaaacaatttaactgtaatccacaattacagctggggctaaaaaaatttcagccttgtgcaagaggagcctggggagttcttatagttgttacaacaatcagaccgtactgtcttaaataaggactctgcatttatcaaagatgagagcagtctgctgctctgctcttacagcctttcttatcaagtggcctggattgagaaaaacaactggaatgacagaacctcatcctggattcctttagtatccatgggaagagagtgtttttaaagctaggaaaggggccaggtgccgtggctcaagcctgtaatcctaccactttgggaggcagaggtgggcggatcacttgaggtcaggagctcgggaccagcctggccaacatggtgaaaccccttctctactaaaattataaaaatcagctgggtgtggtggcacacacctgtaatcccagctacttgggaggctgaggcaggagaatcgcttaaacccgggtggtggaggttgcagtgagccaagatcacgccactgcactccatcctgggcaacagagtgagactgggtctcaaaatagataaataaataaaagctagaaaagggacttaaattactaaaagcaatctggggcatggttcgctgcattcacttttgatacattaaatatttttggaagaggcactgggcatggtactctgaggtcagtcaaactagctttagaaccttcatcttttgctttcttgggctttactttccaaaatggactacaggataatgaggctttttttaaaaaaaaaaaaaaaaaaaaaaacttatctttgtcttagatttgaatatactagagcgggcaaaaatcccattataacaatctccgaaaaggtaattaaatgtataatataagaacagacaattaggtcagtagcctggagcagggtcctcttgtaggctagtgcactgaaaagaactgtgatgagacgtggacaggagcatgctgctgcttgttcagggaaggaggctgcttcactgttgccacaggggtggtgaaccagttctgtccgcttcactccctggtgttcgcaaggcagttttcggaatcagaaactctagaggaatttgagaacactgatacgcttacttcacagaaaactgaagtctgttgaggaccaaattgtctggcatgcctttgacattcctgcttttgctctgtgtccatgtacttaatattttaaagagctcttactttttaaaaattactgtatgtagcaaggactagagaaaagtgctcctcattctatatgtgaatatatgatagtggtctgtaaacccaagctgcacatggcttaaatgttcttttgtattttcgctggcttaaaattgagcatagaggaaactggaaatgttctctaatatcatgcatagtctctgtatcttatttttctttgtttacttattcatttagtcaaaaaataattcagcgcatgttgcaataggttagggaggctttctggtcataggaagatgaccagaaggatgaagaaaaacctccgtctttaagaaatgtatagtctctagtgtccatccatcagggccttggaaacaaatgattatgatataaattaaagtactatgttttttttttttggtaattttgttaccaaattagtgtatatatgtacataaaaaagacaaggtaatatccatacactaaaaattggttatctcggactagtagaaatattgctgttgttttattcttgtatattgccatttattttctatggtaacacatgtattttttaaacagaaaagaactggtggcggtatcatcatcactgctactctttaattgctccttctcccatgctaccactactaatgctttcagagctcaaattcatactccagtctatctgactccaggtgtgtgccgttaactgtcagggcccacagagcaaaatgcactctggacagcatcaatgaaagtttatcctgtagaatactggtctcataagattctcctggaaggaagacttcagtaacggagcaagtttgtaacctattaaagttctgtaataaagaagtctaaggctggttgtggtggctcatgcctgtaatcctaacactttgggaagctgaggcgagtggatagcttgaccccaggagttcgaaaccagcctgggcaacatggaaaaaccccgtctctaccaaaaatagaaaacaattatccgggcgtggtagtgcgcacctgtagtcccagctaatcaggaggctgaggtgggaggatcactcaacttggcttcagctcacaccactgcactccagcttgggcgatggaaatgagatcctgtctcaaaaaaaaaaaaaagaaaaagaaaaagaaaactagttaactcattttaattcagtatctcccgaattaattttatagtaatttgacccctttttaaaatcattaattttttagatgttttatggctcaaacaaacttttggtgggcctgagaatcacccagagggctgggctccactccaagtttctgattgagtagttttggggtgaagaatgagaatttgcatttctaacaagtttccaggtgttgctgatgtctactcaccctttgttttgtgtcttccaagtcccattttgccttgaggtataagctcatagactatgataaactgtgatgttagtgttttcctactggaaaaaggtatctttaagagtaggatatgattgtgttgatcacagagtatgggctgggtgctttattaactgaattacccactgtagcattatagttggtcccagaccagcagcatcagcatctcctgggaacttgttacacacatttttgggcctcccccagacttacttaaaacttggaggcagaaagggtaccagcaatctgtgttctaataaaccttccaggtgattctgatgcctgccaaagtgtgggaatacagcttagtggttttaaaccacttaggaattataaattcagactgtaaaagcagcaggaactctatttgtggttccagattctcattggtgatttttctgtcccttccccacccagtgtcattgttgaatagattttacttaaagttgcctgggtagtggtggtaaggagagtaatattattttactctccttactaataatattagtttaccttcgcagtgaagtcataaccctttgagggtatcctagctgaaggcaaaagccaactgctgctgttcactttatctctctgggtttccagtctcctctccttttctggcctaagcagctatagcttcttgccagctcattcatgttttttaagattaaaaaaaatgctggattttgagttgttttaattaggatggcaggtccaagtacttattccactatattccaggactagcattccctattattacatttaatggattttgccagattgctttctagggaaatgcaaactgaagtagtaatgtgatagcactttatgcctgtcagactggcagaaaataaagtagtaacatactgttgcaagtgatatggcttgtaaatgatattagtgtaaatgcaaattattttggtcttttaggaaacttaaaaatgcttgtgaggcaaaaaccattgtgatgttgagggaataggtggaggaaagtatatttgcagcaggtgcaactagccattgcttcatttttctgtgataaaactaccgaaaagtatgaatgggtgttaccagtctattatgtttagggccatgggttgggtcttgtttgaacagcaaggataggtggacttaagggatattcatcatatagacttagggtaaatcattgagagagctgattgatgaaaatagcatgacttgcttcctcattaacccaccaaaaagttataggaaaatgagggaaataaaggactagggtgagttaaaaagggagctctgtgcccctggtgtgctggaactagctcttcctggagttgataaattattaggacttcggcaagccagatgttaaatataaccatcattaaaattaaattatataaattgcatttaaattatatttaaaacaaaggaaatactcaaaacttatgtcctagttttattatattttactgttatctgtgttcttgaggttattgacacctgttgtatctgtgtggtggaaattctgtcagtgtgcagttgcacatctctttcctattctgtgttcaatgataccactttggtgacttgaaataggacagactatttataccatggaaatcagcaactagtacaaatcaggatttttttcccctggagaacagttgttaaatatctacccgaataccactgggtataaagttttgctgtttgagatactgattgtctttcatcattgtaaatgtacttattttctgaagcttcgagcattctaatcttacgtaaagttttattgttcttaggaaaataggtaactatactagttttactcatgttttaaaagatatcttaagcttcaagggagatatggcttattttatttagcttttattttcatgtagatagtatttttgtaagtttgttctccttgttttttaaaacattgtcatttaaaaagtatacttaaaaaacctttataacaaataaccacccagaatttatctttcttgtaagccattagtttcatttcttgaactcattttagcaaggagtacactttttcagtttttaatgtggacatgtttttgtgtgtatgatttaattcttatagcagtgttgtagatgaggttgaccagttaccagcaataaatattgtttctctagtatttttagttagggctaacatttgatttcttgtaagattaaagtgtcatatttcctacttgtttgtttagtttatcctctggtactttagtaaatcagtgaattgggaaatttttcataagacttgtgattcttattacattcatctgtcatacatgtttctagcacttatggcaatgaaattaagattgaaacattgaaaacattattctgggtatcttatttattactgtttgtatagtgtagtggttttgatttttggatctgtagctgggcctttggggctttggcccagtcatctaaactctctaagccgctctttcctcaatattaaagtaataataataatagtagctacttcatatagtggttttaaagattagatgagataatgtagcatttagcaaagtgtttggcttaaagtgctctgcaaatgtgagctaacactcttactatcaaaataataaattctcctatctgcaagttgccttaaatggcgggtataaagctagtagtaagtaaagcattacataaaatacttaaaataatgaaagctattgaaacaaagtcaggaagaataaaattcagtcttttatggcttattatcaaaataataaattctcctatctgcaagttgccttaaatggtgggtatgaaagctagaagtaagtaaagcattacataaaatacttaaaataataaaagctgttgaaacaaagtcaggaagaataaaattccatcttttatggcaaatgagcaagctacaataagcagcgtcactgttcatttgtttaggataatggttaggtatcaaccataccagcaaatgataaaaccacctattccagtcactgaaatactaaaccactgctttagttgtgtacatacattatggataaacatagataattttcctaaaacactggataatccaattgctgtgaaatagaatttaggtaataaagggattcttggttcctttagtagtttaagttgcacattgacttgcctgtcgaccgtacttaaaattacagactttctttgccttcccaagtccactttttgaaatagctgttaagtagctcagtgtccaaataataagtaaaacaggaatacgaggcagaagggagcattgatcacccacctctcaatactactagaaagttggctgcctaatctctcattattttgtatttatttgctattttattctgggtgcatagatttaatattatgttgacactttttatccttagtattgattgggttttccctcttttttctactctgctacctctatcccttctggaaccagtagtttaatggtaagtatttaaataagatttacaaagtttttgacctagtgaggatttttttaccctcacctatcttggtgaaaactttgtagacttcagacggtctctgtggtttcccaggttttcattgttgccttgtttgtgtgtagactgataaaactttagttctgaggttctcctgtccttgcatgctgtgtcaaatggcatccattgtttgtgtgtttcatagtgatgtttttcttggagcttgcattctcttttttgtcttctttctgctgtttttttttgttttttttttttttttttttttttggctgggggtggaggggtattggagtgggaaggagaaaagtctttctcacatctgtactacttttattttctatatggcatttggaatcctcccaaattttgccaggtagatctctgtaagatgtttgttctgtgtacattaaaagcataataactagtatctttgggaagaattatagactgagtccaagtccattgaatgatactgtttttattgacccttaattctgctaaatttgctatcaaattctgtgttgttatttcttgtttcacatttcaagatatttgagcctttcaagtgttttttaaaggtataaatatattaggatttttcatagcaataaccgttaacctgttgcctcaagactttgtattttgatttaatgaaatttttatttaccaccgagcataatgtttcactcttaaacttagattgtgaaatataatttaactgattaaaagaatgaggccagatttagtgtgttaaaacttatagtagactttggaaagccactttcataaaattttaccatcaaagaaaatgtctttaaaatttttgtgtgtgaaatataaataagaaaaatgcagaaaatggaagagtagagttagaaaatgaataccaatgcacctgtcatccatgtgcagtagaacagtgccaacactccagaaatcctcccctttgttttcctgataatgaagcccttttttcctcttagaataatcataatccgtacatttgtaatcatttctttgccattctttgttttataatttatatatacatttgtaaagaatatgtttaattttgccagcttgatataaatggaatcatactcttttttgggtcttgctgcttttatgtttgtaagattcatttatactgtgtgtagttcatcattctgtagtttaaagtttatcatttttcattctgtaaatacaccagaattttttcaaccattccattgttgggtgtttgtttccattttgccattatgaacattgctactgtgaattttttgttaatatgtattctggtgcatatgtgcacagatttctttaggacagtattacttaaaatatggtccttgaacgagcaccattggtggtgtcatctgtgtgagcttgggagaaatgcaaatctgtgggctccaccctcaatcagaatctctggggatggggtctaggaaaccgaaacaagctctccacatgaatgactcttaaggacattaaaatttgagaaccactgctctgggatatatacctagaagtggaattgctgagtcataggttatgtataccttcagcttaatagtgttttccactgtggttatgttgctttttagttacactgttgtttgagagtttgtatttctttacatcctctgtaacaattagtattgtcaatattttatttttttaaattagaatttgagtattttctgagttacttttaattagaattgaattttggcttttcagatttactgaaaaaattgacttagatttactacagactttctaaaaatattattagaaatcatagaagtagaggcaaacagtacaatgaactaaaaacttcatatcttcagcatccacattcagtgttcattatattttgcagtattggcttcatttatctcttttctctgaattattttaaagacaggtcctaaatatgatgtcttcactcctgtataaataaattcatatatagaatatgtaccattttctttacatgatgacattgtctttattactgagggcctttttactttaaaaagttagaataggcttcgtattaaaacatgtaaaaattctaaaataatggcaaagcagagtatataagcttttatttggatatcatgagtgggactttgaacattctctgaactcttctaatgtatttagtcaaatagttatactgaatattttctgtttcaacaatcagagtcaaatttagatttcttaaagggattatttaaccattatttaggataagaatgtgtttagagtgctcagaaatttatcacttctctgataaaactcagcatgtataatgatgatgtcctagttaaagactggagtagacagctaaaagacaccctgactctttactcttagaagcaactctttgaaaacccagacatacaaactttcacatctgtcaaccttttgctgtggtattgtgcagagttcactatcctgaatcagcacatgtccgtctaaacttccaatagaattaagagcattggaagtcagtgtttatagtgaattaagcagtgagtattttttgaatgtgtgtactatgtttggtaattgttggataagaaggaaagtacaggaaactaacctgttattaagcagtacagaaaggtacccggtaatttttgttttgcattgttgtgattcagttaaatgctaaattttgctgatcaggaaagtatagatatgtagcatgtaatatattttaaaatgttatgtaatttattaaaaatttgtaaaaagttttagggtatggaagataaatgaggctggagttggaagaaaacaagatacatggctttgtatatgaataaaaagttggtatttgtttatgtgtattttaaaccagggagtgatcaggtctggttggtgttttgaagatagcctgtgacaacagtttggggaagggtgaggtcaagagcagatgcatagagaggttactgccatagtccaggaaaaaataacagtagctacgttgtgagggtggtgtagatgtctaaagaattggttgaatctgacagatactcaggaggtaaaatctaccaggtgggtgatggcttgagaataaacaggtgtggcagcaggaaaacagtggtaacactggcctgactggaacatcttcattattccttagccctttggttagactaaactttttaatgcaacttactggcagcttacagatgagtttttgtcataacgaaactttttcagaatggttttctttcctcttttgaaacaaatatttggatattttgaacagttcttaaagacttaatccaggggttggcaaatgtctagtaaagggccagatagtaaatatttcaggctttgcagatcttttggtctctgttccctctttttgtagtttgggtaagccatagagacaatacataaatgaatgtgtgtggccacgttcaataaaaattggttagtgggcactgaaatttgaatttcctataattttcacatgccatagcattttcttttttaaaaaatttttattcagccattaaaaaatgtaaaaagttcttgactcaagggctgtacaaaaattgacagtaggccacagttggcctgcagacctatgtggggtaaacgcacctgatagccattttcttaagcataccttgaggatgaccctgtgtggcatacaggactgaatgtgagttccaagctagggaatctgagagtggctaattaggagattcgttccttgtctaaggagaaacatctgagcctcctgtcctgtcctgtcctgtcctgtcctgtcttgtcctgtcctgtggaacatgagctgtacaggggatcgaggtcccaagtttggggttgaaagaaggttgacaggtggaggttgttagtgggaggatgctaactgaaaatgctttataaactacatgccttttccaagctgttgtggttcttctgtccagcctgccaccccttgactgtgtgtaaggtgattcttctgaccagtctactgctgcggtactctctgcgctgtatgtaagcctccagtaaaaccccgtgttttgtttgctggctctgggtcttgtttttggcctcttgaacttggtgccattccccttggagtcaataggggtccggcacaagaacctgcactttaccaaccccagaattttaccccgagtgtaatttctttacgagtaacttttaagatagatagtaaataggctgtaggatgttaattcctttcattcctaaagagtcataaatgcttaagtctgtaatgctatatttgattcttccatatgtgaatttgggggatgtagaaacgaactaccagcaaacccaatatagctaaggaagtatataatgcagagtgaatttcatgaagagcagtatctttaagaaggtaactaacacataccaatgaaaagtggtttccataggtgagccccaatgggaaagaaagttaatgacttttgtcagactaactgcagatgtgttaagaaagttgcgctgggttctagggtagttgtaggaaacttggcttaaatacttaggagttggcatgctacctgctaagcttgaaaatccttgtagaaccagcccttcagttctgaattaatttttgacataattcttaaggattatattatgtatgcgttgttttagaaaatactggtaacactgagtccaattatttgagtgcaaacagtagtcggcaaaattttatctacgtaaacgttactgattacagtcaggtgcccaactgctatactttaaattagattttagttgtgatagtaatctgttaatgtatatttagccttccttgttacctgttgatttgccatggtggctgtaaaaaaaattagattattgacaataacaaaaaatacttttagccaagtatatttaagattttaaggccccagttgctaaaaggtcatttaaaataattctatcaaattttgttaggtacattttatatttgctcaagcgatcctcccaccttagcctctcgagtagctgggactacaggcacacaccaccatgcctggctaatttaaaaactttttttccgtagagacagggtctcattacattgctcagggtggtctggaattcctgtactcaagcagtcctccctccttggtctctcagagtgttgggattacagacgcgagctactatgccagccctctgaggatttttaaataggtattttgttgcatttgatactggttacatcctgatagttgacagcatagtaaagtgctcctgttgtgtttgtgcgttcatgtgcatatgtatgtgtgtgtggaaagtgagacataaatgtagtgagccatgctttaaaaatgtcttttagctgttcagagctgtctttgttcaattgagtactaaggagaaaattgtgaagacagaaaaaaaccacttcatcttcaaatctgggcaagaagcagcatatattggagggaggatatatttgttcattcacccaataaatatatatgtcactctgcgttgacatagttctatgaagtaaacagatattgtgatgtgaaacatgaggaaggtatgttttaaaattattccttatgttttttagttcagtataattatttaaaacattttctgtttttatttgaaagtcctaaagacatttaagtgatagtttcattaagactgtaactacacctgtggctcttggattaattttaagtctaatgaatttgttatctggttgctatacattaaaagcagtaatttctcttttgtttatattttaaagaggtaagagtttcagtaaaattcaactgaaatttagtaaatagctttgggaatagctaaaacatgataaaacaacaaatgtaggagaggaataatttatatatcttataatattttagggattatatgtataccttacagacagaacctaaaacgaaacacttgataagtagaagccatgtgagctgtacccaagtggctactttggttctggagcttactatcattctttggtcttaagttttctgcaactgaagggaattggaaatgtgtttgtttagaaacattattctgggacattgagcttaattgagaattttagctgtggctggtacaggtttttcctagtgttttgctttaagccaatgcgtataaacagtagccatagaggctagagttcattgttgtaattattctgaaacccatagttgtttaaaccttttttctcttcatttgacttccacaatataatctaagacccaggtgaaactaacatattgctcatgttacatgtggcctcataggctagtgggcattatacatgtgagaagttagtgtcgggtaagaagctgtggctcagacatgcatttctccctctagtttgtgaattcccagagcaaatgccattactccatccttcctccctccctgcctttctactgagagaaaattcccagagcagaggctgttgtcatatttatgaaaacaaacaaatagactgtaactactgttaaagctcatgctcagttccaaaagtgctttgcatacttagtcagatttctagaattgcccccgagaatatggactaagttaccgttggcactgaggcatcctcctattctgtagtgagcttgtttcacatcagtgaagaataaaaaactacttaacctccctgtgtctgtcttgtgatcattctgtaccctcattcactaccttcctcccccagtggtgatgtgtggccatttcgaggttccctggtggcagaatatgttcggtatattcgattttacaaggtccatttgtattaggtaaaccactgatccctaggtccttgttgtgttattggcatactctctcatattataaattaaggatgccttgtttgtattgccacatggattttatttagttttccatgagagctgacctgtcctgtgctaccatagtttaagttgacttttctaccgttgtgaatagtggtttagttctttcccttcatcagctgtttgataagagcaatcacgttgtactctgtttgacattattctgtaaaatggattaatttattaattcaaacaaatttaaaagagaaatttttattatattatttggttgttttcccagggaaatacccatgttgctcaagatgacctttattttctaataaagttgtaattttctctgtcagaattattttctatacattttatggggcacacgtaacattacattacataacataacattgtacaacatagcatcacagtgacaggaaaataccctctgtcagtggtggcccactgttaagatatttatagttattttaatctatcagatttgtaggttatatgtatttaaaatgatctagacagtaaagcatgaagaataaagctaatgggatatttttgggagtgaggtggaggagacaaaaaagatggacagaaagttgattgatgggctagaaggtaataaaagggtatcagtaataaaagcaaaaaagggaaaaaagggggcatctctgcagtgttatttttaagagtgtgaatatgccaaagacataaaaatgtgtgcctgcttttcttgcattttatgacttcaacaatagctgtccaattttttcacttgttatgggggaattattaaatctcaagtactttatcgctctgggtttctgcatagttttccaaatatgggaaatatatatatatatatgtatatatgtatgtatgtattttttttttttggagacagtctcattctgtcacccaggctggagtgcagtgacacaaacttggctcactgcaagctctgcctcctgggttcacaccattctcctgcctcagcctcctgagtagctgggactacagtcgcctgccaccatgtctggctaattttttgtatttttagtagagatggggtttcaccatgttagccaggatggtctcgatctcctgacattgtgatctgcccacctcagcctcccaaagtgctgggattacaggtgtgagccaccacgcctggcctatgggaagtgtatttgttaagatatccaagacttggtcccagtatggattttgatttgctcatggtacctaagtgtctgttcttatcttagccattcattccattggtgttttgttttggtattttggtatttgtttgttttttgccactattcacacgaaataatcccttggaaatctcaaaatagaccccctatgattgttgcatggttgtaacatttttatgtacaagatattgtaaatcgtttaattggttataaatgctatgagagagatctggtagagagatgagtggactgcagagtgtagtgaaaagagtcctagttctggccctagtcctgactagttttatgagttttgtcaagaatttttacctcactgagttttcttacctgtaaaaggagattagagtggatgttcccttagagtgcatttgcattctcacaaagttgagtctacctggcttgggagtaattacagtgaacatggagaagtgtaactctttttggacaacacggagggcatttgttaggtacacagtgtgaaacttaaaaatgtctgatcccataattaagtttgttttttgtccctaactaaagaaaaaggtggggcgggggggggggggttgggtataaagacgcctacagggcatacttaaagaatccttgtaagacatttaatgagtcattacagcatactgatatctaacataaaaaactgctttggatagcttttcattcattcaaatatttgagtgatagtgtgtgtcatgagaggcacactaatgactttggggctacaaaaaatagatcataattttcacttaaaattgcttcattcatgttctttccaaagagaatatatgaaaaaaataaagtaaaagaattgtcagactaggcgctgtggctcacacctgtaatcccagcactttgggaggccaaggcgggcagatcacctgaggttgggagttggagaccagcctgaccaacatggagaaactccatctctactaaaaatacaaaattagctgggcttggtggtgcatccctgtaatcccagctacttgggatgctgaggcaggagaactgcttgaacctgggaagcggaggttgtggtgagtcaagattgcaccactgtactccagcctgggcaacaagagcgaaactccatctcaaaaaaaaaaaaaaaaaaaaaaaaaaaaaaaagaattgtcataaaccagtagatagtaggaagtaatgattttccctagtggactgaatatatggtcctgatgtgaactaagctattcaagaatgtctgttatacaaattgttgtatactgatgttttataggttcatcaaggattgctttggaggatttatcagaggattaattagacatttagctatttagcctggtaaaacgcttgttgaacaaggttaaaacgtttcctgctaacttgtttcagaatgtattctgctatattgtgttattggaacatttgctgtcctgctattttaattttatttcagatatttttgtcctttattaagtcgctgtcatttttaagtgtatagattttacttaggtgtttcctctttggcctcttgagcaacttttcctttatagcagaaagtttacctattagaaaaccgtgataatttagagagaagttaggtcatctgcaactgatcctgcctgtggttatagaagttagttagcttgcattttctgggaaatttttcataacagataattctgtatttgccagactcagaacagatcctaccagtaaatgagataagttcatcttttcagtttagactccaggccttttgctgcgcttatgttttatatagtctaaagttctttgcttatggaagttgatttatttgcccccccttttttttactggcatgtttaaaacaattttacctttgaacggaatttgaaaaaaaatgcagtgcattcctgcaagcagtgcttataattgtggttataatcaccagtaattagaatttcctaatctgcctttaattgtgccattcttgcctctagaactgaggccaactgtatagttcatttccgtatttatttggatatttattaagtgttgactgtaggtctagctgggtgcttggacagagtgatcagatgtaacacgcagaataatatgcaatttctgccccacaggtatcaaatttgggagataagatctacacagaagtagtattacacatgatatgtcaaatgagtgttatcagtaaaaggaattcagtaggacagagaaggacattttgcttttgagttctctaaaagatttcattgagatggtgagacttgatctgggcttgaagggatgggagtaaatttttagtaaagtaggatgaaaatattggcttaatcaagagcaaaggcatggagatgtaatgggtatgttctattggaggaaaataattaaatggcaacaccaaatttgtattaggctcatagtgggaaatagtgggaaagccttgtacagggaatggtggcatggggttgcttgcatgcattcagtaatgcaaaagagggccaacagccaggatgctgtgacagaaagctcaaagcctaggaatcagaagagctgagttctggcacttttgatgtctttccacttagacctatattctctttaagtgagcagtttaaacagagagagtgtaggttccttatggttaatattctttagttctgttatcagagatggaatgacagcttctgttttgtattacctgaagagctttgtatggcctggtgtagcagatggaggttacttgctgtaaaaatctcctgaacccattcctctgtcactgattcattccattgtttgtcatattcattgcatttctacgtaggggagtgttaagcctattgattattgccttctggaaataaattagtcagattacctaattgagatcagatggagtggagctttgttttagggacagtataaaggaatggttttgattttggggaaacttggagtgccggctttggatagagaacatttatagccagtgaggtcgatgacataggagggaggttcatgacatctgggggaggggcagaatatttggattattataaaggttaaaatagaagagtccaaacatctggcatctcatctgtctctaatgtagtccctggttacctttatttctctttggatatagtgattgagaggatcagttcttctgggtgatttttgctggtgtctttattttgtttgtggttattgggaactctcataactaagaaagttgcatttagatgacctgtttgcagttgtagaataatgatttggtatgtaaatctcataatagggccttcatcttctgtcatgcctaacagatctgacttggtggttggagtaatttttctaccaacaaaaaacccaaaaatctcacctgtatttttcctgccaattggtgtattcaccagtctcaggtttaggatcagtccctttttgtttgtggttggtttctaggaggaaacaatgtacaaatactgagttaaaagtagggttgggccactggagatacaaagaaaaatctttttgccttagtcatcaacaatggaaaagcatttggtaaagtaactttgatgcagcagtatgtgtcattgagtagttacagaaagtttttcttaataggaatctggattttattattaaagaatgtcattatagaggctgggtgtgttggctcacgcctgcaatcccagcactttgggaggctgaggcggacggatcacctgaggtcaggagttcaagacgaacctggccaacatggcaaaaccccatctctactaaaaatacaaaaattagctgggtgtggtggtgcgtgcctgtaatcccagctactcgggaggctgaggcaagagaatcacttgaacccagggggtggaggttgcagtgagccaagattgcgccacttcactccagcctgggtgaaagagcgaaactccgtctcaaaaaaaaaaaaaaatgtcgttttagaactgtactctttatttttagagacagagtcttaccctgttgcccgggctgtagtgcagtggtaggatcatagttcactgcagcctcaaactcctgggcaagaactgtactgttttaagaatttacaaagaataagagttgtctgaaaagtgtagaggggaaaatttcaataaatgatagccactgtttactgaatacttactatgttgcaggcattatatatacattataatctttaattctcaccaaatttctaatgtgtaagtagtagtatcagtgtttacagggaagaagtcaggcctggagggctgaagtgccttccctgggtcacctagtctgtatgtaatagaaacaggatttttaccaggtctattgggcctcacatttctgtattttcacctgactattaaggataataaggagattgacatgtaaataaacacagggccatgtgctgcattgaagtattgtccaggtatggaagaaatacaaagggagggaatgatcaagttgaccttggggtagagcacttagagaaagattcctggagaaagatgacaccttagtaggatactggtgaccatctaaaagttctttgggtagaagagaaggattaatgacactagtgattcattgtctatatgttttcttctctgtttaacaagagcagaatgatctggttcatctctactgttgactctcttcatcacagtctctcttggccttttatacaccaagatgatcctgctgttcccatcccagtttttgttagtttgatcattttcacactgtttacatttgtaatatttagtactgttttgtagagataattcctatagttgtttacacatatttttatttttaaatagaatcgtgcatgtgtgtactacctgtgtgtccgtgagtttatatatttatttaaccacgaattctttgttttgattcatctgttggttgagtcctgagtctgagtatttaaagataatacacttcttgagtcccatttttttccaagagctctgaagacccctctgccatgtgtcccaaataattatctatatatgttatatatgtagatctctatacagatctttctatatatacatagagaaatttctctatataaataatttatcgatacatacatttataaataaatctactcaggtatatagaaagataactatacagagagagatgaatcaaggatgaatcaaaacaaagaatttagaaatggacaggctgtggttaagtaaatatgtaaatacatactagtagtacccacatgcatatcatatatatgtatacagttttaagagtgctttacatagatgtttaacttaggatttttgactttataatggtgtggaggtgatatgcattctgtagaaactatactttgaatttcaatatttttcagggctagcaatattcataatgaaactcggtggtgctgagccaaatatctcatgtaatttattgaatacggtattgaaagggttctgagcacatttaaggtaggctagcctaagctacgatgtttggtagtttaggtgtatgcattttcaactgaagatattttcaatttaccatcctaagtcaaggagcatttgtatattaaggatattgtccttttgtttttgatatacattgcaaatattttaaattcattatttgtctttggaatttgcttctgatgtgtttaaccatgatacattttttttcttttgttgcataatgccttagagctgccttaaaaaactgattggaagctttatgtgcaaagataaggcttattaatagtcaaggattttgatgtatcattctgtgagaccttttgatttaagagaagaatctaccaatttcttagtagagatggaggctatggagtggggcctttttcagttcggagatctttattcttctattttcttccctgcccgttgccgtgcctggtattctcaattccgaatattctttgttgttgttgttgttgttttccccacagtaaatctccattctcatgctctagtgggggtatggtatttgcttggctgtatgtaatggattggggacctcgggatctgttttttattcagtctttcagtcagtctagattttagcctcatgtatcactactgtgttgggaagtcatggagctccagatgcctgagtcctttgggaattatttagtgagaattggcttacttgtgcagacactcaggatctgtgtttgctccgtgccgttgatgctttcatctattttttttttctcatttgctgccgacttctctcaagttctttaactcatttttattaaatattatttattttcattttagtaggttttggaggggaggagagagaaacatgtgtttaattcactgtatttaactagaaatccaggtggttctttgtacgtactgtttttccccttaggctctactttgtaggcagttggatggctctcaagtgaggctttttaggttcacagtattgcacttttgtttaagtttgtttgccagtacccagatgattctgatgtttcaaatcagttgcctcttgccctcgtttatgctaagtttaacttcagggaagcaaattttttaagtttcaaggcaagaattctttagttgatgcttaaaatctggttgcagttttaggatctctgctttctccccatggttgatcagtttcacagtattcgatgtagcctgtgtttggccattatagtttttttgtagtttcatttttaggggtgtctaatcttttggcttccttgggccacattttttatagtttcatttttaggggtgtctaatcttttggcttctgtgggccacacataaaatacactaacaatagctgatcagctaaaaaaaaaaactgcaaaaaatctcataatgttttaaggaagtttatgaatttgtgttgggccacattaggccatgcgttggacaaacttgttttaatcgaatcctccttcctgttttttttctttctctttttggtggttttcaagaagttgaagtaaacatacctttattcctttcttttaaaatgcatgtactacagtttgaaaaacattgtacaaaatcatatatttcatttaggaaattgaatacctggaggattagctgtgccaaaatctttttcccaatccttataaagttcggcatgaggtataattctagcctcactcatttggttgcagtgagtttcacatcacagtgaagggaggacagttcctgtgagaacacatgtgttggaactagagagctgccaaaacgtctctttcaccacccatcttattagttgtctctcacagtgcttctgttcctgtctacactctagcttcatgtggccttctttcttgtgcttgcctatagtttctgttctctcgtaagttcagcttacacctgagccgtcatggacaccactgtctctcttttacttacttttgacctttctgcttaagctctttactgctggccaatatagtctctcactgtttcttaatcatatttccaaaaaaaaaaaaaattgattggcctatgccatctttttgttccacttctgatttgtgcctagccaaactataagttggctatctgggttcaggtttccaaacagcttagtggtgtcaggggagggagcagtaggacagcaggggaacatggtatatctgaggactgtcttagcagcaagaaggcagggatgggacacttcaccttggtaagtgagggggcagaacagagctgaatacatcaaatagtccctattttattatgctagtttatttttaatggagtacttcaggcaaatacttagtagtgcagattgaataatgtaggaaactagctaatttttaagtgtcaaaaattgactgcaaaaacctgtaccccgatctgatgctagtttctgttttcattatgacttcagtgccatggtgtggcagaaagaccattaaagtagaagtcaggagtcttagattctagacctgtttttgctgttctgaaaggcttcacgttctgcatcagataaaattttaaggttattgaggtagaatagtgtctaaggtgctgtttagctataaaacttgtgactcacagtgtactataccaagttggtaaaggtaatttccacaagagtagtcagattacaaagcttgtaataacatgaaatcatgagtacaggttaatgtaaaaaattaaaaacgagaatacctggaccagtacatcagagagagatacaggagtttgtagtggactgcatccctctcattttaacttgttttgtttgatgaggagatcatcttcataaactgatacaaaagtcagatattataatcacaaaattttcctgacttgagttgcacataaacagtgtaatgcagtaagtgtaatattgaagtttcaaacgctttttgattttccatgctttttaaaagccatagctggatattcagaatagttaagtaacttgagtttcttttgttttttaggatttaagtgccctgtatgctcaaaatttgtatcctcagatgaaatggatttgcatcttgtaatgtgtttaacaaagccacgaataacctataatggtaagtccaatggtttaaaataatattttaagttagaattaacttacattttatgaatttcatgtttcaagtataatttaaaaggagggaaggacattgttttctctatttttactagtgcattaatgcagtggttctcaaattctgtgatctcaagacttctttacacttcaaaaaattactgaggacttcaaagagtttttctttacttgggttatatctatccatatttgtcataaattaaaacagaatttataatttttaatttattttgttaaacataaatataattatgttgacaacttttaaatgaaaagtaaattttctaagacaaaatatttagtgacaagagtggcattttcaggatttttacaaactctttaatatcaggcttcatgacaaggaattctcacatctgcttcttcattcagtttattgtgatatggcacgtcttgtgtcctctggaaaactctgctgctatactggagagaatgggaatgaaaaaggcagatatggccaggcacagtggctcacacctgtaatcccagcactttgggaggccgaggtaggcagatcacctgagatcccaagtttgagaccagcctggccaacatggtgaaaccccatctctactaaaagaaaaaaaaaaagaaaaaaaaaaattagctgggtgtggtggtgcacacctgaaatcctagctactcgggaggctgaggcaggagaatcgcttgaacccaggaggcgaaagttgtagtgagccgagattgtgccactgcactccagccttggagacagagtgagactctgtctcaaaaaaaaaaagaaaaaaaaacaaaaacaaacaaacaaaaaaacagatacttagtgttaccatgaaaatagtttttactttgttaatctaaaaggatttcaaaggctcttccacttctcctactgtacaagattctttggaccacagtttgagaactgctgcattgaaataaaatcttttgggttaagcctaagtaaaatgtaatgttcataatggccattttcaaaagtaagtaagcatggttgaaattgcaacttttttctttttgtttaagagtatagagtaaatgaagggaacatatatgaggagtagggagaataaaagtttattcaatagtaaatagatgcctaatgggagaaaaaagtcattaagagaaacccaaaactctacctatgcagtgcatatgtgtctctgtctttcctcccatatacaaatttagtctgtgagctctggagcgaactggtatttttttaggtctggtgttttagactgtaccattctttcctgaccaaaatctctagatattccaaaacctaggaaagattttaaatgtagccttggcatactttggaatagacttgggggggaaaaatcaagtagttctgtcctaaccaatgaatagaataaaatgaaggaaaaatgaaagttgttttcaaaattttataaagaaacagacttcaaaagcttaagagaaatttcattttttttaaatataaattttggcctgaaataaaatgtgtagaaagggtaccagtaaacactatagccaattgaaagattggctaaattcaacatatattttgagcatcaattatgtgcgaggtactgtgttaggaattagagatatagcagtgaatgaacagaaatggagcttacagcctactaatagtaatagtcactgatttctttgagctaagaattattggttaaataaaaaggttctatgaaaaacttagtagatatagcagcacttatctgagctttctcctcaggtaacaaaaatgttgggaggggtagaatttaacattgaaatgagcatattacttttggtagtgttttgcaagttgatctaagaatcagtctctcaattcttccctttccttcactttttctagtatggtggtgcttcagccaccctattacagggttgacaatagagcactttttgccattcatttgctgatgaaatgtgaaagtggttttaagcagttacttggcataataaatgtatttgttgattatatcctaacctttttgcattatgaaattgaattggctactttgcattatctacttcaagtttagttatttaagaaatagaaagtgttctcattcaaaatttgtgactaaaagtatatgggtttgtttttcatacctgctccactatcttatattctataattgtttatgtttaatatgagtgcctttaaatatccataaatcttaaagcttctggctttcaatttgaaaatcacaaatatatttgaccatataataatatatttacacacagtcttagtattctgtatgtttactttttgtgtaatatatctagaatacagtcttcttgtgtattgtgatatttaacaatttttttaacttttaagttgaggggtacatgtgcaggtttgttatataggtaaacttgtgtcatgggggtttgttctacagatattttgttactcaggtattaagcctagtactcattagttattttttctgatcctctccttcctcctactctccaccctctggtaggctccaatgtgtattgttcccctctttgtgtccatgtgctctcatcatttagctcccacttacaagtgagaacgtgcggaatttgcttttctgttcctgtgtgagtttgctgaggataatggcctccagctccatccatgtttccacagaggacatgatcttcttttttatggctgtgtagtattcacacggtatatatggacccacattttctttatccagtctatcatttgatgggcatttaggttgattccatgtctttgctcttgtgaacagtgctgcagtgaacatatgcatgcatgtgtcttataacacaaggatttatattcctttaggtgtatacccagtagtgggattgatgggtcaaatggtatttctgtttttaggtctttgaggaattgccatactgtcttccacaatggttgaactaatttacactcccaccaacagtgtgttaagtgttcctttttctctgcagcctctccaacatgtatttttttttgactttttaataatacgcattctgacgcttgaaatggtatctccttgtggttttgatttgcatttctctaatgatcagtgatgttgagctttttttcatatgattcttggccacatttatgtcttcttttgaaaagtgttcatctcctttgcacattttttcatggggttgtttgcttttttcttgtaaatttgtttaagttccttatatatgctggatattaaacctttgtcagatgcttcgtttgcaaaaattttctcccattctgtaggttgtctgttcactttgttgatagtttcctttgctgtgcagaagctctttagtttaattagatcccatttgtcaatttttggttttgttgcaattgcttttggtgcctttgtcatgaaatctttgcctgttcttatgtctataatggtattgcataagttgtcttccagggtttttatagttttggattttacatttaagtctttaattcatctggacttaatttttgtatgtggtttaaggaggttggcgtggggtaggggtccagtttcaatcttctgcatatggctagctagttatcccagcaccatttattgaatagggaatcctttccccattgcttgtttttggtcaggtttggatatttgacagttcttaatttcctgatttaactatgcctaagtcattaaactgttctgctagatcacttgtttggtgtcttaagaactaatatataaccttctgcttggggatactataacaaccaaatatttcgaattttaaatatttaacagtatttcaatctagaaattaataaatttcatgcaataagtaaataaacttgtaggcattcttaaagttgctgactgaaagctttaaaaaataaaaatatatatatttttgtttttagagtcaggatcttgctgtgttgcccgggctggagctcagtggctatctataggcacagtcatggcacacgacagcctcaaactcctgggcacaagtgatcctcctacctcagcctcctaagtagctaggactacaggtgcatgccaccatgcctggcttttattttttattttgtagagataaaaaattcaaagtatgtattaattgtataaacattcacagcaagaagcaaatacagcttcttaataaaaaccgtgtatagtttttgaggttttaaaactagctcttggacagtggccagttatgagtaagtgaaggagaaaggagctttgcctggactgatttggagggttacagagaggtggcaggttaataatgtactttcctatcataggcaaggggaattctaatgccacctggttttaaagtcagaccccccccaaaatgtctgtcacaggtgatgagtccaaatggaaattggctcctttaatacctcataagcaaaccatctaggattattataaagtagaacaaggtaaagccagagaatctctaaaactgaatctttttagtcaactggattcctcacaattttatatttgaattcctacatgttgattccatagagagatacatcagatacattgggcctctgaattgtgttagtgctcaaacaagaacatttttttcagcatactgttcatttaacttacacttttgcagccttttccaaagtagctagatctgaaattttgaaatttatttgttaagtgaatgttaactgtctataaacattcatagttataacacaagaatagtggggcttgttttcttcagactggatatatttatatagataagctcctgaattggatgagttccagaaattcaaatataagttgatgatttagagtttcagactctttgtcacagagatgatatttgaaatattggtttttcagactagctcaccaaaaccttcttatttttttaaatgcacaatatatctgaacacccacatcctggtacctgaagaagaaattggctgactaggtagaaactctcagggattgggcagctggctcggcagagatcccaatgggacgcccaaggctgtcagggcagggaaggattttgaatgatgtgggtggtattatctattgcagatggtattttggcagcttgaaaaaattaagaatgccacagtgagtattcaacaacatagattaccttcatgtgaaggactgcctgtttcatatacttttccctctttcatgtgcttcattgttgagtttatggacctaataattccttgtatagtctatgaatctaatacaaattttatgagtatagaggctctcttcatttccttgctccttctaggatatttcagacaagccaacaaattaaatattattagcaaattcttagtttttttaaaaaattttattatgtgtacataatagtacatttataggggtccatgtgatattcagatacaaatgtacaatgtgtaatgatcaaatcaggataattgggacatccatcacttcaagcatttataatttctttgtattaggtacataccagttctgcttttctagttattttgaaatacacaataaattattgttaactatagttgtcctgttgtgcttccaagcactaggtcttattccttttatctgaaggtatttttgtacccattaatcaaaccctctttatatcccccttccccagtacccttcccagcctctggtaaccatcattcttctctctgtctccatgagatcagttttgttttgttttgttttttaagctcccacataatgagtgaaaatatgctatagttgtctttctgtgcctggcttatttcacttaacataatgtcctccagttccatccatgttgttgaaaatgacagatttcattcatttgcatggctgaataatattctattgtttatagataccacgttttctgtatccattcatctgttgatggatacttaggttgaatccatatcttggttatcgtgaatagtgctgcagtaaacatgggagtgcagatatttcttcgaaatactgatttcatttcttttggatatatatccagtaacaggattgctggatcatatggtagttctctttttcgttttttgaggaacctctgtactgttctccataatggctgtactaatttacattcccaccaacagtgtacaagggttcccctttctccacagccttgccagcatctgttattgcctgtctttttgataaaagctgttttaacaataagatcatatcttattgtagctttgatgtagcaaattcttagtcttgattgtattggtctttaaactatacctgattatggtatactttataccatataaagttcagtttttactttagacttctgtgattcaaggcagtaagatttatttatatttaaggaatctttgttttacttgtggttggtactatgtttgtgcatgtgtacttagaagaggtacaacttgaaataaagttgtcttctgggagttaaattataaacttgtgaatcaaaacagagctattcagaatcatcagaaagaagaacaactctatggacagagcaagatgtgactattaccctgttaaagtaaacatgtttgaagaaagattgagccagttggaaggcaatttgttctgtaataaaaatgatgaaaaaagctgccaattgctacactgtctgtgggagaatctattttgtcaggctcacacaaatattgcaggtgattgtatcaggctgtcagcaccttgattccagtttgcatatacagcctgctaatcatctgggttcctgtctaacatgtttgcaggaaagagcatattttttcccactgtagatataatctggtcttccagggagttgaggtactattataagttataagcctatcttctgccttatatactacattttcttggttttaagattctcccctcaaaacacattttaatctttctgaattcaggatgctttctgaaattggcatttttttttaactgaagttaaaaaaaaaaagaaaacttgccagctactaagcagaattttaaataagaaagtctaagttatcgctgcttgagcatgtgtgaacttcgccttctgtggcaggtttctgttctctgatttgacgtctctgttcatttatgtacattggtggtttctgtggttgagttttaacttaaatgtggatccctaattgtagtcttaagtaacttgatacagcttacattgtaaggcagaattgaagagctatttttgatactacaaactgactgttctccatggagtgatgttaaaggcaatgggaaatgtcaaatctcttctactgccttacagaaatctcaaagttggtgatatcccagaagagcctggcagaaacaaatccaaaactgttcataaacccatacaggattcctgtactaacatacagtctctattaacggtgaacttgtgatgaaaaatgacaaataaggagtgagagtaagcagatatgagaattattacccctaagaacttttaaaattaacagctttattttcaaatagttaaaattataaacagatgaataggaaatatgggaaaaaataagacactgtaaataaagaacagaaagttttgaaaaatattcagatttaactagacattaatcactgaaattagagtctggctgaatagataggttaagtggcagattagatagagctgcaaggagaattagtcaagtataaggtagttctgaggaaattacacagagtgtaacagagagagaagcatggaaaatatgagagagtacctggcatggagcctggaatgagagcatacaccatacatataaaaatcgcagaaaaagagatggaattgtggagaggcagtatttgaagggaaatgctggagaaccttatagaattgctgaaagctagaaattctcagattgaaagagcgcagtgatcttaactgccataaataaaaataaatccatatctagagacactataaaccacaaataccaaacaaaaagagaaaaatgttattgtaacccaaaaaataatattttaccgtgttccatttgtgttaacatttctaaaatgcttcttgttttatggagtaatttgaaatttagcagatgtttactttataaagataatggatcagaaatggtcatataagaaatttgacagtagttacagtctcatccagttaccaaaattgtaagcccattttataaggcactaaattcagttttacttcccttctgtaaatacacatagctgcccaaaagtagcaccaatttgtgtttaaattgttacaaagtatagcagtactttgtacacactttaaattcagcttgttgagtccagattctaattctgtcacttaataggagtgtaatcttagtcttggttttctctcttgtaaaaaaatgagactagaaatagtacctgtcttcatagagttactgtgaaaatcaaatgagaaatcacgcatagttcttcacagaagaacttcacaggtaatgagtgctaagttaacaagacctgttgctattactaagaaatattactcttgactttgagaggtaaacatgctgtagatgccctgttaccttttaaaaaaaaatttcggttgaggaggtggggtacatgtgcaggtttattacattgatctattgtgtaatgctgggatttgggcttctagtaaacccattccccaagtagcaaacatagtacctaataggtagtttttcaacccttgtccccctccctctcttcccacttttggagttccctgtgtctgttgtttctatctttatgtctgtgtgtacccattgtttagctcacatttataagtgagaacatggctgtatttgattttctgtttctgcgttaatttacttagtataatggcctctagctgcatccatattgctgcaaatgatattgtttcattctttttttatggctgtgtagtattccatggtgtatatgtaccactttttctttatccagtccaccattgatgggcacttaggttgattccatgactttgctgttgtgaatagtgctgcagtaaacatacgagtgcaggtgtctttttggttgaatgatttcttttcctttgggtagatacccaatagtaggattgattgctgggttgaatggtagtactggttttagttttttgagagatcttcatactgctttccacaggggctgaactaatttacattcccaccaacagtgtgtaagtgttgcctttgctccatatcctcaccaacctctgttatattttgactttttttttttttttttgagatggagtctcactctgttgcccaggctggagtgcagtggcttgatcttggctcattgcaacctctgcctcccaggttcaagcagttctcctgcctcagcctcctgagtagatgggattacaggcgcctgccaccacactcggctaatttttgtagttttagtagagatggagtttcgccatgttggccaggctggtctcgaactcctgacctcaggtgatccgcccaccatggcctcccaaaaggctgggattacaggcatgagccactgcgcctggccatattttgacttttttttttttttttcctccctgagacagagtttcattcttgttgcccaggctggagtgcagtggcgccatctcacttcactgcaacctccgcatcccaggttcaagcaattatcctgccccagccttccaagtagctgggattacaggtgcccaccactacgcctggctaatttttgtatttttagtagaggcagggtttcaccatgttggccaggctggtcttgaactcctgaccttgtgatccttccgcctcaggctcccaaagtgttgggattacaggcattagccatcgcacccagcccatattttgactttttaatagtagtcattctgacttgcgtgaggtggtatctcattgtggttttgatttggatttatctgatgattagtggtgataaacattttttcatatgtttgttggctgcttgtatgtcatcttttgagaagtatctgttcatgcctttgcccacttcttaagggggttggttttgcttgttgattcaagttccttatagattcaggatattagtcctttgtcgatgcacagcttgcaaatattttctcccattctgtaggtggtctttttactctgttggaattccttttgctgtgaagaagctcttcagtttaattaagtcccaaatgtcaattttatttttgttgcgtttgcctttgatgtcttactataagttttttttgtctaggccagtgtccagaagagtttttcctagtttttttcctaggatttttatagtttgaagtctgacatggaagtctttagttcatcttgcgtgaattttgttatataataaaaggtaggggttcagtttcattcttctgcatatggctaggcagtttttccagcaccctttattgaacagggtgtcctttccctgttgtttatttttgttgactttgtggaagatcagttggttataagtatgtggctttatttcagaggtctctagtcttttccattggtctttgtgtctatttttgtaccagcaccatgatgtttcggttcctatagccttgtagtatagtttgaagtcaggtaatgtgatgcctctggcattgttctctttgcttaggtttgctttggctatttcttttggttccatatgaatttgagaatggattttttggattctgtgaaaaatgacagtactttgatagaattgcattgaatgtgtagattgctttgggagaggactctattatctaacatgctaacaaatctaaaatttttctttcgatattttatttaaaaatctgatagttatttaattccaagttagaagtctataagtcttgcatgacagtatgaatcctataatatgtaagggtgtagggagtgggaggttaattagaaaactactgctatcatatgtggcaacttaaagctacagtttaatggaaaaatatataatatttctactttttataagcaatgtggtggcctacacagctgacatacaaagtttagatttgataacagacagattgcttactaggattgtagcagaaattaatctttttagaagcatagaaccttttatagtctgtatagaaatagaaatgctataaaagtacatggataaatgtatttatgttgaggtactttttttttctttatgggttattttaaaagaaatgcatagaagagaaaataaaaataattagtttgatgagaaggaagtcctgatcaatctagaaagcctgaagtaggattgaggttctatttctgatttcattaataacgtttgaggactatgacatctgttttctttatttactgattcttaatttacctcatcatttcataaatctttatattagccctgccttttgggagggttctcgttttccttctgtcactttcataaggttgacttttgtatcattccaacattccaagaaccctttcttgagtttaaaaggaaagaagagagaaaacagtacaagagaccaagtgaaacagcatagctgtcctcaaactttaaaagcttttattctcctggtcatagtttttattttcgttaagatgtggtattggtgaaatctgattttaaaggaataaaatactttctcaaatttatctcatttttgtgtttcctttattaaggagcatagctatgactcagcccacatctgtccgcagttttacccttttacaaaattattatatacatatatatatacgtattcatatgtatacatacagtaaaaataaattagttcttcattcttgaaaggatgaagaagatttgagagaaagggaggccacgtttagagataactaggcagggtgtggttgggggcaagagagaatgctaaaggaaaattgaaggcagaaagataaattatagctgtgtgatgaaattcttttatgaactatttggaacttggaatatttatcttatattagtatgcaaaagtatttgtaaggaaaagaatttgtttaaagactagttcggagattggttcattactttccatgttcagggtgtaggtgatgtgttggaaggggggaaagaggcaaatgtcagaggcatcataaagagtgagctgtgtttagtgagtgctggaaacgacttgaaggttagcagtggagtgactcaattcaggggtaaagagattttgagagtacctagctgctgtaaaccatatgccagaggtgttgatcttggcaaatgtgaaaattataaaatatgattatgatttttctaaagaaaggagtaaagatattacaaaggatgcttgaatattttgttgagttcagcaaacattttagagaagattggtaaagaaatggcttgtgaatatttttccaatgactacatattacttgtataaaacttttaaaagtgctccccctcccaccttaagtaaacattgccctgattatccgtagcactgccttggatttgcctcagaagtggccataagtatcttctcagccactgagtagtttggtatcttctcagccactgagtagtttggtatcttctcagccactgagtagtttggtttcagggagggcaatattaacacagtggctccgtcttggggggaactatatttaattcttaatattttaagtattttaaggtaacatgaaaataataaaggaaaataatgaaagtattaataatgaaagtattgtaggcatagagatgtttttcttatagctttagttatctgagattttaatttttttgttaatttctaggtagtttctcatttaatttttaactttttctttgattcagagattatgtagaaaagatacattataatgcagagaaaatttaggggagcaggaagatgtgtagtgggaagtcattttgatctcgatattagagaaagctgtccatacttctctatattttaaaaatgttttgatgttttctgtgtggccaagtacatcattgagttctggaaattgtgaatataagagaagcatatatattttcttctgtagagtgtaaaatctgcatttttctgacacatacatggacatgtatgtgtgtatatatgtatgtattagaaaacatgcgtgtatgtgggtgtaattcccataaattgaatttggttgtattattgaaatattttgtatcctttattctgtttgatctacatagtctgacaaatttaaaaagtttattaaagcatccctactgtggctgtggttttatcaattttttctcatttttaaagtctcttacttgttttggtaatatttgccttgcagcagtgttttctggttttatgtatttcataactatgttgtttgcacagatatttatgacttatgttcttttcggattgaatctttttatgttataaagtattcatctctatcccatgtaaggcttttagccttatattcactttatctaatttttttttcttatgcttgttagtaactgtgaagggtctgagattatagccacttgccagccagcaagttagcctggctacatttttttggattcctacagaatatatgagactccttaatcaaaatcacagaactttattactcatagcaatagccagaatattagcatttttttgtatcagttccttaaggcccaagagggccaggtgacatctccatactcagtgagttgcattgtggaagagggaacccctgagatttgggaaactagatcttttatcttgggaagtaggcatgtctgttcttttctctggagttgacattgtctctgttttccagggctattcgttcgtacaaacatgtttgaaaatatagtctaaaacctgcagaaacatgagacacccatggagaattgtcttccccaatttttttatttgcatttgcttgctatctttgcttctttattataaataaattaataaaataattaattttctctattttaaattaatttaaattttatttttgaacaggtaatatgtttgcatggttcctatgcaaagagatacaaagtatgcccagtgaaaactctccctctcacctgaatcaccttaacagagaggtagccagtactaccagtttcttgtgatcttccagagatatttaatgtatatgcaaagatacatatattcttcccacagtacactttacactgtgataccctgctgtacacaattctgaacatttgtaatatgtgctagcggttattccagacgaccttcatcattctttacaattgccttatatttcataggtggataaactgcaatatattaaccagtcttgtgtccatagatggatatttaaactgttcctggtattttgtgtgtgtatgagtatgtctgtggattgtaatccttgaagccttccttattaatcagggattatgtacatttctatttttggtaattatttgccagattcctgtccaaagatgctgtgcccattttttttttttttaatttaagttctgggatacatgtgcagaacacacaggtttgttacataggtatacatgtgccatgatggtttgctgcacccatcaacccttcatctatagtaggtgtatctcctaatgctgtccctcccctagcccccccccaccccccaacaggccccagtgtgtgatattcccctccctgtgtccatgtgttctcattgttcaactcccacttatgagtgagaacatgtggtgtttggttttctgttcctgtgttagtttgctgagaatgatggtttccagcttcatccatgtccctgcaaaggacatgaagtcatccttttttatggctccatagtattccatgggtgtatatgtgccacattttctttatccagtctttcattgatggcatttgggttggttccaagtctttgctattgtgaacagtgctgcaataaacatacctgtgaatgtgtctttatagtagaatgatttatactcctttgggtatataccaagtaatgggattgctgtgtcaaatggtatttctggttctagatccttgaggaatcgccacactgtcttccacagtggttgaactaatttacactcccaccaacagtgcaaaagtgttcccatttctccacatcctctccagtattgtttcttgacattttaatgatcgccattctaactgacatgagattgtatttcactgtggttttgatttgcatttctcttatgaccagtgatgatgagctttctttcatatgtttcttggccacataaatgtctttttttgagaagtgtctgttcatatcctttgccctctttttgatggggttgcttgtttttttcttgtaaatttaagttgtttatagatctggatattggccctttgtcagatggatagactgcaaaaattttctcccattctataggttgcctgttcactctgatgatagtttcttttgctgtgcagaagctctttagtttaattagatcccatttgtcaattttggcttttgttgccgttgcttttggtgttttagtcatgaagtttttgcccatgccgatgttctgaatggtattgcctagattttcttctagggtttttatggttttaggtcttacgtttaagtctttaatccatcttgagttaatttttatataaggtgtaaggaaggggtccagtttcacttttctgcatatggctagccagttttcccagcatcattaaatagggaatcctttccccattgcttgtttttgtcaggtttgtcaaagatcagatggttgtagatgtgtggtgttatttctgaggcctttgttctgttccattgctctatatatctgttttggtaccagtactatgctgctttggttactgtagcctcatagtacagtttgaagtcaggtagtgtgatgcctccagctttgttgtttttgcttacgattgtcttggctctatgggctcttttttggttccctatgaaatttaaaatagttttgtctaattctgtgaagaaagtcattggtagcttaatggggatagcattgactctataaattactttgggtagtatgaccattttcacaatattgattcttcctaccattgagcatggaatgtttttccatttgtttgtgtcctctcttatgtccttgagcagtgtttgtagttcttgaagaggtccttcacatctcttgtaagttgtattcctaggtattttattctctttgtagcaattctgaatgggagttaattcatgatttggctgttattgttgtataggaaagcttgtgatttttgcacattgattttgtatcctgagactttgctgaagttgcttatcagcttaaggagattttgggctgagacgatggggtttctaaatatacaatcatgtcatctgcaagcagagacaatttgacttcctctctccctgtttgaataccctttatttctttctcttgcctgattgccttggccagaacttccaatactatgttgaataggagtggtgagagagagcatccttgtcttgtgccggttttcaaagggaatgcttccagcttttgccaattcattatgatattagctgtgggtttgtcataaatagttattattttgagatacatttcatcaatacctagtttattgagagtttttagcatgaaggggtgttgaattttatcaaagccctttctgcatctgttgagataatcatgtggtttttgtcattggttctgttgatgtgtacatttattgatttgtgtatgttgaaccagccttgcatcccagggatgaagccaacttgatggtagtggataagctttttgatgtgctgctggattcagttttccagtattttattgaggattttcgcatcgatgttcatcagggatattggcctgaaattttcttttttttttgttgtgtctctgccaggttttggtatcaggatgatgctggcctcataaattgagttagggaggagtctctctttttctattgtttggaatagtttcagaaggaatggtaccagctcctctttgtacctccggtagagtttggctgtaaatccttctggtcctgggctttttttggttgataggctattaattactgcctcaatttcagaacttgttatggtctattcagggattctgcttcttcctggtttagttttgggaaggtatctgtgtccaggaatttatccatttcttctagattttctagtttatttgcatagaagtttttatagtattctctgatggtagtctgtatttctgcgggatcagtggtgatatcccctttgtcattttttattgtgtcaatttgattattctctcttctttgtctggctaggggtctacctattttgttaatcttttcaaaataacagctcttggattcattgattttttttggaagcgttttttgtgtctcttatctccttcagttctgctctgagtttatttatttattgtcttctgctagcttttgaatttgtttgctcttgtttctctagttcttttaattttgatgttagggtgtcgattttagatctttcccgctttctcctgtgggcattttagtgctataaatttccctctaaacactgctttggctgggtcccagagattccagtacgttgtgtttttgttctcatttatttcaaagaacttatttatttctgccttaattttgttatttacccagtagtcattgaggagcaggttgttcagtttccatgtagttgtgcttaatcctgagttctaatttgattgccctgtggtctgagaaactgtttgttatgatttccattcttttgcatttgctgaggagtgttttacttccaattatgtggtcaattttagaatagatgcgatgtggtgctaagaagaatatatattctgttgatttggggtggagaattctgtggatgtctcttacgtcagcttggtccagagctgagttcaagtcctgaatatccttgttaattttctatctcgttgatctgtataatactgacagtggggtgttaaaatctcccactattattgtgtgggagtctaagtctctgtaggtctctaagaacttactttatgaaaatctgggtgctcctgtattgggtgcatatatatttaggatagttagctcttcttgttgcatcaatccgcttaccattatgtaatgcgcttctttgtcttttttgatctttgttggtttaaagtctgttttatcagagacaaggatttcaacccctgctttttttttttttttgctttccatttgcttggtaaatattcctccatttctttattttgagcctatgtgtgtctttgcatgtgagatagatctcctgaatacagtacactgatgggtcttgactctttatccaatttgccagtctgtgtcttttaattggggcatttagcccatttacatttaaaattaatattgttatgcgtgagtttgatcctgtcgttatgatgctagctggttattttccctgttagttgatgcaatttcttcatagtgttgatggtgattacagtttgttatgtttttgtagtggctggtactggtttttcctttccatatttagtgcttccttcaggagctcttgtaagacaggcgtggtgatgacagaatctctcagcatttgcttgtctgtaaaggatattatttctccttcatttgtgaagcgtagcttgactggatacgaaattctgggttgaaattctttaagaatgttgaatattggcccccactgtcttctggcttgtagggtttctgcagagagatccattgttagtctatcatttttctgttttctaattcattaatttagacttttgtttatattatttattgtgctttccttaggtatgcgttttctgagtttattgtgttgggggtattaatttttctttcttgtttttcagcagaagtatacaagcctatgaatttttctctgaagatgttttagctctgtttcaaaggttccgataagtagtggttttttttagatgaggtactttgtattttgggggtgtcttttttaactcaaaagttatttgagagtatctttatccaagtgtagaggacttttttccccctggttttgctatttgtttcctagttttgccgcattgtgatcagaggatgttgtctgtactagttttatattttcaaaatttattactgttttctttgtggtttaatgtaaggtcacttttggcgaatgtttcctattcatgtgtaatttaaaaggtcctttgggaggacaaagcaggaggatcacttgagaccccaggagttcaagacccgaccagcctgggcaacatagtgagaccgtatctctatttaaaaaataggaaagtcaaccaagcgtggtggtgcatgccaatagtcgcagctactggggaggctgaggtgggaggatcacttgagcccaggaattggaggctgcagtgagctataatcgcaccactacacctcagcctggatgacagagcaagactgtctctgaaaaaacaaaaagacatagataaaatttaatgctactgcacttcatcctagatgacagagaccctgtttcaaaaaaaggtctttaatattcatctttttttaaattcacttgatcgtcatggactaaggtgaattaaggtgtgctactactcatgtttctgtttttctctatattgcatattttttttcctttacaaatgttgctgctgttatatgggtataaacataactattataacttgggtgcaaattgcattttttaatattataaaagctcctctgtctcctttaatgtttatgccttatgttcaaccttgtcaatagtaagattgtaattcattctttcttttagtttgtatttgcctgataagttttttttttcattttcatttcctgaatattttttgtttcttatatgctttttgtatacacagtacagggttagattttgtttgcaatccaatctaatctttgttttttgtttgtttgtttttgttggtttagcccatttatatttcttaatatggtcagtgctaattctgtcattatactttctggtttcatgactttttaaaaatgtttcactgggtggccagcttttttttttttttttttttttttaatagaccgagtcttgctctgtcactcaggctggagtgcagtggcgcgatctcggctcactgcaacctctgcctcccaggttcaagcgattcccctgcctcagcctcccgaatagctgggattacaggcgcctgccatcatacacccagctaatttttgtatttttagtagagacggggtttcagcatgttggcgaggctggtctcgaactcctgacctcaggtgatctgcctgccttggcctcccagagtgctgggattacaggcgtgagccactgcgcccggccccagctcttgtttctttttttttttttaattagaaataactgtgttgtttcttttgattagaaataactgtggtgtttctaattgtatttcttataactgtatttctgtgtttagtgattacttttataattttatagaatacctcttatttttagatactgtttttttctatgagcaataatgaaattagtgtatttcctatttttctccttccttcccgtgttctaattttagttgttacattacctaatgtttgcttttatactattaagttttttttgtacttctctttgctttgttagctttaaataatactttttgacacctagttatttatatcatcttccccccatccatcctcacctcttttaatttttgctaggtagatactttatacattatctaatcaatgttcccacttttgttttaatcttaccattacgtagattcagctgccactgctaatccttttgctttagttttttcagatgtctcttggctagctgaagttcatcctcatagaaatcctttcacatgggctcatgggaaataattacctagatttcttgcatgtttaacacagactgcttatctatgtgtctttttgttttttgaataacagtttaactgggtatgaaatctttgggttataccttctctacttgaggacattttaagcattcttctggtcttacaagtataataatgtgtttctgtggagaagtctgaaaccacctgatttgtcctccttttaaaattgacttagtctttttgccagaatgcccaaagaactcttttttatgaccggtatcaactagggttgaaattgtgttgattttttctgggtcagtttttaggacttggtgtgccctttcaatatgtagatctagatctacttttatttctgtaatgttttcttgaatattatttttgactacagataggcattactgcatttccttttctcgttctctgtagagaacatttttttccctctaattcttaactcttcattttctatttatttttctcatttctaccccttgatgttcctgtgatttcttctagtgcttcttctagttttaccttcatttttgtaatagcttttttttccccttcccttcaggtttcatcctcatttgtgatctcatccttgtatgtgcttttggacagttgcttccttattttctttagtattcatggtaaatatgttgatttattgaggctagatagtggatatatagtgttctgttataccattcagaacctacacatttgtattttaactagtaaatttggtggtggtccttctcttttttttttaaattatttattatttactttgttcttcctagccttttctggatcaagttgctttcctttcctccagattaatttagaacttctattatgcacctttttgttcttttagtggttaccttactttagtgtatatcattaaacatggttattttattctgtcagaatgagggattgtctctgagttcttcccctgatacacttgttcacttcccccaccctccactgcctctctcttcaagtcctagttattaggagataatttagacttcacattaagtttttactggcagaatattgcttttgtttcaaaaacccatagttgcgttacagttccagatacagcattatctatttagatttaatttcgcttatacatgttttcttgctctctgctgttgtttacactctttatttttctgttactgagatcttcattcttactataatttttgtttgttaggagctcttccatgagtaattttcgttggacagtcttaatgggtagtatagtttctgagctattagacgcccaaaatattttttcatttgcctttacatatgaatgctatcttgggtgtatataggatttttaatttcagtgtttttttttttctgttaagtctgatttttttttttttttttttttttttttttttttgtgcgtgtggtggcattttgctcttgttgcccaggctgcaatgcagtggcacgatcttggctcactgcaacgtctgcctcctaggttcaagcaattctcctgcctcagcctcctgagtagctaggattacaagtgcctgccaccacgcctggctaatttttgtatttttagtagagacagcatttcaccatgttggccaggctgttttccaactcctcaggtgatccgcctgcctcggtctcccaaagtgctaggattataggcatgagccactgtgcctggccaaagttattctactttttaacttgcagtattgtagataagaagtctggctttgtctcactatttttttttaattttaataacctagtctttccatttggaagcttacaacataatttctatttttgaaagccagaatttttttgttttttcaccgtactcccatctctaattaatcctgcatctatttaagtgttttttcactctattcctatctctaattcatcctgcttgagacttcatgagccctttcagtctaaaatcaagtcttatttagcctagggattactttcttctagtatttctttgattgttttttgtttgttccttttattcttcctgtgacttctgtaattttaatattagagtttttagatttgtcttcttacagttttattaatgatttttggtttctttggagttacttacatgatatttattctagactactaatttgttattttcagtgactttttcactgcctctgaaatattaaattgaaaaattacgggttttttcattctaggaatttttactggtaaagttgtcatcattgttgcctccttccttcctgtcttccctcatttattctgtccctatagtaggtgcctatttaaattttttggtgtgattccccctcatccattcctgcatatacttacatagttaatgatctttctcagttatataatgttacgagttacagaatctctcattacctatgtcggtcatactgttatcttttttctcaaatagaaaaaaatagaatgaaagttatttctcttttgtgagcctgttggtcagtagcctgtcacacgaagaatttttgtttgaatttggaaattgttccttggagcagggagagttttcattttcatcccaactctggcttctttctggtgctttcagtgtcagtgagagcagccttcctccctgctctgttagattcacttaggtactgctgactgcttgggcagtttaaggattagaggacattgaccaagtccagtgaaaagaaataaaccttttcccaaatcaatgtgtttttcaccctttccttagaacaattaaaaagaaaaaaaaatccatggtggtacatgcttgtagtctcatctactctggaggctgaggcaggagaatcgcttgagcccaggaggcagaggctgcagtgagctgagattgtaccactgcactccagcccaagtaacagagcaagactctgtctcaaaaaaaataaaataaaacaaaataacttcacacttgctgtttcttgattttcacatggttggttacattacctgaggtttcagatgaatctagatttatattctccaggatccagcaattagtcacagttattttagtagtttaggagcaaggtaaaggggatcaagaaagatttctcagttgttcatgttgcataagttctaatttagccagagctgctggttcttagatacttgatttttctaaatatgttagaattttatgttttgccttaatatctcaggaatggacattttaaatatttttcctgttcatacatacttttaatacttcacccacatatactaataaacatgcaagcatttattggtaaacttggcacatttatatattcagtactttttggttgagtggctgacacgcacttcctgtataaagaagtcaatacacttaaaaatgttaaaaaaaaaaaaaaaaaaaagatctgacttcagctgagtcaccaaaaccacaagcagtcaaagtgctcaagtcagtggcaacaacaacccattgctttggggcattttctctgttcattggctcttcacttgttgcttggtgttttccttagtcttctgagatcggttgcttcattagttgttcaaaaaatatttattgagcacttagaatgtgcaaaacactatgctgcatgctgggataagctaaatctacaaggtcccctgccctcatagaatttaccctgtttctttaatacagaggtggcaaaggattggccacatctgactcacagccatgttttattttgcttacacagcatcagaaatgttttttgagcattcacaaatgagaatattcatctgaatacctatatttccacctgctttaatatacatctggccaccctgggcctttattttcccatggcattctactcgtaaaagcagctgcccctttttgataggactacatgtaccggtttgcttccattctctaaaaatccctgaaaccaagaccaaattcaacaggcatttattgttacaattgtactattcttttttcttataaaatagttaagatgagctgcatctttaggcatctgagtttgtgacccatgcatactgattatagtcagcctgctaattatctcatagcctctagaagaagcagaagagaaaaagccttacttacatacttcactttcaacaaaaacagtagtagatatgcacattgtaatactactcctcaaattcattctaacaaaatgatatcgaatccagatttataaatgtaatgatagttctgatgtaacatttgatatttattgttgtatgttgtcatagctgtgtgaattggcattttccagcttatttcaatattgctgtagtaaaattttgtttacaatcagctaacatttagtgccttttacacattttcacattcattagatttatttttaatcatccgtattaaagaccatgtgagatgtaggtattatcacttgcaatttattttatgaaaatgaggctcaaagaggtttgtgacttgtccaaagctcaagcctgttctttttccatgagactgccttcatttgcattatctcctaagatcttcacaaggatcctaagagacaggtcaagcaggttttatcattattaccacttaagattgcagaaaacaaactcagactcccttcttgcgaataatcacgtagctagtgttcagaacatacctgctctgttccaggtatctcactaggcatttgagaggtattatttatttctaccactaccctgtgaggtaggtactgttatcctgttatattccataataaattggaagagttggagtttgaaactaaactgtaaattaaaaaaaaaaaaattgctacgtattacccagattgctggactcttttattgccactatgagcctacatacattaaaatttaaacatttgtctaattttaaaagtatacagtaataagcttgaaaatcagataaagatattagctttgttgtgttttcaggactggtgcttttctctcctagtgattgaatagaaatgaacctgaaattttacttcaaagtatactttattctattttggtctgtattcaatagttccattttttttcttgttcatgtagacaactcatttaggaaaatatttgtttaggttttaacaaatcagtgtaattgattttaagttttagtttattgttgatttgtgacaatgagagggcataggaaaattatcttagtttgatttcatggttgggaaataacttggtaatctaataatttcctagacaacttgtgtgactacttgtggcttgttaggtaaatactcaatacttataaaatacttaatcctgagttagctttttaaggtaagttaggagcaaaaaggcccaagaaagctatgtctaggtgtggaattagtgctccttttgtatattgtagcttttagagtttgtgatttgtgttccattttattttagttacattttcttggcgaattcaccgaatttcgatttccagaatattcccaagagtataaactttttttaaaaagtcatcatcaaaagagtaacaaattttatttcctcctaaagaatagtcttaattttgcattaagtttctaacagtgcagatgaagagtagctacatgtttaacgatcaattcttagttacatttaaactagagaggcattgaaaaagtaattttcagtggcatctaggcagagaagcccagattaataaacgttattcccatatttttactgatatatttatcttacagtgaaaatggcaacttccctttgttaaatatcatttctaagcctatttatatttgagtacagtaatagctcatggatctgtaattgaaagaattagttaatgttacgttcttttatacgtataagagataacttaatatctgaaagtatttattattaaaacttgtgagccccaactttttgttctttgagtaattgcttttcactaatgttgtaaatttttttaattcttgatttttctagggattatttcacatttcagctgcttttgttttctactgctatcattgagggttcaagaacaaaaaataagtcttcaggtaaaatgcctgatccataatagcgcttggcgttgtattttgctgaaaagatcatatacctgtttggatgcttgatctgaaaataaagttgtgatgattatgaaattttcgcatgaagtttccttggctgcctaacaaattcagtcttatttgttggtttggttttttgtttttttttttaaagaattttggctgtttgcttttttttttttccatgtcgtcttgatctgcaataactatatggatatgtgcttggacctgctaagtattttaattttgcatatttggctgcttgaattttaagtaatttctttggacaatgcaaattttaagagcttgagaagctgtaagtgaaatatcaagtaacagaagtttgtaactagtttataaatgtatattcattacctattatatattttaaggtttcatattttaccaaaattaaattaaaaattcagtttctcagttgcacaggccacatttcaagtgctgttttcaggccatatgtggctagtggttaccattgtggacagcacagataaaagatgttttttcatcaccgtccatagttctattggacagagctgttttaaattgtgtaagcagttaattgtaaggtcgtttcagttattttatccagaagataaagcgtgtgaccagtcttgagagtacttcctctaaatatgtagcttgagtatttaaaacttagttgtttaaaacagtccagttgctttggtatttacgttgctttaaagtgaaattgtttcttgtagcagaattcatgaagtaggaaaaatgccaaggacttagtctaaatttgaatcctgacctcaggacttagtagtttagtaacttctggtaagttactttacttctttgagcctcagtttccttatgtgtaaaatgaaggtaacaatagttacttcataggattaacatgtgacttaaatatgtcaaaagcacattaaaaagtacacgtttttaatccttttaaaatatagaatgaagccaaaacataaattaattagacagtgtcatatgcttggagttgttcccagcctggcagttataataggcgcctaagttcctggtcttcatggagttatttgatgacattgttcaggtttgaaacaagtggaataccaagatggagagaaaaagaaataggaagatgactgactttgtttttggagaggtgcatgaagtactatctgataataactaacattttgtatagtgtttttttataacttataaagttttttcacacaattctttaaaatttcatctctaatattttgagtacttttaacagaagaataaaaggaaacttgaggttgacgaacatttttgttcgtgagaatggaaattcatattaagttttcaactttaaatcttaggctctttctacttaaacaagctattctttgatagcagtcgcatttgtgaggcaggcatatatttcagaatctccaggggtgggactcaggtacatataattttttggtatatgttgaaaatgcacccattgaagtgattctagtgcccacttctggttaaaaatcgtaatcattgctcttttccagtcttttaacttttcttttcctgtaatcagtacatctaaattaatgcatagattacatgaataagacaaggcattaaactgataagcaatgcgctcatttaacttttactactctagatgttgaggtatgagcaataacactttttaaaaagcaacatgtttagttccctgttgacaatctcttgtgtctccattgatcatagcttgtggaggaggaatccagactagccaactatggtagttaaatctgtgagtgttcccttctctgcttctttaatgagttttggctagttagtagtctaccccaagatattccagttctgaagtgttgactccttaatccctgtgggtgttatcttcataaatgttttcaactgatctttagatttttaatcttttcccaactgtcttgaagatgctttagtatcctgggtttagtggtatttccaggtcctgtttttaagtatgaatgtatcacattactaacaagtctttcacaattgtgaaatgtagttacctatgtgaaggcaaaagctcaaaactttcctctgaatgaaagtgtcattataggggtgagagaggggactactctagcaaacccccaggtaggcaaaaattaatcacattccacagtgaattttcaaaactgaaaatatttttaaacatacaaagacacattctagtggaaacaagactttaaaatgtgaaaattaagcatttgctatgtgaagctgtaatcatgaggttttgaagtcagagtgaactatcttctaactcagagttgcttatcaaaatgcaactgatcagtggctacaatatgttaacattagcttttaattttctgagcagagattatgtcactagaagctatttttagtggatattaggctgtttctgcactgaaatcagtgtgttcgggatgtttttgtatacaggtatacttttcttgaacagaaaatacaattctgaagtacagttctgattattttttattgctagggtttaagggagcttattttttaaatgactttaacccagcattctgaattacactaaaaagattgtttaaacttagtacctgcaaagcatctgagggataagtctcgcccctgtcaattttaaaatagcattgtgttcttaaaatatgtatcattctgttaattataggcaggttggatttgtctttgttgtactataaattttcttataaataggataaaatgtagaccttttaaaatattctcatctcaaagactttgaagagctctgaaaatgagatgcgtctaaaatcgatgttgcatcatagtttggtggaagcattttttttttacttggtggtatataaagctaatggtgcatattatgaccattgatgttttaggtttgataaaaagtggtggttaactttttgaaggtggttgtgaaacttacactcacataattctttgataagaatggtatacctttgtgatgaaaaaatacgtaagtggtgagaatataccatattacttggaattatagacctttaccaggtttttttagtgtctcctttagatcctttttctttttgttctcactgctatcagttagatgcttcacgttaaacttgttccctatctgaatctcctattgaaagatactagaacaataagagaaaaatggagatcaagagaatgagaaaaggcatggggtgcaggatggggtaggagtagtgggtaggatctctagggccaagagaaaaaaaaatggggaaagggagggcacttcagggaagtggtaataacattttccgtttatccagctttgcttgtccagaaatctttacctgcttaagtttctgactgtaatatattagcttgtgagctgcccagtagttagctcaaatcactcctaacgtattcagtccattcagctgatataaacccttcttgctgaggcctttgcttattctgcagaaggtgccctgttacctcctccagcattctgagtaaatcatctcctggtatcttctcttatgtagaccaaatagagtctgtgttccttcttaatgtgcagtctcaaatgaataattaaagggaagaaccacttcttatagaatgaatttttctgcagggtactcttacagataatgtacacaatcaaatttgttggttggtttttataggaggaatgggcatatcaaacaaatacttaactttagaaaatgtccctgcctttctgtttctttcagaatttacgtagagattgatgcagtctttaccgtttagcatatttgattttttattttgaaaagcagtaatttgtttatttataatataaattcatattgcatgttcctgctttagctttccattctgtaaacgaagaacatatactctggagcagtttgtccatgttcttcagtaatggcatgttttattctgcatttaaaaaacagtcacaaagtaaatctggcttacatactctattttaagcaaactgcttttaaaaattaaaatttagcattagaatataatttaaattttcagtataaaacatggattgagagaaccttaacattttttcaaaaggaacatttgcattataaagagatttacccttgaagattttaagcacaccatagagttttttgtttgtttgtttttaaataccctgcagatccttttggaagccactctaattaatgcctggagtaggcttgccattgtcatggaaaaagattatgaagaattgctgcatccagttctgaaatcctcagatttccaaaagtctctttcagaatctatacaaaagttttgatattcctttgcattttcttgagttaagcaactttttaaaagtcccacatttggggtgatttcttgaacttacccaattttattattttataatttttaaaattataattttattttcatgtctttttagccacattacactgtaaaattctttgaactatcttggtcacactaaaggaaaataaattcatggtacaaataactagcttattgataaagttatagagcaaaatctgcccaatttgggtgattctgtactgtttttgcttactgtaatgcttcaataaaatagaaatgaaaacgtgagacaatggaagtaaaggtaaacattattcagtcatttatgaatagtatttcaaatacacgtgctgagttttatgtatttctggcgaaaagatatgccaagtaaggtggaatcacaactttttatcagttagcattcacgtaattcttttttcaatttgatggataattttattgtcctgaattcattttctctttcttcagaggatgtactgagtaaagatgctggggaatgtgcaatatgccttgaagaattgcagcagggagatactatagcacgactgccttgtctatgcatatatcataaagggtaagttcaccaagttggtattagagtaaaagattgttctcacagtttcagacattgtaattagggctgaaaaggaatcttcgttgaaaccaccccctccctgtctcacacacacttcttaaaacttaatgatcttttttctctatttgaactaagacttgaacccacatctgtttgtatccaaaaggctactatttttaaagcatttgctatgacccagctgttgtccatagcttcttgaataaattatctcatgtaagccttgtaaccattgcattttacaattgagaaaataagctaagggacagtatggaattgccccaaggttacaaggctagtaaatggcagagttgagattccagtagatttggaatctgcttgactccaaaacctgtctgctttctcatatggtcttcttgcttttagagtgatacaggaaaaatttggggttaaaaaaaaaaaagtttaaggtaaccacaaaaagaaaactataactttcaacctgatgaaaatacagtacttaagttaagatgaggtgggggaaaacttagagaaaacagaggaaataaaacaaaatatggatacaaaaatatatccaaatatatcagttataataaatacacatagaacaaacccactggttgaaaaacagattgaaaggttgggataggtagttgataaacaacacatttgaacataagtatacataacatttgaaagtaaaaggatagaaaactatatccaggcaaatattaactaaaagaaactacaaagctaaactagtattagacaaagcaaactttacagcaaaaagcattattagggatagaattcctatagaatgacaaaaagtatataacattgtatttttttttttttttttttttttgagacggagtctcgctctgttgcccaggctggagggcagtgacgtgatctcggctcactgcaagctccgcctcctgggttcacgccattctcctgcctcagcctcccgagtagctgggactacaggcgcctgccaccatgcccggctaattttttatatttttagtagaaacggggtttcaccgtgttagccaggatggtcttgatctcctgaccgcatgatgtgcccgccttggcctcccaaagtgctgggaataacattctatttttatgtatctaataacatctcaaaatatttataaaaccctcagacgaaactgacaaatttatcatcataatggaacatttcactacgcctttcattgagtcaagccacatacacaaaaaatgaatcaagacctagaaaaatagagcaatgcagttaagtttgatctaactgatgtgtatatgtatttgtatctgtgcccatcaattgattagagaatacatatttttcaaccacacatgaagtattatagaaattgatcatgtcctagaacataaagcaaatcgcagcaaagtacaaagaattggtaccatataggatgctgtacactgactactattagatgtcactaataaaaagataaataaccctcatacatacttttgagtaacttgtggatcaaagaaaaaatcatcatggaatgaaggaaatactcagaactgaataacagtgatgtttttggcaagtacctagagtgatcctcacaaggttcatgttacagtagaaagaaaggctgaaaacccaataagccaagtttcttacttaagaaatcagaaaagtaacaggagaataaacacaaagaaaatagaaaaaaatagtgaagatcagagaagaaaataaattttaaaatgacacactagagacccacagaccaccagttggttcagaacaggattgttctgaaaaaatgaggaatgtgaattcagacacagaagaaattaaaaataatgagaaaaaacaggcctatagagacaatgtaacaatgagttctaccagatatccaaagaacaccatgctaacaaccttagattcttccaagaagtagaaaaagatggaaggttctcccatttattttatgagaaaagtataaacttgatacaaactcagataaggacagtacaggaaagaaaattagaaaacagtctcatgaacatagatataacagtccaaaaacatatcaacaaacccaactcaacaataagtatctaacaatatatatctaaaataatgcctcatgaccaagttgcatttatgctagggaatgcaaagaaactgtaagacagaaaatgtatagatgtaatttactacattaacaaaggaaagaaacattaactcaataaatgtgagaaagctttcagtaaaattctatccttgcatattaatgatttaaaaataaaagctaacaataaatattggataaattattaaaatttgtgagagttcagcagggttgccagatatgagatcaacctatggaaataagttgcattcatattgcaacaagaaaaaaggaaatatctcttaaactataacattaatgtcaacagagactaaaaggactataaggcttataaggattaaattttataaaagatatgtaagactttagataaaatttgaaaactttattgaaagatataggtaatctgaaattaatctggacatctaccatattgtggatagaaagactcagtgtcataatgatgtcattttacctcagattgatctatatagttaatactaccttagtcaaatctcaactggttagttcatgtaacttgacaagttgctgccaaaactgcatgggaaccaatgagtgaagggccaagaacagttaagacactcatgaagaagaacaccatgttggtgggacttgtcctgtacagatttattataagaccatattaattaagacagtatggaaatggcacaggtgagccagtggaacggaatggagtccataaacacttgtgcctatctggagagacagcatagcatgagagttaagagcatggactttgaagtcaagacactcagcatttgaatcccagctcctccactgattctctgtgtgatcttggtcaagttgtttttttctctcaagttagtttttttctctctcgattcataagatgaagacaatagaaacaacttcatagagtataagggtataaacaagtgctggcacatacataatagatgctatataaatgttgaataaatgaaaaaaattgatttgccagagacgaaattacagtataggagagaaagaatgaactattcaataaatggtgctgggatcaattggttattgatatggaaaaacagttgagtccttatcttgcatttgaaataaaagtcaattccaggttgactaaatacctgcctctggaaccaaaatctaaagtggtgaggaaagaaaatcgtggaaatgtttttgacttcttggtagagaattattttttgtctgggatacacttctccccaaaaaataatttcaagattgataaatttggctatattaaaatttaaaacttatttgtatcatgacccagcaaaaaagtaaaaaactagactttatactaggattgtttttcaacacacataataaaagaggtttggtattggaaatagcgttctccctctatgactttctgtaatgcagtgaactcattgcatttggtaaatgggagagtgaagacaatataataacaggatcttactggttctacataagattttccagcacattaatgttctgcttcatcagataacagcagatgaaagtatatgctaacaacgagctatataagaatacagtatacccatctccccatgttcttactcttagtttaattagaccatgggctttgctgtggagtcctaatatttcacagttctcacaatttgtgcattagcttttttcttcataactcagcagtctcaatcctaccttaatcctctttctgtaaggctaacttcaccattttaaaaaaacgtatttacagtcgtgttctatttattaggaatgagcatgtctttgttctggtgataaaactgtgttatttgagtagtctgcctttaacctgacttttcccacaagccctgttactttagcttaaagttttgtggaaagcagtgtttatcaaaagcctgtatattataactgaaatacctggataatagtttcctagaaaactatcagttaattcagaaaaaaggaccctcaattggccaataaataatacaaataggcatatttggtagataaccctgtaatagctgtgtggagtacatattctacaactcagtaattccacctctacatatatgccctagagaaactcttgatcttttgctctaagacagtgctactattcaaagtacaagtccagaaggcaataaagagtttctgccagttaaatcaacactatgcttctttcattgagaaagccttgctgtgattttttaaagtcatttgaaacagtgtgattagtgaggaaattaacttgtatttgggcgcaaactccttatctcaaagaatgttcatagcatcattgaaaatgtccatcagtgaaagaatgtatatgtaaattgtttatatttatataatggaatgttgtacacaatgaaaatgtaaaaacaggccaggcgcagtggctgacacctataatcccaacactttgggaggctgaggtgggtggatcacctgagttcaagaccagcctgaccaacatggtgaaaccttgtctctactggaaaaaaaaaaaaattagctgggtttgtggcaggtggcgcctgtaatcccagctacccaggaggctgaggcaggagaattgcttgaacccgggaggcggcagagtttgcagtgaattgagatgttgccactgcacttcaggctgggcgacagagcaagactccgtctcaaaaaacaaaaagcgaaaatgtaaaagcaagagacttactaacaattgcaaatctcaaattgagcaaaaaaagcaagttacaaaaagcataatgctgttttatggtagcatttatataaaattttaaacatggaagcagtactatatgttgttttagaatatacacatatatagttatatagagtaagaagatgcctagaaatgaaaaataccaaattgagaatagtgctttcctgctaggtctgagagaagggaatataatcatgtaaataacaaatgaatatagcctagaatggaacatatgtagattgacagacgtttatgtgaagaggacctggagttttaaatgattactttctcatgatgagccagagttacctggttgtaaaataaggagtactcatgttagctcgcaaatagatactattcagatatattatgaattaacacatctggagtattttatttgatgctcagaattttgttttaagaggttttctggtagacacagtggaacttccagggccaagtggtagagagcaggctgaaaacaatgtcttaagccaaactggctatatatttcgagaacaaaagtcttaatggcagctgaaattcagatatttgaaagaacctgttgatgtggtactctaccttttttctttttagtttcatcttatcacttttacctaccaaaccaacctatctggacatgaggatgataaatgttaattttgcccttcagtatattaaccaagtcttgtagctttgcggcatatgcaaatttgaaatatgtcaccaatgaaaatgttgaacaggttgaatcctgcttggataacttgctagctgttaggcaagtaatagctagttagtagaccttgattttttcacctatcatggtactgtgaaatagaactttctaccataatggaaatgttctatatctatgctgtcccctagagtagtcgtgagccatgttgctgttgagtgcttgaaatgtggctagtgtgactgaggaactggatttttttattttatttcaataaatcttaaataaccagtgtgtggctcttgtctactctgttggacagtgcagatccacaatgacgatgatcatatgcaccctaatatttagcttctaataaaataagatcataaaatacttcctaaatacaaatgattaatgtatatttatttgtgtatgtatatgtattacatggtgggataggatttaaatattcaataatcacatataaatatagctttaaaaatgaaatattggcaaggattaaaatttaaaagccgttttttaatacatttataggtgacatgaacaggttgataatgtgcataaatgaataactgttttgaaaagaaaaattatgcaaatttgttattcagttttgaatattggtaaagtggtagttcagattatcttttggaagtagttctgtttgaactttaaagtactttatagcataattttgcaaaggtttttttcttaatcgcttagaatcaaaatataataaacattcttatctgttgcttatgtatgccaaatataatttaaaatgctcatttttttctgtaaaaaatatattaaagtcaagtatttttactgtggctctcattatataaataattagtataagtatctcaatttttctggttttgttcctttctagctgcatagatgaatggtttgaagtaaatagatcttgccctgagcacccttcagattaagcgtcagcttcctgttttataggtaattttttttgtaattactttttaaagcgttagcccaaattatacattctaaactataatttttatttattcatttactcattgaggtgcatgagtgtgtatgtgtatgtttcagacacttaggctactgcatagaaaacttacattaaaaatattgtataattctaattgttggctgggtatgctggctcgcgcctgtaatcccagcactttgggaggcctcaggcaggtggatcacttgaggccaaaagttcaagaccagcctggccaacatggtgaaactctgtctctactaaaaatacaaaaattagccaggcttggtggtgcacacctgtaatccgagctactcgggaggctgaggtacaagaatcacttgaggctgggcatggtggctcacacctgtaatcccagcactttgggaagccgaggcgggcgggtcacgaggtcaggagattgagaccatccctggctaacacggtgaaaccccgtctctactgaaaatacaaaaaaaaattagccaggcctggtggcgggtgcctgtagtcccagctgcttgggaggctgaggcaggagaatggtgtgaacccaggaggtggagttggcggtgagctgagatcgtgccactgcactctagcctgggcgacagagcgagtctccttctcaaaaaaaacaaaaaacaaaagagaatcacttgaacccaggaagtggaggttgcagtgagccgagatcatgccactgcactccagcctgggtgacagagcaagactgtctcaaaaacaaccaaaccaaaaaataataattctaatcatttagtattatcatgtgccaggtgttgttgtaagcattttacatctattagtaacttgtctaattgttacaataaccgttttgagctcagtaccattactgttcctattacgcagatgaagaaattaagtatagagaggttaagaaacttgacttttcaagttcagataactagtttgttggtggggatgaaatttgaacccaggtattctggttccaaagactgttcttagcaattttgctctttttaggtaggaacattttcttcaaacagtcgcatcataaatttattcattcaatttaatcattcacttttatatctttagcatgtaatacagtgcctgtctatatagtaggcaaaaaataaagttgcattttacgactgaaaaaaaaactagttttgttctactgatttaagtttttcatggttctgcattatctgaaaatgtttagtgaattgaatgctgacctcaattgggtattttcatagggcttttttttttcacatttcacaagtgcattaaattgacatcatttagctttgaaaaaataaaggttaacttaattgctatcttcaaatatatgaaaagcttttatgaaaagacttggagagatgatataaagcattggattgttatatcaaggcagagcattttagctaatcctagaattgtttcaggagtgagagtctctttgttcagggactcaagacagtaacagccggcttttctaggaggctgagactgatggcaaggaactagaccagatgacgtccagaggtctagtcctgtgtggtaccatttccttttatttcaataacttctcttaaatttgagaataaaagtgttgaggtaataaacaccctcaaggaattctgttgctgtattggtggaagatgatttaagagtagcagattagaatattgacagagaagatttgagataatagcagcaatagcacctgaaatgagaactgcagttgagtgtcataagactacgcatgtgcatgtgaaatgtggaagccttggtagactgcagagtactaaaagactgccaattttaacctttcctgtgaacttacttagatcatgccttgacacatttaaaatatgaattgaggctgaacactaattgcttgagataaggagtttgaggctgcagtgagctatgaacacaccagtgcactcctgcctgggtgacttagcaagtccctgtctaaataaataaataaataaaatgtgaatggaagtaagaatgctaggtaagagaagtatagtggtggagtggtattttgaatatatgtgcacatatgtttttatttcaccatagaaaaggtttggaatgccttcattgtcaccttatgtttgagacaaaacgaaactgtggctaaaattatagaagcattttaagggaagtactgaaactgatgctaacaaaatgaaatttttgtcttagtattttacatgccaaagtaatacatctaaatccttcatctatagataaaatttgtctttttagtctttcttagtgcattttgggctgctataacaaaataccttagatgagtaatttatacatgacagaaatttagtgctcacagttctggaagctgggaagtctaagatcaaggttccagccagtagatctggtgtctgatgagggctcattgctcatttatggcaccttctgtgtgtcctcacgtggtgggataacagactccctcaagcttctataaggatactaactgcattcatgtggtcagagccctcatcacctaatcatgtcccaaaggccccacctcttaatactatagcactgcagattaggttttaacatagcaattttgggagtacacaaacatttagaccatagagctgataagctttttttttttttttttttttttttggtgaggtggaattatattgtataaattttttttctttcatcagctaaatttttcctttagtgtcacagtgagcttatgggatatgtggagcatacatctcatctcatagctgaaatgcatatgtctgttggtcttcaacaacatttccattttcttatgttacatatgagtgttatatttgcttatttgtttgttttcgaatatagaacctgaatttgaaactagcctactacatgggcagggtgaactctgttaatcaggtgtctacagaaatctgaaccaatggagtctgcttctgtgggtcttgaagagtcatttttaagagtttatagacatggaatatcttgacttgtacatttttgcttctgtcctgactgttcttatttatcaagtgataaattcttgtataccttttaatagtcctagattaaaggtatatgggtttgaggaggattcagtgttgttaaaacattttgtaaggcactgtgtagccataaagctcaacgtttctgatatccttcagcataagaatttaataatcaacccaaaatagagagacatgaatatttgtggtcttgattagttagaaaattgctgtacttattttggggtttttagttatttgggagaaatattttaaatctccgtgtgtgtgcattctttacttgcgtgtagtccttattgtgaaagggggatgactttgttatgtattttttgtgactaaactttaattgatccttctgtttcttaatctgttcttctccagatcactgattttatgagttttcagaatagtaagtaagggtatgaagacttacagtaactaaagcaatgttcatggggaaatctatttttacacaggttttcttgtcttgacaagatgcttgaaaaaccaagaggatatgaaaatctgtctctggagaaacaaagacgcaggcatactcagccagaaatctgagttttgtgagacttggtaatacagagatggacaatcgtactggggtaaaaaaaccctgctgaagagaggacagtgaccacagaactcagtgtaccaaacatgcatacaaaggacacacagggattttgaaaatgctgcacatcccttaatagtcatctacataggtaatactgataaacattttgtattcagacgccaaagttaactgatttaaaagttgatttactttttattaagttctccagagctgcacaactagttatgttttgatttgttttgttttttaatttggggtctctttgttttccccaacataatgttcataatgtttctgcattcatctgttcttaaattgaaaaacatataatttacttcttataaattgaagtcttaaatgtgaaaccaagaaatgtaatcaagcagtaaaaacatctgaatgtagaccatgatctcaagttcttccattttctcccccacgagtggaaaatagacttctacataggaaagctaaaatatgttaatatttttaaattaaaggtttaatatcagaatgcagtccaaagagcaaatcatattacataattacattttaattaaatatagaatattctactgaattgcaatttattaaatattcttatcctcttaaataaaactgctcaacagttaatcagcagtgaatcatcttgcagctatgcaatttaaaaaaaatacagattaccaatttcaagtgctgccagctaaaataactgttttaacgggtatcttttgtttgttcttttcacttaattattttattgtgctttgcatctccaggcagttctctcacatttgggtaaaatgtttagcaggctgtaaacttaagaaaagggtaaaataaaattttctggagaggaacttggaatttgagggagattttatatacctttaaaaactgtaatttaattgggatgccaggtttatagcaatttgcaactttaattttccagataatctggaggttagcatttgataaatgattttttaaagtagatatgaagattttgttaatttataatttattcatgtgttattactgtaattgaaaatgttatagacacttttaaattcagtttgtgtagaaagaaatgtgttaaacaaaattatgttaataaatattcccacataatacatctgaatggttaaaaatactggaagagttgtcagggctacaatagtgaatgtccttttttttaatatcaaaaatatcgataagtaggttttgtgttttcaacgtagggaaaatgttatcagtgaataggtggtgtactttacttggtataatttaaagttgcacagtaagtactgtttccttattttaatctttctttactcataatgtatttaagaatttgctgttttatttaacgctgctactcttaatcttctctaaatttttccccctactttcttgcttctgtttcacattttttaaaagggcaagtacaggagcaactgctgctacccagaaaaatgtgtgtattataaataattaaagagtttttaattgctttctgtatgattccagctcagataacattttccctgaagttatgctgtgaaatgccttttgttatgctgcaattgctaaaggaatccaaaacctccattgtgacagctgaaggcacagtttaataggtgcttttttactagttatgaaaaatattcgtcccttaaggaaacgattctttttctgtttttttctgttaccatgaagtcttaatttgatttcattttatttcacatttttgattttgtaagctttcataccctcctgctcaaccccctcaagtaaaacctcttagaatgtgaataattggttcattttctattgctggtatactcttgtgatgagaattattttgttgtcttccattcttaaaggaagagatttattacagctgtggggattaactgtattctcctggaagttgattttctgataggttaatgcaaaagtcattgcaaaaactgctattacttttgcgccaatttaatagttcacttgtttactttttaacctatattggcttaaattcactttttagcccctctttgtcataaggttctgtgctgcatttgctacaatagaagctcctatggttttaaagaaagttcagtgttttgtcagtgtcaagtgctacttgatgattatatttgtctggaacagtattcacttaagtctgtttatagcaatcccttttttgacaaaatttacaaagttggcatttttactttaaattccatctctatcagtgacttcctaaaaagagcaacttagaaattgggggaaaaatgtttttaaagcccaaatgctccagtttttattcaaagtcaaagtcgttattctggaaaatacaagtaatgttctatataatgtcacttaaaatattcgtaaatctattttgcaaacactgaatagtataagtaagatataaaatcacaatagatatttaaatactaagctgaaacttctgacaactaattattatgggggacacaataaagattgaaagcctaggttaccaagttggttttagctttctagaatctttgtaaatactcacgttcaaataagatcacacgtgcatatatagaaagcaatatgttctgaaatttcactttagtgccactgtttgtccataatggatttattgccaattttgaatcctcatcttactttgatctggcttttttttcccccccttgccagaatgtttaggagaaagtaaaattattccgttttactttggctttttgccagagatacaaactaagaatagtctgaatatgtgtttttcagatctggttacaagacggattatagattgtgttttagagcaatgttgtgattgaaatataaataatggtataactttttttgtgttagcaaaaacaacattaaaaaggttatgttacataatatgtaggttttggtttcttagtgcaagacttatatttctcttaaatgttgtataattatttcagttttcactcactagctactttactaaaatgtagccccaaaatgacgggccagcctcagcgtatctgccatatgtatttcaaagattacagtcagaatgagttaatgaaaatggcaggttccttttcaaagtttatttgactcacagccatattgctaagtttgggtatagtgaagttaacaacaatcacttaaattaatatcttacagcaagatatactgatactgttttaaatgaaaaagactgtaaattcaatgtaaatattacctaactttatgtaccaagttaggagagtggaagaggggaatttttcaaaaaataagctgtatttgaacaaagcatgaaacttgttgttttaaaatttaagaataattgaatttaccatctaattggcatccgtactgtgcattgatagtaatatccaaatcatcttattcttccatagaggaagcgctcatataaatcacattgctgagaactatataaaactacatagaggtaaatggtgcttattaaatatgagtatagtttgttacttgctggaagtcttctagttcatttggaccattttcttaccctgaggtgaactcaatatctgttggcaatgggtggttaaatgtgaagtgcccttgttcagtgtcccttgttcttgtacaggtattttcttagtttaaaaaaaaaattctagcatgccaacatttgtctttggcctattcctttttttctgaagtgtgtaacttctgattttttctttgctatgttgtaaataacagtagctaaattctctgttttactatctacttttcttttcttcccagatcatttcattctaaaattaaattgcttggttttctttagaggaaattgctacatggtatacttgtagtagtgattcatattaaaaaaatagctggtaaatctttctaggtagtaacttatccaaacaatactttgagtatcatattttgtgaatgacttgcttaaactgggaaactgaatattctttttaaatcatataattcctgtattaaatgtgaaacacacagtctccaaagtcacctgattctctgtggaaaatgaaaggcattgaaggaaaccagatacattaatacttagttttggttgaaagtgcaacattactgtacttagaaggggcttggtttatttttagatatttaagctatcattaattttagaccaatggctaataataagagagatttttggttgctcatttatggagagacaaagaacagcatggcataaacaaacatcccagaaataaatgaaaagttttaagtgataaaattgtgttttctatgaaccagtgttgtacatgaaccaacattgtgtttcttagctctgacctgtacagtgaggtacctgtcaggacccctagtcttggcactggaaatgacaaagttctcctattactaaattctcatgccttccttttctgacttagtagattgaaattggtaggtactaatgatttatgtttgataaacttaagttctgctgatatcctgttactggtaattctggtaccaaaatttcaaacggtttgattattagtagcattttgagtacctaggtgcatataatacagttagcagacccttacagagtcaaaagagattttggaatctggtgatactgttgtttattacactagcctattacattttctttctttataataactgtttatgtgagtttcattgaaaatcgtggctctattgctttattcatggtttccacaactctttttgtaacaccttaattttctctcttaggtattttcctgttaaataagatatcaaaagcatcaatcacaagacagagaaaacgtattaggaaaaacttgtattagtatattctaaactgaaatggaaaaactcattattcatattttaataaataaaactcccaaatgatcttgctaaattatcccactatttagaagtagaaaataagagaagagtgctttcaaggaaatttgtcatattctcccttctatctagaagttgacaatgaattgcaataaaactaagaaataactgaatgctgaaaaataccatgaattaatgttatggcttctttatttttgtatatccattcccacaaaattgaatttaagattattaatgaaaattctatattaagtaataatgcttgtattagtaatgggcaaagaagtctttctttgttacattaaccgttagtaaaagatgtactttgacatttctgatgtaaaacctatatgtaaatattgtaatttaaatatgattggacagctgttaagttttggggagggaagcagatgccagcgttctctgctgaaaagacaagatggcgcttgacggaccacagcagatggagctggaggaggaaaaggcaggcagtggactctgccagtattatctgtccaagattgaagaactccagggtcaactgcaatataaattggatgggggaaagccacaaggaacagttctgaactccaggtgcatttgcagctgattttgaatgataagacccaaaacctctggaggcggcaggtgcacgggaatgaactaaatgttaaagtgtgcctattacaggaggagctacagctgctgcaggaataggactcctgtgtcagggaagtagtccaggccatgggtaagaagaaagtgttggtcaaggtgcatctcaaggacaagtttgtcatagatgtggacaaaaatatcagcatcagtgatgtgacacccagttccttggtggttctaagaaatgacagctacactttgcacaagatcctacccaacaaggtggactcattggtgtcactgatgatggtgaagaaagtaccagattcagcttatgaaatgattggtagactggataggcagatcaagaagatcaaagaagtgatcgacctgcctgctaagcatcccgagctcttcaaagcactgggcattgcacagcccaagggaatgctgcttggaagagactgttggcctgggctctggctcatcatagggactgtgtacctttattcatgtctctggctctgaattggtacagaaattcattggggaatttctgtgatggcagagaaaatgctcatctgtcatcttcatggatgaaattgactcttttggctcctcagagctggagggggatgctggagggaacagtgaagtgcagcagatgatgcttcgagggtggctttgaggccaccaagagtatcacggtttatcacggctgctaatacgattgatatcctggactcggcactgctttgcccagggcacattgacagaaaaattgaattcccaacctgcaatgagtaggcctggctggtcactttgaagattcattctcagaaatgaacctgacccaggggatcaacctgagaaaaattgctgagcttatgccaggagcatcaggctgaagtgaagggcatgtgcacagaaaccggcatgtatgccctgagtagcgagtccatgtcactcagaaggactttgaggtagtccaaagtcctatctcatgccaaaggacagtgaggaaaaacatgtccatcaagaaactatggaattgagggcacatcctttgtgtgtatccctacaataaaactcagtgggacaagcaaaaaaaaaaaaaaaaaaaagttttggggagggatgatctgctagtgtataatcaataacttttaacatttagcttgtatttagtaacatttcattgtgttttgaaaaaaagtaaaaaatcttttgaagcacaattttcatgatgtaaaaggtattgagtttcctagtgtaagaacatgaattctggaaacagtcttagggacactgggcaagatagaggcctccacccctcccccccccaccaactttgtttgtaaaaggagataatactgcctacatcagggttggtgtgaggattaattagaagagtacatgtatgtaagcaccagacacatagtaagcacttaataatgttagtggctagtataaacagtaaacatatttgtgcccatttatgaataattttagtattcgctccagtcatgaggtgtagtagtaatatctaagaccttaactgaaatgtttaaagaaacctaggtataacagagaacattatgggtgctgatttccactctcactaaaagccagtgactttactatatcagcaagtataaagcactacttgactctgtagattgtatggaccaagaatgtagatatgagacagctgatctctacgaactgaatttttagtgagtaaagcaagcaagcatgtaatagagaacaataaaagctctgatagacatatgtacaaggtgttgtagaggtacaaaggaaagttattcagactaggcaagagagtgattaaacttaagtattgaagaacaaatagatcatagctctaggggatgtggaacatacaaagtggaaagtttgggaagagtattcccaaggcaaaaagcttagcacatacaaacataggaggaaagcgagacactcttaaagagttgctatgctttgggaggtggaggcgggcggatcacgagatcaagagattgagaccatcctggccgacacagtgaaaccctgtctctactaaaaatacaaaaattagctgggcgtggtgcgcgcctgtagttccagctactcaggaggccgaggcaggagaattgcttgaacccaggaggcagaggttgcagtgaactgagattgtgccactgtactccaacctggcaacagagcgagactcttgtctcaaaaaaaaaaaaaaaaaaaaaaaaaaaaaaaaaaaagttggccaggcacggtggctcacgcctgtaatcctagcactttgggagaccgaggcagggtggatcaccacctgaggccaggagtttgagaccagcctggccaacatgatgaaaccccatctctactaaaaatagaaaaattagctgggcatggtagtgtgcgcctgtagtcccaggtacttggaaggctgaggcatgagcacaggaggcggaggttgcagtgagctgagattgtgccactgcactctaacctgggcaatagaatgagactctgtctccaaaaaaaaaaagttgctatgtctgaagaggtaaacaggtgataaatcatgaagagatttgtgtctgaaactgtaattgaaggatttcaaacaggaaaaagataatcacatttatacttaagattagagaggtatgatactggaggcagagagacctgttagaaaatttatactaattcaggcaagatgatgaagggcagaactaaagcaatgaaaatagggaaagcaagtacagaagaacaaaacttaaagatttagagagcagcactgacccagctgggacaagttctagttgtccattctattgccagtgctgcagagtccagaggcagcacagtgcatcatttggtgagggagttcacaagggagaaccaaactagcttttataacagacccatttgtggtaactaacccagtcccttgataataaccattaatccatgcatagattaatccatttatggggacatagatagccttcatgacccaatcaccacttaaaggccctacctcttcgtactgatacattggggatcaagtttagcacaagtttcagtgggggcaaacattcaaatcatagcagtgtctattaggctgcaggaggtgtctctacccaaatgtcggtaagtatgtgataagtgggatagttgagctagtttaacgatgtctaggttggttgggttggacttttcctcgtgtcacctccctgcttagctctagctgcttattggaatgcagccgtgctttcctgggtttacttaggaaatgctgagatgcactctgaagcattcttgaggttttccctttggttcatttgtcccatactctctccgttataccagtcttctcagatcttcacaacacaagtaaatctgttggaagcaaggtcttgtagatgtagacatatgggaaagatagagcctgctctcctgatggatgctgttgttgagataggttgggttggcctaggtaagaggaggaccagaagagatttatgatttcttggaaggctatgagttgctgctggccccatcataatcttttttgtttagcagaagtcaggaaacgaatactggtacacttacatttcttggaagagcagcagaaaccttgggatatccttgtgggtcaaggaggcaactctcctcacggattccctgatttgataacaacatactcatggaaacaccaatccaagttttcacaagtttctcttaaagttaacttaagacttcctagaccaagaattcctaccacgcaaggcctgtgaaaatattgtaaacttaatatccgacagggagatattcaaagatgccaaagtacctgtttttataaatattaccacatggtttaagatttgacttctcacataaaatgagtaaaaataacaatgatttttctgcagtaccttaatgatgctgtaattatgaagcagggttttaaaattctgccatgtagtgccttatttttatagtaatgttttctatgaaccttctaatttaatgtgtattaagagatttaaagagtatgtaattaaaaaatatctttccaacaaagtcaccttgagatttaatgctttctaattggcttgatcatttgatggcaagataactagttgggtaactgaacatagactctacagtgttagcaaatatgaatttatatttcagaaaaatatcaaataactaatatcagagcctgtgtgcctgcctttcaaggtagtacattaacacttggaatattaaatctgtaaatactaaggatattatccaaatagatgatattcatcaaatggtatataaagttcatccgttgttggaattcaaatgttgcaaaggccaaaggtatttaatatccaaactattgttttagcatatatttattctttgaaatctggtgtgtattttacacttacagcccatctctattcaggactatagccacattttaagttatcaagagtcatatgtgaccagtggccactgtgctggcagcacaggtctagatgactctgggagacacttctactcctatctctccttacctgaatatttctgaaggccttctaattccaactttgtgaagactcttgggtctctttcaaagtttatttaactgctgcacttgagcagaacttgtcctaaattattactaaaattgaggcagtttcctcatatttatttatttatttattttttagagacagagtctcgctctgtcgcccaggctggagtgcagtggcgcgatgtcggctcactgcaagctacgcctcccggattcacgccattctcctgcctcagcctcccgagtagctgggactacaggcgcctgccacctcgcctggctaattttttttttttttttttttttttttttttttgtattttcagtagagacggggtttcactgtgttagccaggatggtctcaatctcctgacctcgtgatccacccgcctcggcctcccaaagtgctaggattacaggcgtgggccaccgtgcctgtcccagtttcctcatttttaaatgaaagagctggaaatacctttaaaaggttgagggtctaatgaatcatcttcatgtacattcatagatagcattggctttcattgtgattatggtttttggtgagggcacatgggcttttaatacctggtcagtgatatagttaggaattgcagtttgtgacactttggccaaataatcatcaggaattgtgagtgatgctggtgaataatagctgtagtcagatttgtcccttgtgttgagttctatggcggcattttcatgggtttcagaccttccagctaatagttggcttcctgcccacgtcagtgcttaaactgtcaaacttgtccaccaaaccctcaattcataaagctgagtcttcaaaatcccgcataagaggcaccagtagtcaagtctaaactgtcttcagtaagatgttccctagtttgcctagagattctgtgctcaaatgccatcttgaatggagtcagcaggcaagggttggcagggaggttgtctataagtttggcatacaccatgggaagatagacattacattcgtcttctttgggatccctgtaagccagtggttctcaatacttggcttaacattaggtcaactcaggaggtaggaaggacgtatagaggcatctctttaaatatattaaggtcttgacctcaccccagatattctgagttaatctagtgtgattctgttgtatagccagtgtacaacctatcaaaggttttctcatacacctcaaaaataggggttaaagggtgccaagaatgtctcagacctctgtaactcagctgtagctatattcctttcaattttctttcctgcttgatcaaactcttgactctttttggatgagaaaactgctctggcatcattatgcattctccccaaatctggtttataggacaatgcctaattcagccaggctccgatccttaattttcacaaaagaatttgtagattcccaaaagctctttttacctccagaatggctctgacaaatcaaaagcatttggcttccagacacttctcttcctttggatttaaagaacttgactttgacattcaaaataatatctgatttgtcctcattttctctcccttccgaagcagtgaccatcaatgagtcattgaataaaatgccataagcaactaggaacacaaactaggaatgaaaaatgttcaaaaatagtcttctgctacactcatatcaatcactagaaagctactgaagcctaaatatataactagtctgattttcattcttacagttacctggtaatcttcagaagtcttatctccctgaagaagaatgtgtataggagttacttgaactagaatgcagtcactatcattcattcatttagcattcattcatttagcacatgtggttggttgtgttggttcattcatttagcacgtattgaacgtttgatagatgaaagacactgtgtgagacactacatatacattgatggggaaaatgaatagtgcctgccctaatggggcttaattatttagagtatcacaaatctataaataacaggctgtttgaaacctagttcttgaataagtatttgtgtcagttcttataaggtatgaggttattaaggtcattggaaaaccctttatttgactctacatccggtaagacttttataccttgtaccagaccttcctgtgtgtcagtgctactgaaacaaaggagaaagtaggtgaaagtacttcaaacactaggattgaggtaga

SEQ ID NO: 830 - DNA, 3498 bp, Homo sapiens
atgaggatcagattggtgacctgcatatctttaggccaagagcctaagtttctgctgataacaagtcttactgaggctcgagctgatgggggtatatcctatctctccagtatgttggggcaggcagggaaaacaaagtgtgtaacaccaacacccaccgaaaccaaacggctctgggcagaggacacagccattcacgccccctgccaggaaaagctgcagctgacacaggctcctacagcgtcggcgggccacgtgcgggaggaggggccgccttctgccgccagccgccgtgggagccggaggatggcggcggtagcagcggccgcccgagaggaggcggtgccgagatcgggggcgccgagcgcggcagcagagagcggtagcggcccgtcgtggcgcaccagaaccgaaaccagcggcagccgcacggccacttgagccgccccttcctgctggagccagcgaggggtgcctgcagccgggaccccttcctctccgcgtctcctcgccccgcgcagccgctccctcggcggggccgtggggagcgtggcgtcgggggcccgcgcggcgcagtcccccttcagcatcccgaacagcagcagcggcccgtacggctcgcaggactcggtgcacagcagccctgaggacggcggcggcggccgggaccggccggtgggcgggagccccggcgggccgcgcctggtgatcggctccttaccagctcacctctcgccgcacatgtttggaggatttaagtgccctgtatgctcaaaatttgtatcctcagatgaaatggatttgcatcttgtaatgtgtttaacaaagccacgaataacctataatgaggatgtactgagtaaagatgctggggaatgtgcaatatgccttgaagaattgcagcagggagatactatagcacgactgccttgtctatgcatatatcataaaggctgcatagatgaatggtttgaagtaaatagatcttgccctgagcacccttcagattaagcgttttcttgtcttgacaagatgcttgaaaaaccaagaggatatgaaaatctgtctctggagaaacaaagacgcaggcatactcagccagaaatctgagttttgtgagacttggtaatacagagatggacaatcgtactggggtaaaaaaaccctgctgaagagaggacagtgaccacagaactcagtgtaccaaacatgcatacaaaggacacacagggattttgaaaatgctgcacatcccttaatagtcatctacataggtaatactgataaacattttgtattcagacgccaaagttaactgatttaaaagttgatttactttttattaagttctccagagctgcacaactagttatgttttgatttgttttgttttttaatttggggtctctttgttttccccaacataatgttcataatgtttctgcattcatctgttcttaaattgaaaaacatataatttacttcttataaattgaagtcttaaatgtgaaaccaagaaatgtaatcaagcagtaaaaacatctgaatgtagaccatgatctcaagttcttccattttctcccccacgagtggaaaatagacttctacataggaaagctaaaatatgttaatatttttaaattaaaggtttaatatcagaatgcagtccaaagagcaaatcatattacataattacattttaattaaatatagaatattctactgaattgcaatttattaaatattcttatcctcttaaataaaactgctcaacagttaatcagcagtgaatcatcttgcagctatgcaatttaaaaaaaatacagattaccaatttcaagtgctgccagctaaaataactgttttaacgggtatcttttgtttgttcttttcacttaattattttattgtgctttgcatctccaggcagttctctcacatttgggtaaaatgtttagcaggctgtaaacttaagaaaagggtaaaataaaattttctggagaggaacttggaatttgagggagattttatatacctttaaaaactgtaatttaattgggatgccaggtttatagcaatttgcaactttaattttccagataatctggaggttagcatttgataaatgattttttaaagtagatatgaagattttgttaatttataatttattcatgtgttattactgtaattgaaaatgttatagacacttttaaattcagtttgtgtagaaagaaatgtgttaaacaaaattatgttaataaatattcccacataatacatctgaatggttaaaaatactggaagagttgtcagggctacaatagtgaatgtccttttttttaatatcaaaaatatcgataagtaggttttgtgttttcaacgtagggaaaatgttatcagtgaataggtggtgtactttacttggtataatttaaagttgcacagtaagtactgtttccttattttaatctttctttactcataatgtatttaagaatttgctgttttatttaacgctgctactcttaatcttctctaaatttttccccctactttcttgcttctgtttcacattttttaaaagggcaagtacaggagcaactgctgctacccagaaaaatgtgtgtattataaataattaaagagtttttaattgctttctgtatgattccagctcagataacattttccctgaagttatgctgtgaaatgccttttgttatgctgcaattgctaaaggaatccaaaacctccattgtgacagctgaaggcacagtttaataggtgcttttttactagttatgaaaaatattcgtcccttaaggaaacgattctttttctgtttttttctgttaccatgaagtcttaatttgatttcattttatttcacatttttgattttgtaagctttcataccctcctgctcaaccccctcaagtaaaacctcttagaatgtgaataattggttcattttctattgctggtatactcttgtgatgagaattattttgttgtcttccattcttaaaggaagagatttattacagctgtggggattaactgtattctcctggaagttgattttctgataggttaatgcaaaagtcattgcaaaaactgctattacttttgcgccaatttaatagttcacttgtttactttttaacctatattggcttaaattcactttttagcccctctttgtcataaggttctgtgctgcatttgctacaatagaagctcctatggttttaaagaaagttcagtgttttgtcagtgtcaagtgctacttgatgattatatttgtctggaacagtattcacttaagtctgtttatagcaatcccttttttgacaaaatttacaaagttggcatttttactttaaattccatctctatcagtgacttcctaaaaagagcaacttagaaattgggggaaaaatgtttttaaagcccaaatgctccagtttttattcaaagtcaaagtcgttattc

SEQ ID NO: 831 - protein, 146 aa, Homo sapiens
MRIRLVTCISLGQEPKFLLITSLTEARADGGISYLSSMLGQAGKTKCVTPTPTETKRLWAEDTAIHAPCQEKLQLTQAPTASAGHVREEGPPSAASRRGSRRMAAVAAAAREEAVPRSGAPSAAAESGSGPSWRTRTETSGSRTAT

SEQ ID NO: 832 - DNA, 3505 bp, Homo sapiens
cgccccttcctgctggagccagcgaggggtgcctgcagccgggaccccttcctctccgcgtctcctcgtctcccgcgcccgcgtcaggccgtcggcctcgcccgccgccccaagaagagcgcgccgggcgccgactgcccctctggacgccgggcggcggccctggacgtgcgggggcctctctgggccggccgcggcgcctgggccctgccctctagctcccgcgctcgctcccgccctcccggctctcggggcgcagcgcgcgggcccggcccggggcagggcggacatgggcgccaaacagagcggcccggccgccgctaacggccgcacgcgcgcgtactcgggctcggatctaccttccagtagcagcggaggcgccaatgggaccgcgggcggcggcgggggcgctcgggccgccgccgcggggaggttcccggctcaggtgcccagcgcgcaccagcccagcgcctccggcggcgccgcggcggccgcggcggccccggcagccccggcggccccgcgcagccgctccctcggcggggccgtggggagcgtggcgtcgggggcccgcgcggcgcagtcccccttcagcatcccgaacagcagcagcggcccgtacggctcgcaggactcggtgcacagcagccctgaggacggcggcggcggccgggaccggccggtgggcgggagccccggcgggccgcgcctggtgatcggctccttaccagctcacctctcgccgcacatgtttggaggatttaagtgccctgtatgctcaaaatttgtatcctcagatgaaatggatttgcatcttgtaatgtgtttaacaaagccacgaataacctataatgaggatgtactgagtaaagatgctggggaatgtgcaatatgccttgaagaattgcagcagggagatactatagcacgactgccttgtctatgcatatatcataaaggctgcatagatgaatggtttgaagtaaatagatcttgccctgagcacccttcagattaagcgttttcttgtcttgacaagatgcttgaaaaaccaagaggatatgaaaatctgtctctggagaaacaaagacgcaggcatactcagccagaaatctgagttttgtgagacttggtaatacagagatggacaatcgtactggggtaaaaaaaccctgctgaagagaggacagtgaccacagaactcagtgtaccaaacatgcatacaaaggacacacagggattttgaaaatgctgcacatcccttaatagtcatctacataggtaatactgataaacattttgtattcagacgccaaagttaactgatttaaaagttgatttactttttattaagttctccagagctgcacaactagttatgttttgatttgttttgttttttaatttggggtctctttgttttccccaacataatgttcataatgtttctgcattcatctgttcttaaattgaaaaacatataatttacttcttataaattgaagtcttaaatgtgaaaccaagaaatgtaatcaagcagtaaaaacatctgaatgtagaccatgatctcaagttcttccattttctcccccacgagtggaaaatagacttctacataggaaagctaaaatatgttaatatttttaaattaaaggtttaatatcagaatgcagtccaaagagcaaatcatattacataattacattttaattaaatatagaatattctactgaattgcaatttattaaatattcttatcctcttaaataaaactgctcaacagttaatcagcagtgaatcatcttgcagctatgcaatttaaaaaaaatacagattaccaatttcaagtgctgccagctaaaataactgttttaacgggtatcttttgtttgttcttttcacttaattattttattgtgctttgcatctccaggcagttctctcacatttgggtaaaatgtttagcaggctgtaaacttaagaaaagggtaaaataaaattttctggagaggaacttggaatttgagggagattttatatacctttaaaaactgtaatttaattgggatgccaggtttatagcaatttgcaactttaattttccagataatctggaggttagcatttgataaatgattttttaaagtagatatgaagattttgttaatttataatttattcatgtgttattactgtaattgaaaatgttatagacacttttaaattcagtttgtgtagaaagaaatgtgttaaacaaaattatgttaataaatattcccacataatacatctgaatggttaaaaatactggaagagttgtcagggctacaatagtgaatgtccttttttttaatatcaaaaatatcgataagtaggttttgtgttttcaacgtagggaaaatgttatcagtgaataggtggtgtactttacttggtataatttaaagttgcacagtaagtactgtttccttattttaatctttctttactcataatgtatttaagaatttgctgttttatttaacgctgctactcttaatcttctctaaatttttccccctactttcttgcttctgtttcacattttttaaaagggcaagtacaggagcaactgctgctacccagaaaaatgtgtgtattataaataattaaagagtttttaattgctttctgtatgattccagctcagataacattttccctgaagttatgctgtgaaatgccttttgttatgctgcaattgctaaaggaatccaaaacctccattgtgacagctgaaggcacagtttaataggtgcttttttactagttatgaaaaatattcgtcccttaaggaaacgattctttttctgtttttttctgttaccatgaagtcttaatttgatttcattttatttcacatttttgattttgtaagctttcataccctcctgctcaaccccctcaagtaaaacctcttagaatgtgaataattggttcattttctattgctggtatactcttgtgatgagaattattttgttgtcttccattcttaaaggaagagatttattacagctgtggggattaactgtattctcctggaagttgattttctgataggttaatgcaaaagtcattgcaaaaactgctattacttttgcgccaatttaatagttcacttgtttactttttaacctatattggcttaaattcactttttagcccctctttgtcataaggttctgtgctgcatttgctacaatagaagctcctatggttttaaagaaagttcagtgttttgtcagtgtcaagtgctacttgatgattatatttgtctggaacagtattcacttaagtctgtttatagcaatcccttttttgacaaaatttacaaagttggcatttttactttaaattccatctctatcagtgacttcctaaaaagagcaacttagaaattgggggaaaaatgtttttaaagcccaaatgctccagtttttattcaaagtcaaagtcgttattc

SEQ ID NO: 833 - protein, 242 aa, Homo sapiens
MGAKQSGPAAANGRTRAYSGSDLPSSSSGGANGTAGGGGGARAAAAGRFPAQVPSAHQPSASGGAAAAAAAPAAPAAPRSRSLGGAVGSVASGARAAQSPFSIPNSSSGPYGSQDSVHSSPEDGGGGRDRPVGGSPGGPRLVIGSLPAHLSPHMFGGFKCPVCSKFVSSDEMDLHLVMCLTKPRITYNEDVLSKDAGECAICLEELQQGDTIARLPCLCIYHKGCIDEWFEVNRSCPEHPSD

SEQ ID NO: 834 - DNA, 95507 bp, Mus musculus
  misc_feature (1)...(95507): n = A,T,C or G
aatggatggggggagctgatgtgtgtgtgagccacaggttccaactgaacactctgttcctccaccaatgtcatcacagaaatataaggataatgttgaacagaaagtatacatcaatgacctctgtatcacttaaaaggacagccagcctggtatcccccatggtaatctcaatagcttttggggggccagagtctttggtctccacacaggacagtgttaagtcttccagctaccacacaggactacattgggttttggccaccaaacccagaaggtctgagagttttggggttttttgttttgttttgttttgtttttgttttgtttttgttttttcctttatgtggaggaactggcctaccttggcaaagcagagtggggcagtcaaaccaaccgtctccagagttattgcaggaccctggtagtgggagaggcatgaaatacttctttgcccaggggtttacaagttagtagcttttctatgattaggatctaacaattttatccctgttaagtttgagcattaaatcttttgagttgaagatctgttactcctgggattcatgaaaaataaaacaaaacaaaacaaacaatgagtccatgattgttgaagacccaaactgtttcaactaaaactagacctctcatcctgcaaaaaaaaaaaatgttttctgttttggtcttacttcatttgcctaaagaggaattccatgtgctggctggacatgtccttatagggaaaggggaagttaaaactgtaatgtggccaccagactatgtgactatctcaaagctggcagaggtggtggtcatacaggctaagtacatgcaggcccagagaaagaaggaaacagtactagctcttgctggtctcagaatgagatttttgaggtttggccatgtcttgacctccctcttgttccagactgctttctggtcacacagtgaaacttgccagagaactgcaccaataagcctgagattgctgccaattcagtctgatctggtcacttcaagacaccccggagtctcttaaagcaatttgctggatggagggattctaagaaagcaggcagtgtaacagaagttatgatcggctagataggacatggtgcccttgggtttctagatagtgttgggaaattttccgtggagaccagattctcaatggcctaaggagttcaaattctagtcaagcttaaagatgacctaaggatggaggaacttctgcattatcttgcactatcacactaacatgctgtagcaaattaagattacctttgtatagatttttaactatcaatcttttttgttacaagttttaagctaactttttaaatgatagattttatagatctttgaaccataactttcaaattctaagacatggaaagtttacaagactttttctaaagcagagaataaaaaaaacttaagagattttcaggagtggagagtaaagaaagccaaaaaagatgatttggggattatgtgcttgtgcagaggcagaagttgttactattcatgggaaattggaaattgagtgtgccatcttcaggttattgaggcttatgatctaggttatactggggccaagctggtggcaataagtcagtgagactttaatggaatctctgagtccatggaggggaagtgattaaaagacaggataagaacccatggttagtttaggctctaggaggtgaatgaggcagagcaagctccaggagcaagctgtgagacaggtggggaggaagccatgagcacatcgagggtgagagaggagggacttatgggaaagggtcacatagaaactccaccagagggagaattccaaaagaagaagagtaagtgccttagcagagagatgccccaagtcacatcagccaaggagagatagaaccttcccaagtgatagatgtcaggagggtatagtaagctccaggagaagtaaaaccaaaacagataacatattgtgttgggttagagttctgtttatagctgaaacagttagcttggtgctaaaatctagctaagagatcataagtctttctgtctggtatcaagtccttactaattaaggcctttatttgcaatgaagattaagttcctggtttgatgcagactgtttgcaacccctattcacttaacatttatccttaccattattcctcccctcttcatcatacccttttaacaatcattaacccacaactctctcacccagtgtgaactcacctcctgtataaaaagaacttcaagaggccagtgagggctgctcttggagagctcaaacttaagagagatagtcagctctacagcctacagctcactcaaatacaccttgttttagtttggacaattgtgactttcaagaatttctctcaaatctcagaattaacaagaaaccaacaggcaaggagagattagtggttaaagcaggtaaaggagcgtggctggaaagtggactctagaatttagagtggaatatcgtaggtggcagaagccagcagaaacaaatgatccatacattagatggatgaaattagtagcttggttcatttaggagagaccaggtcccttgaagaaaggcatttgtgatcttctcaggtctataggaccaggtgtaagcaggggcaaggagcaataatgaaacaaccaaaatgaccactcattaggggaaaggtttttactgtgggtgtgagagagaaaatatccagacacatctggaagagtccagaacagagaggaaaaagaagcagactggacacgtccagagctagggaagcaggaataggaatagcaagagtgggcactgcatgtagctttatgctttacccaacattagttctgagaagtgaccatgctaccggccccctcccagcttcccttgaatgcttagataaaagacacagacacacagtcattcaatttcaacttgccttcttggcacaattgttgggcactactatttcccacctggaaaagcatgcccttatcagattcttatctccatctctctcacctgccccaaacttcagttggtaaattcccctgaccacctgcctgtaggagtggcctgtgtggctactgtgttttgagatctcacatggttgcctgactctcctctctccaaagcatggtggactcctttctccttccttgtgtccctctgcctgccttcagggacccggaagtctcacttgtcccttctacccagaaattaacccatggttatctttactgacaggtcaagaaccatttggggaacaggaccttatcatcagaattgcaccctaaaagtgggaatagtagagaattacctgttatataaaggatggatgaataactgagaggcaggaagcctgtgagctggaagaagcctgagagtttagggtagaggaggaggtcagaaggaatagggtgacagtgtggagaccttgaaatatataatgagttcttttgaatagggactgtaggaaactagagccagcatgggctttggtatgcaaccacagaaagatgacaacagagaaccatattttgcttcttccagaggcaagaaagatgatttcctctagcagacacaaaacatttcactagttcatgaggaatgctagctttaacctaactcccaaaaatcattctataatcctgtttgagctggaccaagactgtcctttctgaacatatgtactgccttttggaatttgatgaattggagttttcttgggacttgacaattcttaaaatccaaattatgctgaataatgagaataaaactttaatagatacaacaacaaaacttgagtcagttagacataaaaactaggctcatataagacaggaaattgggataagcaaacaattataacaagtaagatgattataaaaaacacaatttgattaaatttgtaatttctttaaaactaagagtagcattatttaatatcttaagaatatatcaagtgccgtgttcctccagatccaacccctgagtttcatgcccagctcttcagtaaaacacccatgatggccgggcagtggtggcacatgcctttaatcaaaatctagacaggaaacaaaactcaaggaagaaaacactaagtgaacaaagacaggcccagaaatcagtacttagagctatagacatcccaaacctagatgcctagataccagcatgagaacacaataacacccagaacactacagcccactatcctacatagcaggccctgaatattctaacacattaaaaaaaaaccttcaaattaatattatgaagatgatacaagtctttaaaaaggaaatgaataaatcccttaaaggaatctaggaaaatacaaacagtctaagaaaataaataaaactgtttaagacctgaattttgaaatagaatcagtaaagaaaacccaaactgagcaaattctggagataaaaaatttaagaattcaaacaagaactacagagtcaggtttcaccatcaaaagacaagatagttaaaaaagaatctcaagtatggaagaaatggatacattggtcagcaaaaatgttgaatctaaaaaattctgctataaaacatccagaaaatctggaacactatgaaaagaccacacctaagaataataggtatagaggaaggagaagaaatccagatcaaaggaccaaaaaatgtttttaacaaaactatagaacaattttcctagcctaaaggaggagatgccaataaaggcagaaaaagcataccaaacatcaaatagattggaccagaaaagaaagtccccttaccacttagcaatcaaaacactatatacacagagcaaaggaagaatattaaaggctgtaagatagaaaggcaggtctattaaaattgcatccaacttctcagtgaagactctaaaatcaagaacggcctgacagatgtcctgcagactctaagagaccacagatgccagcctagacttccatacatagaaaaactttaaataaccacagatggagaaataagatatttcatgataataccaaatttaaatgatatctagccacgaaacacagccatacagaaagttctagaaggaaaacttcaacctaaagtgatttactaaaactatgaacatcaatgataaacattaatttaggttaaagggttagaaaaagatatatcaagcaagtggatctaagaaacaagctggtgtaaccattttaatatctatcaaaatagacttctatccagcattaatcagaagggatagggaaggacactatatgctcaccaaaggaaaaatgcaccaataggacactgcaattcttaacatttatgccccaaacacagacactcacatttgttaaaaacaacaacaacaacaacaacaacaaaaagacaaaacaaaaacaaacaaacaaacccccactactacagtttaaactacatattcattctcatagtatgaaaatgataactaactataccccactttcaccaaaagacaggtcatctagacaaaagctaaacagagaaattttagagctaattgacaatataaaacaaatggacctagcagttattcatagaccatttcattgaaacacaaaagaatataccttcttttctgcacctcgtgaaactttcttcaaaactgatcacatatgcagacacaaagcaagtctcagcagatacgagaaaactgaataactctctttactctatcagaagttcaaggtcatcctcagttgcatagagagtcagagaccagacagaactacgtgagactctttgtcactctcttctccttaaaaaccttaaaacacgcacacagacacacagacacacacagacacacagacacatacagacacacagactcacatagacagacacacacacacacacgtgcacacacgcacacacacacacagacacacagacacacacagacatacagacacacagacacatacagacacacagactcacatagacacacagacacacacacacacatggatgcagagagttactgaatctggagtaaagctgaagaccaacagtagaaaggacaaaaccttataaactcatagaaaccagacaaatctgaactgaaagaaattaaagattcgctaaaattaaatgaaaataaacaaacacacatcatatccaagattaggagatacaaggaaagtggttctaagaggcaactccatagcattaagtgcctacattaaaaaaagaaaagaaaaatagaaaaaagaaagagagagagagagagagagagagagatcctatactaacaatttaataacacacttgaaagctctagagaaaaaaatgtagaaatcacacctcaggagagtagatgggaaaaaatccaattgagggcctaaattaatcaaatggaaacaaagagaacaatacaaagagtcaatgaaacaaagggctatttttttttttttgagactatcaataggatagacaaacccttatccaaatttaactaaaaggcaaagaggaaatgtccaaattaacaagatcagaagtgaaaagagagacatattaagagacaccaaggaaagccaaagagtcattagaccttatttcaaaaaagtactccacaaaattgaaaaaatctaaaagaaattgatagttttctcaattgatctacctaccaaaattaaatcaaaatcagaaaaacaattaaaatagacttatagttcctagtgaaatagaacactcattaatagtcttccaaccacaaaaagaaaaaaaaaaaaccaaaacaacaacaaaaaccacgcagggtcatatggtcttaatatagaagtctaccaatctttcaaagaagagttaacaccaatacgcttcaatttattccataaactagaaacagaagaaacattgtctaattcattttatgagtccccagttaccctgacacccttaagtatatacatacaaaaagtacttaataaaataccttcaaactgaatgcatgaacatgtaaaaagaatccacaggatcaagtagacttcatcccagagatgtagtggttgttcagtgtatgaaaaatcaataaatataattaatccaccatataaacaaagagaaaagttacaagatcatctcactagatgaacaaaaggcctttgacaaaatcgaacaccctttcatcataaaagtgctggagagattagggctacaaggaacatacctcaatataataaaagcagtttaaagctagcctatagtgaatgtcacactaaatgaagaaaaactcaacacaattccactaaaatcaggaacaagtcaaggttgcatactttcttcatatgtattcaatatagcatttgaagtcttagctagaacaataagacaactaaagagatcaaaggtatacaagttggaaagaagtcaaaatatttctatttgcagatgatatataagtgaccctaaaaattctaccatagaatttctacaactgataatttcaacaaagtagctggatacaaaattaactcataaaaacatcagtaacccccctatatacaaatgacaaacagagaaagaaattcaggaaatagtatccatcacaatagcctcaaataatataaagtattttggggtaagactaaccaaacaagtggaagacttgtatgagagaacttcaagtctttgaagaaggaaattgaagaagacatcagacaatggatgtcttcatgctcatggatcagtagaattgacatagtaaaaatggccatcctaccaaaggcaatctacagattcgatgcaatctctattaaaattccagcacaattcttcaaagagcttgaaaggacaattttctacttcatattgaaacacagacacacacacaatcgatgctagcgaaaacaatcctgcacaattgaagaacttttggggctctcaagttatactacaaagctatagcaagacaagtagtataccattggcataaaagcaggcatgttgattaatagaatagaactgaacacccagaaataagtccacatacttatagacatgtgatttttgagaaagaagctagaaatacaaactagaaaatagaatcttcaaaaaatggtgctgatcaaactgaatggctgcatgttaaagaatactatgaggaatttcttttctgattttgttgtctacttggtattctgtatattcgtgtatctttttaacccagagaggttaggcatagaggaagggactaggaagacacatggatttttttctgggatggagaaatagaaatggattttactggtagaggagaggaaggcatgagaatgggaggttctggtgggaaagaagagaggaaatggaatttagagaggcaatgagaggaggaacagctagtattgaaactcatttgaagaatatggaaacctgatgtagtggaaacttcctaaaataatgaaggtggtcctattgaagtctctaaataatgagggagatggaaccccaactggccatgtctgtcccagtggaaaatttcagtctgggattaagttttatccagttgagttattggttgaaagggtcgctatgaaatcctcaaatacttcaggctgttgccaagaaaataggtgtctctcaacaaaccaacagcaagttttcattgctgaagtcaatactcacacaatgcactgaatgtggagtcccatgttctaatgtctatgacaggcaaagggactctgcaggttgctaaaagagaaaagtaaaccaatccaaccataaaacccttgatctacaatttgtcctgcttggaaaatatgctagggcaatggtggcacaaaccacgtggagtaaccaactgatttcagatttgacttaaggcctacaccatgagatggaaggaacccatacctgacactgctcaggtgaccaagaaccagaacctaggacaaaaccaaatactactggtctaagaaaaacaaaagggtaacaataaaatgactcaataatagtctgctaggctcatatggcagtgccttattcagccatcattagagaggcttcaacctgcagcagatgggaataaacacagtgacccacaaccctttcagtgctgtgtttgttttcaaaggtggggagggagggagggagaaagggagggagggagggagggannnnnnnnnnnnnnnnnnnnaaaaaaaaaaaaaaaaaaaaaaaagagagagagagagagagagagagagagagagagagagagagccagagagagccagagtcaccttggaacacacagctctaaagatgtctcccttaaattccttcagagctcagcaaacctgcaaaagagtgttcactttttttctgttggcttgtgtagctttcatgtgaaggttttcatttctttacatatctggcccctgcccttactctgcagttggattcagttggacagcagcttctccattgcagctcagttagggttcattattaattacatccttacaggcttcccagctttggctttctaggcctctttgaaactctcaaaaaagttctgtaaccccctgaatacactccataatctatttattatacatataggtttaccatgtggtgcttaatgtgtgatctgaaaattaataatcaagactggaataaaagaaccccagctagaattgccaaggaaagcagattccctgggcactggttgccactgaaattgctacaacttgtggatattgtcacttaataaatatttcacagacctagaaatttgtccagagcatcaggactcacaagtggcttactcatgatggagatactttcttcttccctgtcttctcagatactcagtactgaaaattcaagcagccaggtttcaaaatgaccctagaaatgcctgtgagaaagatgttagtggtgtgggacaagcaggcacttactggaaagaactatgacgtaagggactgggcagtgcccttgggaggagttagggaagctaggtcacttgcttttgggagcccatctgacataccagagccgcgggtggctgtgcaccgcagggatgtatttcagctgggctgcaggaagccggaagcctcggcgcctgaaggcgggaaccagcggcattgaactcttgcaggcagccagcggggaacaccactcgctcctactgttcagcaaccacagggtgtattcctgcggggacaacagctggggacagctgggccagaggagagaccagagtaccgaaaggccaggtgacttccaagctcctgagcaggtgctcaggacagtatgtgggggcctcgggtccaggggaccaggggaccaggggaccagggataccgggtggctggaccagggatatcagaagctggaaccctgttttaagcagcttgcatcaactggtcaactcctagagctctggagtttgtatttgtttcggtttccaattcctcttcattgagaaactgaaagcaaaaaagcaagctttcctctggatagaaagaaagtccctcctccttaccaagctaagcctgagagaactttctggagggggtggggtggggggaatctgatttccaaaccgaaaagcttagcaataacttggggcatcttctctcctaaggttttgtttttgttttttgtttttttaaaaaagtataatagcatttttcggcattaaagctgatgtaggaaagtactaaagaagccacctgtagggtcttgagagatggctcggtggttaagagttcagctcctgacacttatgcggcagtttacaactacctataattacagttccagaggatcctatgcctctatgggtaccagcacacacatatatgcacacagtgatgcgcaagcgcaagcgcgcgcgcgcacacacacacacacacacacacacacacacacacacacgtaaaaataataaaatatttaaaatttaaaaagtcacctataattacaccaaaagcaactctaagaccattgcagctcctcgttttatcttctgcttatgtatttaatttttataggaattttgtcattatgagttattgtaattgtatctaaacaagaagttgtggttttaccaaaacattaatccactaggggattttatatatgatattgattcacttctaagtaacttcaaactaactaaagttctagtttgtttttctggttttaattatctatttttgccactttatatgctaagcaagcactctaccactggactattttacattcccattgactatatttgattatgtgtgtagaataatttgaagaactgtgtagaacacgaaaactattcctctgtccctttggattcagtttctggaagctacaaatttaacttgaaaaaaatgaataggcaaaaaacagcatgggattttattagtcttttacctagagagtaatttttgtgtatataggaattcacagaaagtaaaagaggtgcttagatccaggaacttgtgtacttaacaaaagaaaagaggttggataataaattgtggggaaccatctaagaaataatgataaagcccttgccagacacgaatgggcacctttcagtttcgtttccgtgggctgtgaatcttattttgagctaggtttcagtttgctcagataggaactcaaggtgctccgactttgcctgccaagttgtgtccaggtagtccataaaaactgctgtctttccacacatgtataaacatattgggtttacttcttcatgatgtttagtaagaactttagaattgatttaaccaacactgagggacacaaagaatctgggtaactcccctcctcccttttcagaggcaattcctgtcttaaactccagacatttataatcttatggaaggtttttcattttcttttctctttctttttctttttcctttctttttttctttctttctttctttctttctttctttctttctttctttctttctttctttttctctctctccctttctttctttctttttctctctctccctttctttctttctttctttctttctttctttctttctttctttctttctttctttctttcttctttccttccttccttccctcctctctctctctctctctctctctctctctctctctctctctctctctctctctctctctctctctctctttaaaatttgtttctgttcccaaagaaccaattcaggcactgaatgatctgcatgttgacctggtgagctgtgggaaggaacactctgtggctgtctgccacaaaggaaaggtcttcgcttggggagccggttctgaagggcagctggggattggagaatttaaggaaataagctttatgcctacgtaagtatttcaattcactactttccagtatttttaagtgctaagtactcaaatgccatggcacagagattactagtgtaagggttaaaatgtgctgagaaaagtgttcaggaaatcatgtgtagaatcagttcattaaatagagggccatgaaggagagagtaaggatgaaatgatatgcgattcttaagtcctgatattacttattgtaatacaagtatgggagcccccttgaacttctacagtaaataaataaataaataaataaataaataaataaataaataaataaagtattttaaactacaaactatcaagataccaaggactaagaaagaaatcttacttgattatcttgtatctgactaaagaagagcctctcacattatttcccaaatgctcaagctcctatatgggagaatatccattaccattgtgatggaaaaggttaatggaacatgctgtcctcttccactgatgctctaaaatgcatagacctttgctgagacaggagaatcagaagttcaaggtgatccttacctacataaagacatcagagaccagccaggcctatgtgagacccgttcttacccttctccccttaaaaactaactctaagtgccacaagcagacacagacaaacaaaaaacccaacccacaccaaagaaagacaacagatgctaggggattttggctgtgggctgtgtgtggaagtgaagatagtggattaaggagtgcacagcagagactcgtggttcttgtcaggtagtcagatgtcttgtcatttagtgatgcaatggttagatggatgacattcctgctgtttccaaacactacagccagtgaaatgacagccatgggagtggcattagcagggtcggtgtgggaaagaagactctctggtcctttgaaaagatatgggaggtgcagaataggaaaacccaatgctactgtcttcagagaggaacaggggtggtctgtagttcttggaagctgggagcaaaacccttctcctaaatagcgaaaatcataaaaagcaggaaggaaaaaaaccagcttaacactttggaaaagtggtattccagaagcacagaataacattgttcgctgagatctgatgtctcatctaaaatacttttacatgtctgtaatttctttgataactcatcctaaagaaggttcaacagatttctgtgactttttttaaatataggaaaataaaagctctggctggcataaaaataatccaagtttcctgtggacactaccactctttggccttatcagaaggtaaggaatacttagagggcctctgtcattaggaaatattttaaaataatgttgtggagatttgattaggactggactgacgctcttcattgcttttggtaggatggtcattttcacaatattatttctgcctgttcataagcattggagagctcttcattttctaatgtctccaaatctcttcactcagagattttaagttttcattgtagaggtctttcccctccttgcttagcttggttcctagatagttattttctttgaggctattgtgagtgggcatgtgtccatcacttctttctcatattgtttattgatggcctttagaaaggttactgattttgaagagttgatttttgtgtcatgtcgttttgctgaaattattggttctttctagaagttttctgatagggtatttggagtcagttatgcctactagcgtgtcatctgaaaataaagataattttactttttcatttttatctttgactcttaaatttcctctgttgcgttctgctccaaatagtgcttggacagtgcttaggacagtagacagcttctccaccttcctagttttaatgggagtgactcaagtttatcttcacttatgatatttctcaaatattaatttttaatttaaaattaattttattaattattaatttgcgttacattccctctagtactactatctctaggatttttattctgacagtacgttggattttctcaaaggcatttgcatttattgagatatttatcttatctttaaatctatttatgccagctggagaccctttattattgtttcaatcacatttgttgtgagtctgtttagggtgttaatttctttggtggtttggataaatctaaaaatctgtgcagttcttttagattttccaacttaatagagtacaagttttcttttaaaaattaattcccttttaatagtctcaatttatttggcatgtattataatatttcaatattattttctgattttgtgaattcggacatgtcttcctttcttttgattagttgggctaagggtctgtcaattttgtttatctcacaaagagccagcacttagattagttaatagtatggttccttttgctcaggattaatgtggctgtgcaaggtcttctatagtttcacaatgaattttagaatgtttggtttttctgtttcggtgaagaatgctgtggagatattgtttggaattttgttgagtctgtaagtggctctgacaaaacatttcttttcacaatattaattctgtccacccacatccccatgaaagggctatctatttattgtcttgtgtcttcctcagcctttttcttcagggataaagttttcatcatagatgtctttcactgccttgcttaggtttattcctagatcatttattttccccgagacagttgtgagtggaactgtgtcattatctcttccctcagcaaatccattgttgttataaaggaaagctgctgagttttcaagttgatcttgtatcccaccactttgctaaaattgttgatcatttctaaaagtctcttggtaaaaattttgtgatcttgtatatataatatcctatcatctgcaaataaaataatttgacttcttttcctatttgcatacctttcatttttcttcttgtcttattgctctagctggtattagagtactaagacacatattgaaaaataacagggcttgtgggcagccctgtctctttcctgattttagtatgattgcttcaagcctttctccatctaggaaaatgttagccatggatttatcatattcaatctttgtgttttttattttttattttgttttgttgttgttgttgttgttttcaagacagggtttctctgtgtagccctggctgtcctggaactcactctgtagaacaggctggcctcgtactcagagatctgcctgcctctgcctcccaagtgctgggattaaaggcatgcgctactactgcccagccatatgcagtgtttattatattgaggtatgttccctccagtcttcctatctctagaagttataatgaaggagcagattggattttgtcaaaggtgtttttttcctgtatctattgagatgatgatgtgatttttttccccttaaacctacttatattatttatcaagccacataatttgatcctttcttgtatctttagaatagagcctgctttgatgatcttttgactgcatagtttgaaagcattctattgagcatttttgtatttatgttcataagggatattggcctgtagtttaggcttatttgctgtgttcctttcattggtatagactggcattagcttcataaaggagtttggagctgttctgtttctttctttttgaatgatttaagaagcattggttgaacatcttctctgaaaatctggtagaatttgctgtgaatttgtctgggcctggtattgttttagttggtaaggtttttattacaatttcatttccttatctcttacgggtttctttagttagtcatttcttgaattaactttggtggtttggatgaatcatgaaaattatcaacttcttttaggttttcatatatacatatatatatatgcatacacatatatatgtatgtatatacatatgtgtatatttcatatatgtatatataatatttaatgacattaacttcatctctaaattatagctcagggttgcacaacgcataggagttaggataaggtaaaatatgtcagtggcatattctccttttcctgagcatagcttctttctttcttttctattatttttttattggatattttctctatttacatttcaaatggtatccccttttcccggtcctcccccaagtctctatcccattcctcttttccctgcttctatgagggtgttctttcagccacccagcactcccacctccccaccctcaaattcccctacactggggcatccatcaagccttcacaggaccaagggccttcccctcaccccccattgatgcctgacattgatcctctgctacatatgcagcaggagccatgggtccctccatgtgtactccttggttggtggcttagtccctgagagatctggagggtcttgtttgttgatgttgtttttcctatgggtttgcaaaccttttcagctccttgagtcctttctctatcttgtccattggcagcccatgatcagttgaatggttggctttgagcatctgcctctgtatttgtcaggctctggcagagcctctcaggagacaactatgtcaggctcctttcagcaagaacttgttggcatccacaatagtgtctgggtttggtgactgaatataggatggatgcccaggtagggcattctctgggtagcctttcctttagtctctgctctacacattgcctccctatttgcacccatgagtattttgttcccctttgtaagatggatgaaagcacccacactttggtcattcttcttgagctttgtgtggtctgtgaattgcatcttgggtattatgagctttggggctaatattcacttatcagtgagtacatactgtgtgtgttcttttgtgactgagttgcctcactcaggatgatatttttacgttccatccacttgcctaagtatttcatgaattcattgttttttaatagctgagtagtactccattgtgtaaatgtatcatattttctatatccatttctctgttgaaggaaaatctgggttctttccagcttctgactattataaatactgctgctatgaacatagtggagcatatatccttgttatttgctggagaatcatttggatatgtgcccaggagtggtatagctcgatcctcaggtaatactatgtccacttttctgaggaaccaccagactaatttccagagtggttgtaccaacttgcaattctaccaacaatagaggagtgttcctctttctccacatccttgccagcatctgctgtcacctgaaattttgatcttagtcattctgactggtgcgaggtggaatctcagggttgtttggatttgcatttccctaatgactaaggatgttgaacatttcttaaggtacttcttagccatccagtattcctcagttgaaaattctgtttaactctgtacccattttaaaattgttttaggttttctttttttttattaggtattttcctcatttacattttcaatgctatcccaaaaggtcccccatacccaccccccaaccccctacccacccactccccctttttggccctggcgttcccctgtactggggcatataaagtttgcaagtccaatgggcctctctttgcagtgatggccaactaggccatcttttgatacatatgcagctaaagacaagagctcccgggtactggttagttcatattgttgttccacctatagggttgcagttccctatagctccttgggtaatttnnnnnnnnnnnnnnnnnnnnnnnnnnnnnnnnnnnnnnnnnnnnnnnnnnnnnnnnnnnnnnnnnnnnnnnnnnnnnnnnnnnnnnnnnnnnnnnnnnnnnnnnnnnnnnnnnnnnnnnnnnnnnnnnnnnnnnnnnnnnnnnnnnnnnnnnnnnnnnnnnnnnnnnnnnnnnnnnnnnnnnnnnnnnnnnnnnnnnnnnnnnnnnnnnnnnnnnnnnnnnnnnnnnnnnnnnnnnnnnnnnnnnnnnnnnnnnnnnnnnnnnnnnnnnnnnnnnnnnnnnnnnnnnnnnnnnnnnnnnnnnnnnnnnnnnnnnnnnnnnnnnnnnnnnnnnnnnnnnnnnnnnnnnnnnnnnnnnnnnnnnnnnnnnnnnnnnnnnnnnnnnnnnnnnnnnnnnnnnnnnnnnnnnnnnnnnnnnnnnnnnnnnnnnnnnnnnnnnnnnnnnnnnnnnnnnnnnnnnnnnnnnnnnnnnnnnnnnnnnnnnnnnnnnnnnnnnnnnnnnnnnnnnnnnnnnnnnnnnnnnnnnnnnnnnnnnnnnnnnnnnnnnnnnnnnnnnnnnnnnnnnnnnnnnnnnnnnnnnnnnnnnnnnnnnnnnnnnnnnnnnnnnnnnnnnnnnnnnnnnnnnnnnnnnnnnnnnnnnnnnnnnnnnnnnnnnnnnnnnnnnnnnnnnnnnnnnnnnnnnnnnnnnnnnnnnnnnnnnnnnnnnnnnnnnnnnnnnnnnnnnnnnnnnnnnnnnnnnnnnnnnnnnnnnnnnnnnnnnnnnnnnnnnnnnnnnnnnnnnnnnnnnnnnnnnnnnnnnnnnnnnnnnnnnnnnnnnnnnnnnnnnnnnnnnnnnnnnnnnnnnnnnnnnnnnnnnnnnnnnnnnnnnnnnnnnnnnnnnnnnnnnnnnnnnnnnnnnnnnnnnnnnnnnnnnnnnnnnnnnnnnnnnnnnnnnnnnnnnnnnnnnnnnnnnnnnnnnnnnnnnnnnnnnnnnnnnnnnnnnnnnnnnnnnnnnnnnnnnnnnnnnnnnnnnnnnnnnnnnnnnnnnnnnnnnnnnnnnnnnnnnnnnnnnnnnnnnnnnnnnnnnnnnnnnnnnnnnnnnnnnnnnnnnnnnnnnnnnnnnnnnnnnnnnnnnnnnnnnnnnnnnnnnnnnnnnnnnnnnnnnnnnnnnnnnnnnnnnnnnnnnnnnnnnnnnnnnnnnnnnnnnnnnnnnnnnnnnnnnnnnnnnnnnnnnnnnnnnnnnnnnnnnnnnnnnnnnnnnnnnnnnnnnnnnnnnnnnnnnnnnnnnnnnnnnnnnnnnnnnnnnnnnnnnnnnnnnnnnnnnnnnnnnnnnnnnnnnnnnnnnnnnnnnnnnnnnnnnnnnnnnnnnnnnnnnnnnnnnnnnnnnnnnnnnnnnnnnnnnnnnnnnnnnnnnnnnnnnnnnnnnnnnnnnnnnnnnnnnnnnnnnnnnnnnnnnnnnnnnnnnnnnnnnnnnnnnnnnnnnnnnnnnnnnnnnnnnnnnnnnnnnnnnnnnnnnnnnnnnnnnnnnnnnnnnnnnnnnnnnnnnnnnnnnnnnnnnnnnnnnnnnnnnnnnnnnnnnnnnnnnnnnnnnnnnnnnnnnnnnnnnnnnnnnnnnnnnnnnnnnnnnnnnnnnnnnnnnnnnnnnnnnnnnnnnnnnnnnnnnnnnnnnnnnnnnnnnnnnnnnnnnnnnnnnnnnnnnnnnnnnnnnnnnnnnnnnnnnnnnnnnnnnnnnnnnnnnnnnnnnnnttggaattttgatggggattgcattgaatctgtagattgcttttggcaagatagccatttttacaatgttgatcctgccaatccatgagcatgggagatctttccatcttctgagatcttctttaatttctttctttagagacttgaagttcttatcatacagatctttcacttccttagttagagtcacgccaaggtattttatattatttgtgactattgagaagggtgttgtttccctaatttctttctcagcctgtttatcctttgtgtacagaaaggacattgacttgtgtgagttaattttatatccagctacttcattgaagctgtttatcaggcttaggagttctctggtggaatttttagggtcacttatatatagtatcatatcatctgcaaaaagtgatattttgacttcttcctttccaatttgtatccccttgatctccctttgttgtctaattgctctggctaggacttcaagtacaatgttgtataggtagggcgagagtgggcagccttgtctagtccctgattttagtgggattgcttctagcttctcacaatttactttgatgttggctattggattgctgtagattgcttttatcatgtttaggtatgggccttgaattcctgatctttccaagacttttatcatgaatgggtgttggattttgtcaaatgctttctcagcatctaatgagatgatcatgtggtttttgtctttgagtttgtttatatactggattacattgatggatttccgtatattaaaccatccctgcatccctgggatgaaaccgacttggtcaggatggatgattgttttgatgtgttcttggattcggttagcaagaactttattgaggatttttgcatcgatattcataaaggaaattggtctgaagttctctatctttgttgggtctttttgtggtttaggtatcagagtaattgtggcttcatagaatgagttgggtagagtaccttccgtttctattttgtggaatagtttgtgaagaactggaattaggtcttctttgaaggtctgatagaactctgcactaaacccatctggacctgggctttttttggctgggagactattaataactgcttctatttctttaggggatatgggactgtttagatggtcaacttgatcctgattcaactttggtacctggtnnnnnnnnnnnnnnnnnnnnnnnnnnnnnnnnnnnnnnnnnnnnnnnnnnnnnnnnnnnnnnnnnnnnnnnnnnnnnnnnnnnnnnnnnnnnnnnnnnnnnnnnnnnnnnnnnnnnnnnnnnnnnnnnnnnnnnnnnnnnnnnnnnnnnnnnnnnnnnnnnnnnnnnnnnnnnnnnnnnnnnnnnnnnnnnnnnnnnnnnnnnnnnnnnnnnnnnnnnnnnnnnnnnnnnnnnnnnnnnnnnnnnnnnnnnnnnnnnnnnnnnnnnnnnnnnnnnnnnnnnnnnnnnnnnnnnnnnnnnnnnnnnnnnnnnnnnnnnnnnnnnnnnnnnnnnnnnnnnnntatgttgttgccttcattttccattaacctccaaaaaaagtccttaatttctttctttattcccttcccttgaccaaggtatccattgagaagaatgttgttcagtttcccacgtgaaatgttggctttccattatttatgttgttattgaagatcaatcttaggccatggtggtctgataggatacatgggacaatttcaatatttttgtatatgttgaggcttgttttgtgaccaattatgtggtcaattttagagaaggtaccatgaggtgctgagaagaaggtatatccttttgttttaggataaaatgttctgtagatatctgtgaggtccatttgtttcatcacttctgttagtttcactgtgtccctgtttagtttctgtttccatgatctgtccattggtgaaagtggtgtgttgaagtcgtccactattattgtgtgaggtgcaatgtgtgctttgagctttactaaagtttctttaatgaatgtggctgcccttgtatttggagcatagatattcagaattgagagttcctcttggaggattttacctttgatgagtatgaagtgcccctccttgtcttttttgatgactttgggttggaagtcaatcttatcagataataggatggctactccagcttgtttcttcataccatttgcttggaaaattgttttccagcctttcattctgaggtagtgtctatctttttctctgagatgagtttcctgtaagcagcaaaatgttgggtcttgtttgtgtagccagtttgttagtctatgtctttttattggggagttgagaccattgatattaagagatattaaggaaaagtaattgttgcttcctgttatttttgttgttaaagttggcattctgttcttgtggctgtcttcttttagttttgttgagggattatcttcttgttttttctagggcatggttcccgtccttgtattgttttttttctgttattatcctttgaagggctggattcgtggagagataatgggtgaatttagttttgtcgtggaatactttggtttctacatctatggtaatttagagtttggctgggtatagtagcctgggctggaatttgtgttctcttagtgtttgtataacatctgtccaggctcttctggctttcataatctctggtgaaaaatctggtgtaattctgataggcttgcctttatatgttacttgacctttttcccttactgcttttagtattctatcttcatttagtgcatcccatgttctgattattatgtgtcgggaggannnnnnnnnnnnnnnnnnnnnnnnnnnnnnnnnnnnnnnnnnnnnnnnnnnnnnnnnnnnnnnnnnnnnnnnnnnnnnnnnnnnnnnnnnnnnnnnnnnnnnnnnnnnnnnnnnnnnnnnnnnnnnnnnnnnnnnnnnnnnnnnnnnnnnnnnnnnnnnnnnnnnnnnnnnnnnnnnnnnnnnnnnnnnnnnnnnnnnnnnnnnnnnnnnnnnnnnnnnnnnnnnnnnnnnnnnnnnnnnnnnnnnnnnnnnnnnnnnnnnnnnnnnnnnnnnnnnnnnnnnnnnnnnnnnnnnnnnnnnnnnnnnnnnnnnnnnnnnnnnnnnnnnnnnnnnnnnnnnnnnnnnnnnnnnnnnnnnnnnnnnnnnnnnnnnnnnnnnnnnnnnnnnnnnnnnnnnnnnnnnnnnnnnnnnnnnnnnnnnnnnnnnnnnnnnnnnnnnnnnnnnnnnnnnnnnnnnnnnnnnnnnnnnnnnnnnnnnnnnnnnnnnnnnnnnnnnnnnnnnnnnnnnnnnnnnnnnnnnnnnnnnnnnnnnnnnnnnnnnnnnnnnnnnnnnnnnnnnnnnnnnnnnnnnnnnnnnnnnnnnnnnnnnnnnnnnnnnnnnnnnnnnnnnnnnnnnnnnnnnnnnnnnnnnnnnnnnnnnnnnnnnnnnnnnnnnnnnnnnnnnnnnnnnnnnnnnnnnnnnnnnnnnnnnnnnnnnnnnnnnnnnnnnnnnnnnnnnnnnnnnnnnnnnnnnnnnnnnnnnnnnnnnnnnnnnnnnnnnnnnnnnnnnnnnnnnnnnnnnnnnnnnnnnnnnnnnnnnnnnnnnnnnnnnnnnnnnnnnnnnnnnnnnnnnnnnnnnnnnnnnnnacctttcaccatctggcaatctctggagttagttgttatagttgtctttgtttagagattgttcctctgttgattttgttaccctctatcagcagacgtgggagactagctctctcctctgagtttcagtggttagagcagtctctgcaggcaagctctcctctttcagggaaggtgcacagttttctggtgtttggacctcctcctggctgaagatgaaggcccaaaacaggatctttcccagaagctgtgttgttttggccaggaaggtggccggttgtctggagccgaagatggcgccgcttcagaagctctgtggctctcgcctgacccagaaacggctggcctctgtattctacactgtcacctgtgcagcctgccctccgcggagtcccggagccaaggtggctcccgcctgagcctgaggcagaaacctctcaggccgggcagacccctgtgctctcacccggaaggtggcggttgtctcttttaggttttctagcttagtggagtacaagtttttcaagtattcccttataatattctgaatttctttggtgtatgctgtaatgtttctatgttcgtttttgattctgttcatttggaatatgtctttcgttatttatcttcttaaagaaccagctttaagaactcagtattgtttttgtttgtgtctgttcgtcaatttctgtactgatttttttttttttaatatcttgccatctactagatttgggattggtttgttcttgtttttccaaatccttcagttgcatcatgaagtcatttatttgtaatctttctagtttttaatgtaggagtttaaagctgtacattttcctctaagcctcacatttttaaattattaattaattaattaattaatttattatatgtaagtacactacagctgtcttcagacacaccacaagacggcatcagatctcattatggatggttgtgagccatcatgtggttcctaggatttgaactaggattttcagaagagcagtcggcattcttaaccactgagccatctctccaaccccctaagcctcacattttaatgtgtaccagaggttgtgtgtattgtggttttattttaatttacttccataaattttaaaattattttcttgacttatactttgactatttatcaccaactaatgagttgtttaatctcaatgagcttgtctattgttttgtttgctgacaattttgctttattccattatgatcaggtaggattctgagttatttggatttttctgaatttgttcagaatatttttgtgtcccagagtgtggtgtattttagaggagcttccatggactgctcagtggaatatatattctttggcatttcagtgaacgttctaaaggtatctgttaggttctccagatggccaatctaccagagaaagtaaggtatcaacatcatatgatattattaagttggagttaatctgtctttacttccagctctatggttgctataaagttgtgggcagtagagtttagtttaaaatcctcttttgtcccttctatagtcacttggctatgcatattcctatctttagtctgaggtattgctttctgtattcttttcaggtctgattttgtagacacaaactcttttaacatgtctgtatcatgaaaggttttctttctacctcatatatggctgatattttcactgggtacagacatgcagctttgcacttatggtgttttaggagttagatgcgttgctccaagatcttctggctttcaaagtttctattgaaaaaccagttgttatgatgatgggttgtcctgtatgtctgtttttctttttcttctagaaacttgcaacacaccttccttctttacatttttccttctttacatgctttaactattgcatgccatgactaattttttttctgatcttgtcacttgatattctgcatgtttcttctatttttctgggtatatccttccttagcttgaggttgatcatactgaacttctggcccgtgtcactcatctgggacttgtcccctttatctatgccttagttctaagattgatcttttatgctttttcacgattcatacatgtcctgcactagacatgcccattcttttcctgtttttaaaaatacattttatattctttgcttgtattttctaattctattttttatccttgatattccttcttttatttaatttatttggaagccttcttctgagggttccaaatggaatattaatatattttttaaaattccattttcatttcagcttgggttctcttcaatatttttatcttttcattaaacttggatttcaaattttctattttctttgtcatttcactcatgtttgtattttattgatcatcaataagacacttattctacaagttcactaaatagtgtccattttaaaaaaacttcttgcattttttggtgacatttatggttgttcattttaaggtctgtgcctcagtgtccatctaggtaattctgactgaagaatatttctatagcactggttgatttgggggtgtacatactgtcctgatcttccatattgtttttgcaagatgatagggaatttggacatttctgttggctgtttctgatgtagatgcagcagaatgtgaggctgggctctagtgcaggatgtgtgtgctggccttggcctggagaatggatctatcccaatcttcatggggtgatcagagtcaggaagggtcctgcaggtgggttacctgtgtcttcccattgcatagtccagctagaaggtacttgttagaaaggagcctcttatatggtaagtcccaaagagggactgagggatgtagctgcagggtgacctgagttggggactggacttaatttttttttttaaatattattttggccacccttgacagaaaagactgttgaaagcaaaggaggcatggtggaacaccagtttggtactactataaagtggtaacaattaagaaatgagaaaaagttgaactctacatagttttgtcagtggggggaaatggggatttaggattttctagctagaagcatatagaaaacacaagtcaaggacaactccaagtatctggtggcagaaaagctgtaagaacgcagttttctttgcaagggagaagaagggacattgttttaaaggggatcttgaatatgtcttgccttttgtccaaaaaatttagtcctattttctcttttattttggttttattttttgaaggcttgtagaatcaagtctagtacaaaaaaataggcgaatcgtgcatttgcaactttaggatattataatagtaacttaaggtaaacataaaaagacaaatactacctaactcacctacacataaaatcaaataacattgtactcacagaaacagaatagagtggctattgccaggaacatgcaggtagccggaagaaggaagtgttcaaaggctacaaactcgagtttaggatgaatggggtctggaaaccattgtcccatgatctgaatatccataataataatagattgtatacttgatatttactaagagagaagggttttgctttgtttcactctcttgtttgcttattttcttggacctggccattgagcccaagaccttagttggtctcagcacactctagagctacagccccagccctacaagcagaatttggcaaaataaaacaaaaccacctgtgtgaggcaatttatttagctaattttggtatttattttacagtgtatatgtatactagaatactacttcaatatttcaaatatgtatgcttcctttgtcaatggtacatctataaaaccagtgtgtgtgtgtgtgtgtgtgtgtgtgtgtgtgtgagtgtgtgtgtgtaactgaggtgatagattttactgtgttgggaatccagtaggtgtacagttcttaagtgttcttcatgtatgtagatggccacgtgttttcatggggaaggaacagtgaaggacaactgggcctggggaagaattcccgttctcaagctattccacagaaggtgaagtctctggaggggatcccactggctcaggttgctgcaggtggcacacacagttttgctctgtctctcacggggacatcatttggctgggggagcaacagatctgggcagttggctctcagcgggaacaaagttaaaggtaagaaaatagttttgtccttctaacaagttgttattcctttgtagctggaagagtggcctgccacagtgtacatcaccgtggttcccaaactcactctggcatgacctggaaagctgtatcagcttcctcttgcttctggaataacatcacaaattaacaatttaaaacaatgctttttctaaatgtagactcagaggagtctgttccttggtctcagccagcagggttgccttgtctcctgaaggttctgaacaagagtccccattttcttgtcttgtctagcttctatataggactctggcattaataggctatttcctgtttctccaaagcctgtgttgtcagattaagtcttttaaaaatcatgctatgatcacactggctcttttgcctctagctcccttagctaaaggaataacattgggcccccctggatcatttagactaacctgtctatttgaatgtcaactggtcagcgttttaaaattcgactggcttccttattggctgtttgccaggtaacctatcatatttacaggctctggccttgggatgtaaaccatctgtctaccataggatgcctttaaaattcttgatgctcaggttaagctgaaaattagatcacgatgtctgtgagtgacagtcaggccattgttatgaattcccatggtgttctaatatgtaaactttggaaatcaatgattagactgagcctgttagagaaaatgactagcttgtatgtttaagaaaaagtctgggcaactgtacctctaaaatataattcattaagaagtcttctccaagaacttcattctcttctgttcattctttgtatttcggctgatgaatatcagcacctactatgtgaaagagcacctacatcccatttaatccttttatggtaggttctctagttctcagtgtcactaatacatacattcggcacatactatgcatcagaaatgaatacaaactatgaaaacataattggtactgaagcttggaaccaaagctgttctagaaggttaaagatttcctgaaataaatattagagtgcatattttcccatcaaagcatactttttctttttaattctactgcatattcacttttaaaattatgttgagtcataagacagaaatgtagagattataaaagttataaaaatatgaagatacaaaattctgaggctgtctcccccacacactctagagcctcactttgtagcctaaactgctctcaaacatacaaatgtgtctctcaatcgttttcctatattctagaaagtcttctttcttttaacagaacaaatctacaagccgcattcaattggtgccctgaagaatctgagtgtgatttatattagctgtggttatgagcatactgcagtgcttactgaggtaattccacatgtgcttctccttttcagatatcagagatttattaaaaacatagatgtgctatttattattgaaagcaagcaagtgatcttactctgtccaggttactgtatcaaaaccccaccaactgtgcagctaagagacaccagaggtatggcttctcatagctctagaggctgggaaatccgagaggtgccagcaggtttacaagtaatgatgggaaactttctgattcccagatggcattttgctctgttctcccgcagtagaaggggtccaaggtattctggatgagttttcttttataaagaaaacaactccattcatgaaggctttgtcctgtgacttgatcatctaacaaaggcctgattccatttcccaatagtgctttattagaaattgggttttgtttaaagatttattttgtgggtagaagtgtgttgtatgttttctttctatctttcattcttttattagatattttcttaatttacatttcaaatggtatcccctttcctagtttctcctctaaaaatcccctaccccccccctcctgctccccaacctactcactcccactaccctccttggcattcctctacactggggcatagagccttcacaggaccaagggcctctcctcccatgatgaccaactagtccatcctctgctacatatgcagctataatcatgagtccctccatgtgtactctttggttggtggtttagtcccagggtacactgggggtactggttagttcatattgttgttcctcctatggggttgcaaaccccttcagctccttgggtcctttctctagctccttcattggggaccatgggctttgtccaatggatggctgtgagcatccacctctgtattttgtcaagcactggcagagcctctcaggagacagctatatcaagctcctgtcagcaagcacttgttagcatccacaatagtgtctgggtttggtgggttgtttatgggatggatccccaggtgaggcattctagaaggagtacacaaaccaaaagaaaatagaaaaaggacaaccagttttaactttttctccttaaaaaaataattgtagggctggagagattgtttagtggttaagagcactgactgctgctctttcagaagtcccgagctcaattcccaggaaccacatgatcagctcacagccatctctaatgggatctgatgccttcttctggtgtgtctgaagagagctgcagtatactcatatacattaaataagacaaacacacacacacacacagagaagtgtgttgtatgcatgtgtatctaagcatcattgaggccagaggaggggccagatcctctggaactgcattacagagctgttaggctccttctgggtattaggaacagaccttagaccatctataggagcaacaagtgttctaactgctgagccatctctccagaccccagaagttaggattttcataaacaaattttaaaagaacagatatgacacaaaaatgaatttcaatatataaacctacctatatctaaagtggaaaactgaactaaatataagccagcagatgtttcaagatactgtactagaagctaatgtaggagccagtctttcatgcagttattcattggcaatgtggatcgacagaaacatgttttatcattttcagtaacccatcgcacagaccagaacacactttgttccattctgtgattgctataatgatagccagttttgttagttttttttcttctgccactatcctggctgtccaatgtatttgaatgggatggattcttcccatcatcaaaagatacagacttggaacagtatttttataattcagatgcttgtataaaaactgaaatctgtaggaccaggtggtgtattaagggtagaatgtttgcttgggtgttagagttgattctcagcactagaaaaaaatgatacaccaaataatttttaaaatttattattattaactataattattttcaataaataaaatgcaataccttaggagtgctagataagtgctccaccactgacctacattattttaatgtccaccaaattattttcatttttaattttattatttttcttagttgttctaaagccatgacttaaattaggaaacctcaattgtctgaactatattaatcaattgttcaaattacattaatcttagttgtgaagagaaaggtagacctgtgtgtgtgtgtctgtgtctctttctgtgtctgtgcgtgtatgcatgtgcttgtggagaccagcggataacattttggtgttttggtattggacctgaggagctacccaccttgttttgtgaggcagggtctttttcatttgcctggggatcccaacagaccagggagcccaagggatcctttatttccatattgctagcactggtattacaactgcacattgcaatgccttgatttttatgtgaatactttgcttgtgatatgaattcaggtcattgaattcaactccccatgcttacatgaccaacattttaccaactaagtgattccccacaagctcctagatttgttttaaagaatcacattttaaaaaattatattttttaaaatcattttttaaaagatttatttatttatttttattttataattcattggtgttttacctgcatgtatgtctgtgtgagggtgtcagatcctctgaaactgaagttacagacagttatgagccgttatgcgggtgctgggaatggaaccccggaactctggaagagcagccagtgctcttagcttttgagccatctctccagcccataagaatcatctttggaggagagagtgttttcaggaaatgcccaaataagtaaagcagccaacccaatacttgaatgttggtgttagagtttaagcagttaagttgtcattgattccgttagcaaatacccattaagtatctagtttttatgcctgggggtgggtacctgcttagaggtgaatgggaaagggaatataaggaagaactctatgaggtggggtgactgggagggaaggcaacatgtaaataaatgagggatgaaattaattaattaattaattaattaataaaaagcagccagttcttttcttagacttattggaacacagttcacaaagttatagatatgcctggtgtatatatagtatatgtgtcgaaaaggtatctttctcttccttaaatgatagtgagagggagaaggggaagaagaagaagaaaagaagagaattatgaaaatatttaagatatattaacatttattttattatttttaactctatctctagcctcctcctcctctctctttctgtgtttctctctgtgtgtttctctctctctctctctctctctctgtgtgtgtgtgtgtgtacatgagtgcaaaaggaatcagtttccttggagctggagttacaggtggtagtaagcggcctgatatggatgatggaatcaaattcgggttctctgcaaagtagtacatgctcataatgttgaaccatctttacagcccctcccttagcaaatttaagtatgtaatacattcttaacatattcaaagtgcatagttttaaaggaaattccataaataaatttgtaaataatatttggaataataatataaatatttttgaataagtcatgaaattttataaatatataataaatataattttcatgtaaatggttagatatctaaatattcaaaatgccctcataattaggttatctaaaaccccaaatatatgctaatagtcatcatgttctacatgcatgaggttaattagtctcatcaacttgtatttaaaaatatgtaaataatatacacataaattattttgaaataaatttatggaaatttatcccataaatcaaatcataaatgacacaaaatttcacatatcactttcatactaatatcttgtgatagtttacctttaaaaacatgaaattaatctggttccttatttcttaaacaggagggacaagtgtttacatttggaggcaatagctctggacaactacagcccagccccaggagtggacaaagaggcccacaactcatagaaggaattggtggccgtgtttcacagatagagtgcgcaaggtaacagacctttttaaaaagtttgaatagacagttttgtgcttattacttagaaaccccaaaacacatggctctgcttttaataaagatttttttctttgaaaatttatctctttaagatacattttaatttaaaattttaatttctattaataattatgtagcaaataattattagaagcttactacatatagactgccttactctgagtagaaggtaggagagaattaaacggcaaaggtagggttgtttgcctgtttaagttgatgaaactaattaatctcatgcattcaggacatgatgatgattagcatatattcaggattttagataacctaattatagggcattttgagtatgtatgtatgaatatatgtatgtatgtatatatgtatttaatctattgcattaaaaaaatgaaaatcttccatttagaacacatagaatagtatatgggacccagaagtaaatttacacagatagggctacatagtatttgattggagaaaaactgaaacaaaataaatccctccctattcaacaaatgttgctagcaaaactaggtatccacctgtataaaagtgaaactagatttatatctcttactctgcaaaagttatctcaaagttagcctggaagatgctctgtggttcaaatgctctcagtgtaagtatgaggaccagagatcacatccccaggacccatgtcagtggcagtgggtgtggcagtctgcctgtaattgtagccttggaaggcttccccaagagactagtcatgtctgcagtctttggatgtgttcattaatagacattactttagtgaagaaggaataaaagcattggaagaaggttcttgacatgagctcagggacccaacaagctcacaaatacatttgccctaagtcatgtgtatgcatacctacatgcacagacaccatacatgcacagacaccacacacacactgggcatcatacatacacaactcaagtggactaaaaccttaatttgaatgtcaaagtcctgaaaatgctagagggagacacgaggaaaatctgtcaagatgcaggcagaaagtagtagaactttctgaaggactccaggggaataggaatagctctaagaattaacagttgaattgaatggaatttaaaggcttaaacaaagcaaggaaacctattaacagaattaacagacagccttcaatgggagaaaatccttgccagctacttcaaacagaaagctaaaacctagaccatgtaaaaaacacaatctgctaatagccaagccattaattgagcagaagggtctcacaataagcaacacacataaccatgaacatttttaggcatgtttactatccctagctttcagggaaatgcatatggaaaccaatttgagattctacctcactcaggcaacccttacccatgtcagaccagctgtcaccaggaaaaaaagtaaaaggaatcttggtgagggagagaaaaagtcagtgctgctgggggtgcaaactggtgcagtcaccatggaaatcaagagagagattcctcaagctgttaaaagtagagctaccatttgtctcagctgtaccactcctgggcatgcacccaaaggactccgatatcttaccacagaggcacttgcaaactattcaccaaagccagaaaatagaatcagcttaggtgtctcttgatagatggataggtcatgaatatgtgatatacatatacagaggaattttcttcagctatcaagaaaaaaaatgggatatacagtttccaggaaaatgaataaatctagaaattactatttaagagagatgactcaggcttagaaatacgaacgcatgtactgtctcatgcagatcttagcttttactgtttgtctgtgtgtatatgtgtgggtgagagcgtgataggtcaaaaaactataaaggggaccagaaagggagaaaagaagtgttaaggaaggcgggcaatggaacacgtgtgacaagaaagcagaaagaagatgccacaggggtggaaggataaaggagcagggacacagagagatggcagaagggactaataaaaacaagtgtttgacacagcatcgtgatgaagcctgatattttctatgctgtttttaaaattaagaataaataaataaaatacatgatatgtagcacaactggtggagtgcttgcctaccactcagtgagtcctgggatagatctctagaaccacatatactgggtgtggtggcagtggtctcagctgcaatgatggtggtgatggtggtggtggtggtggtggtggtggtggtggtggtgtggtggtgatggtgagctttgcctctaatgccagcacaaaggaggtcaaaggcagaaggatcaaaaagtcaagattatccttggctacatgaagagatggtggcaagcctaaacataaatttatttttttattttttttatttttttggtttttcgagacagggtttctctgtgtagccctggctgtcctggaactcactttgtagaccaggctggcctcgaactccgaaattcacctgcctctgcctcccaagtgctgggattaaagatgtgcgccaccatgcttctgtctcaacacagaaccaaaaaaaaaaaaaaaaaaaaaaaaaagccacatagtatgttaataccacctcttcagggattgaaggaggcctaggcctagtactctgcaacacaaatactataatgagacagctggctgtatggtgaaggtaaatctgtcatttccatttctttttaaactcatgggtgtttggttctttggactatcatattgtcactgttattgtattttatattgtagttatcacaccattgcatatgtctacaccactggtcaggtggtatctttaggccgtggaccaagtcacacaagcaacccaactcatcaggaggcccccgcagagaactctgatattacctgcctgctagctgcagagggtatgaatatttccactagctcgtgactgattgactgaaagagacatcgcattcagtcttctttcacaggatcccactgaactatgattttggttcttagtgctttcaatttaaactgctgaatctttttcctggagtaataggtaatcatttctaaagatttaagtgattcaaaagacatcaaattagttaattatataaacaacatggtttgctacattcaagcaaatagttaagtaagttaaccctgattcgttttgcaagggcctagacaactataaatgtttattgaatgaataaataatatttgatctggtcaaaattaattcttatgccatttgtagtcagaatttaggagagtatacatttctaacaaatgaataaatttaacttaattatatataggtttatttttccccagtaaaactttgaacgtggatctcttaattttatagaccttgtggatattgaagtcaaagacatttttgctggagcacacgccaactttgtgacaactcgtcgggtatcagtatgtgttattcctttttagacttatttttccctctagatttcaggaattcttactttcctggtgctggggactcaaacccagagccttgtgtatgctaggtaagcactttcttctgagctgtacccaccattccctaaatttcagagtattgtttgagacagtatattattcattttcagatctcttactaatgtgttcctctattaaaatggtagaaatgtcaacaagaccttgtctccaaaaacgaactgagggctggggctgtagctcagtgcgagagtacttgtcttgagtgcaaaatcaagaaccctgaatttcatctcgaaatggggatggcaggagaaagatgtgggcaatgaggggcaggcttaagacaaaagaagagagggaagatggggcaggggagatgcctgagacagaggggaagaagaggtacaaaatcaggctaccgtgcacagttgggaaagcaggggaggaaccaaataaaaagatgtgaaagaatggtttcttatttgggaacttggaggcagctttttccagagaagcatctctgcaggaaagtcaagacagacaagcacagagcttaattttaacagagagcaataaaccctggtgtggggtcaatgcaagaagaggagaggaagtggaaacaaggattttgacaacagagacattttaacaagaaagtaaaattagaagataatgggatggtttctcatgagtggcagaagaatgtcccagagcaggagagagaaaacagagtccagtgctgtagcagttcttctcactgtggctgtaataaaacactgtgaccaaaagcaaactggagatgaaagggttgaactggcttacagcttactagtccatcatgaagggaagtcagggtaggttctcagggcaggaacctggaggcaggaactgaagtagagagcctggaggaacactgcttcctgtcttgctgtgggttgttctgttacttttcttatatagctcgggctcatctgcctgggcatggcaccacctacagtcacctaggcctcacccatcaatcattcatcaagaaaatgctctatagaagcaaacaacgtaggccagtctgatagagccagttcaattgagattccctaagctttatgtcaagttgagagaatgtagtgtagaattgagatgtctcaggaaagaaatatgctgttgtggctgcagatgaggatgagttggtgcatagtactgcttgatgaccaaagctgatgtgagagtgagagaagcaaaggaatgtgggggaaggcaaggagaggagcaatggttgtctcagaataagagaaagcaactgtctttggaagtgcccatttgaaatttgtgatcacagattgaatgtggttggccagcacgatgggcagttgtcttcagtggtgtcaggcattgggaactgactttggagtaatccagacttgaacataatgacaagaaggaattttgcagtccaataagggaggcctaaaggagttgtgggagtgatcagaagagtgaagtttaggagctaagctagttccagagtaacgagatggtcgaagagcgagatctgatgcatggttagagagactgttctgaatgggtgcttaaaaatggagcaattgttagtgtaaaagtccagtttatgccctagacataagttcatgctttttaagtaagggtcattttgcattctaacaatcatttggttctgtctgtaggcattttagattggtatgctgacagtgactactactagcttctagtgggtaagggctaggaacagtgagtactaaatatcttactatgtgtagtatccttcacaacaaagaattatctaatcccaggagtcaatcgcttccgtttggaacccttctccctgtcaggagtagctaaaatgaggagagaaaggagtagaggtgagattgggagctgagatgttgaagcaagagatagacttctgtcatcacctttgaagttgtcaagaatgaggacagggagcatgaggacaggagcagtggtgagcacaagtgacaagaagcttgtgaagttttcaaggagaagctagaggaaaataaatgatacataactgccggtagggggcagatggttgtactgagatgcttagatacaagagaaaataaaccgttgtgattggtaaatttccaaaccactgggatttaaatcaaagtgctcaggtaggagctggaaatgtggctgagtctgaataaaatcctggcatagagcccatcaccagcacagtgggtagggacacttgaagcattgtatttgtacatatttttccagaggattttatttgattgaagaaaagtagtgtatgtgtgtgtgtttgtgtgtgtgtgtgtgtgtgtgtatgagtgtagtgtcactcttggctatatagtgagaccctatctcaaattacatataagattgtgtatgtggcatttgaaacacattgcctacaattttctgtggcattaattgcattcataatgccattaagtatcatcactgtttctcaaacattttagtcatcgcaagcagacacttgatatctattaaataataattcctcattccctggcctcctcagtcctagctaatttcttctttatttctataagtttgccatactttatatatggaatcataaaatgtctcctattttttaattgatttatttccacttagcatggtctagaatacacctacattatattatagtatcactttcaatgctgagtaatatttcactgcatattatattatcacattgaaaatgcattcatctgttgatcgatagtatggccgtttgaaggatggtaagatgaatattgatttataagcacctatctgtctctatttttaatcttttcttgcattattacactttttaaaatccagaccaagcaaaatggcacaagttaggaaacagaatgttcaccctgaagcaaaagctcaacccaccaaacacctatgcaagaggacaggccttgcctgtgcctggcactttactgattgtcactcaaagtgtatgtgcattcccctggtcatttttgtctttattttcttccttaaagcatactaggtctacaggtgtttccatgaaaatcctgccagaaataatccgaatcaaccagtctctggtaaagaaatggagagcagcaaataaaagaaaagatcgtgaaggcgccaaaaggtgactcagcttgatgacttagagtcccttctgtgattctgaagtcctaatcactttgtcctagctgtgagagagaaggtttagctttgtcctaacagaatttacattttgggtatgattctcttttattaacttttggttggatttgtcattaatgtgcatttgtaattaatagtttatttaatataagagctacagggagaatgtacatggcatgtacctttctaagtaagggagatgtatgaatggatcttagcagcaagttgtactgcttttgggtcttcatagttgattcactctcggtcagaatttaggcctttagactaactggttgtattcattatttaaatgcaaatgcatagaaaaataactataaagcgttttggtgatactcattagtaacatctataagttatatgctcataatgtggatattaataatgagtctagaactctatttttatataagataaaggaggctataggtatttctatcctgcagcccacaggttacatgaatcctagaatacctgtaagtactgctcaacacatttgcatatgacagtggttctcaaccttcctaatactgtgacattttaatacagtccctcatgtgtggtgatcttcaaccataaaattattatttttggtatttcataattaattttgctactattatgaatcataatgtaaatatttggtattcccaatggccttagtccacccttatgaaattgtcatttgaccccccaaaagaggttgcagttcacaggttgagaagcactggcatatggcaatgtcacctcacagtgtccaaatgtgacttttcccttgtcttgttattatgtttgcagagaaatcagcttgatattttcatcttctgcttgtttgacagcgagctttctgaagaaaaggtaaagcttcagtggaatttactttatctaaaatactgggggccgtttaaaaggaaacttatagaaccagattgagtgtgaattttgtcatcacatggattccaacatagagaattctctggttgataaaagattctttcatgctataaactaactcctccatattcctccctctgttgtctaatgggagggaatggcattttggtcaggctattcatatctacagataaacagctgtacttaaacatgctttactatctcaaagccaggactctcatgtagaccagctggccttgaccttcctgtgtagttgaggaggaccctacatatctgaccctcctgtcctcatctcctagcagctgacattacctaatagtttaagtaattcttttaatgttcagtgtttgggccatctatatctcttaggaatctctctctctctctctctctctctctctctctctctctctcacacacacacacacacacacacacacgatccacattcccagaaattccatcacgtcttttttctttctttgcatgtgtcttaattacggttactattgctgtaatgaaagaatatgaccaaaagcaatttggagagaaaagggtttgtttagcttatgcttacaaatcactgttcatcattgaaggaagtcgggataggaactccagcagggtaggaatccggaggcagtatctgacccagaggccatggaggggtgctccttaatggcttgatcctcaggacctcctcagcttaattaatgtcttacagatatcaagaccagcagctcaggggtggcccaacccaaaatggcctggtccctccctcatcagtcactaatgaagaaaatgtgctataggctttcctatagcttgatcttatggaaacattttgtcagttgaagctccctcctatcttatgattctagtttgtgtcaagttgatataagactaaccatctcagtttgtgtgtgtgtgtgtgtgtgtgtgtgtgtgtgtgtgtgtgtgtgtgtgtgtgtgtgtgatgcttgtatatataaaggtgaaagccttcaaaggatattgggtatcttttgctatgcaacttgtatttcattttatttttgtaacaagagcaaaccaccactagaactagttggtaagattctgttggagaagaccgcatgccttggattgatgatattgagaaatcaagttgcaatcgagctataagattcttccctgctgggtggtttcatatacggaaatccatcaacataatccattatataaacaaacttaaagacaaaaaccacatgatcatctcattagatgctgagaaaacatttgacaaaatctaacacccattcatgataaaagtcttggaaagatcaggaattcaaggcccatacttaaacatgataaaaagcaatctacagcaaaccagtacccaacatcaaagtaaattgtgagaagctggaagcaatcccactaaaatcagggactagacaaggctgcccactttctccctacctattcaacattgtacttgaagtcctagccagagcaattcgacaacaaaaggagatctaggggatacaaattggaaaggaagaagtcaaaatatcactttttgcagatgatatgatagtatatataagtgaccctaaaaattccaccagagaactcctaagcctgataaacagcttcaatgaagtagctggatataaaattaactcaaacatgtcaatggcctttctctacacaaagaataaacaggctgaaaaagaaattagggaaacaacactcttctcaatagtcacaaataatataaaataccttggtgtgactctaactaaggaagtgagagatctgtatgataagaacttctagtctctgaagaaagaaattannnnnnnnnnnnnnnnnnnnccacccacccccactcccctacccacccactccccccctttggccctggcgttcccctgtaccggggcacacaaagtctgcgtgtcgaatgggcctctctttccagtgatggccgactaggccatcttttgatacatatgcagctagagtcaagagctcaggggtactggttagttcataatgttgttccacctatagggttgaagatccctttagctccttgggtactttctctagctcctccattgggagccctgtgatccatccattagctgactgtgagcatccacttctgtgtttgctaggccccggcatagtctcacaagagacagctacatctgggtcctttcagtaaaatcttgctagtgtatgcaatggtgtcagcatttggaagctgattatggggtggatccctggatatggcagtctctacatggtccatcctttcatctcagctccatactttgtttctgtaactccttccatgggtgttttgttcccacttctaaggaggggcatagtgtccacacttcagtcttcatttttctcgagtttcatgtgtttaggaaattgtatcttatatcgtgggtatcctaggttttgggctagtatccacttatcagtgagtacatattgtgtgagttcctttgtgattgtgttacctcactcaggatgatgctctccaggtccatccatttggctaggaatttcataaattcattctttttaatagctgagtagtactccattgtgtagatgtaccacattttctgtatccattcctctgttgaggggcatctgggttctttccagtttctggctattataaataaggctgctatgaacatagtggagcatgtgtccttcttaccagttggggcttcttctggatatgctttcatgaaattctttggcaaatgcatggaacttgaaaatatcatcctgagtgaggtaactcagtcacaaaagtacacactcactgataagtatgcactcactgataagtggatattagcccaaaagttaagaatacccaagattcaattcccagaccatatgaagacgaagaagaaagaccaaagtgtggatgcttcagtgcttcttagaaaggagtacaaaatactcacaagaggaattatggagacaaaatgtggagcagagactccaggaaaagccatccagcgactgccccacctggggatccatcccatatacagtcaccaaacctggaagctattgtagatgcagggaagtgcttgctgagaggagcctgactcctgagagactctgccagagcctgacaaatacaaaggcagatgcttgcagccaacattgaactgagcagggggtccctgatggaggagttggagaagggactgaaggagctgagggggattgcaacagtgtcaacaggccagaccgcccccctcccccagagctccagggaactggaccatcaaccaaagagtacagatggagggagtcatgtctccagccacatatgtggcagaggatggtcttgttggatgtcattgggaggagcaacccttgggcctgagggtgtttgatgccccagtgtaggggactacagggcgggaagatggagttggtatgtgggtgggggagcaccctcatagaggagggggtgatgggataggggatttttgaaggggagacctggaaagaaacaaccaattgaaatgtaaataaagaaaatattcaatgaaaaaacttcttatcattgttattttatttaaactatggaatttttcataattttaagtgaacattgaaggtctgatacttaaaaatacagtgctatatatcaactatccctgtaccatcttagaaggagttacagactcagatttttatgtgtaaccatgaaaacctccttttatgacagttaagatggataagtgggtaaatgtgctcagcacccacatggaaagctagcatggtttgtgtacctgtaaattcagagctgcaaggaacagagaaaggagaagagctgaggcttgctggctagcatactaggtctagattcagtgaaagaccatctctcaagagaacaaggcatagaataataaatcaagacactggacatccggctctgtnnnnnnnnnnnnnnnnnnnnnnnnnnnnnnnnnnnnnnnnnnnncacacacacacacacacacacgtctcttataacaaccctctctcaagaactaccatttattgcttaaggttaaaccatgtcttaaagttcccaccactttaccatttccaatgcacaggcctggaggaatgaactctagttgttccagaacatggaatgtgctatggatagttgcttccattcttctgctgctatagtagtagtaacatgtatttctttgatgtatataaacttacacttacaagaaaacagttacagaattaaatgattaagttgcccatgcatcattattaatggaatgagcagtgtgttttaaaattaaatataacaattttatgtgtgtgtactttaagtgaacttatgtgcattacatgtgtgtcgagctggtggagtgtaggagagaataacatatgttctagaactggatttacagacaattgtgagccatcatgtgggtgctgggaacggaacctggttctttgcaagagcagaaagtgcccttaaccatggagccatctctccagccccgtattcgcagttttaaaaagaggtgttttctgggtgtaggggtgaacatctgtaattccagaccttgagatatagaggaagtggaccaggagtagaatgccagccttggctacatagcaagtcagaagaagcctggactacttaagacattgtctcaagaaagaaagtgcttttttttcttgatataggagtcatatttcaaaagtcctagtccactcataaattaaaaaaaaaaatcccatgtccctaccatctcctctttaaaagtaccaaaatccagtgtaatctcaacaatattaaaagtgaggtgtaatctacctaaaataagtgtatatccatatgtgacagctgtttatgtaatctgaaaataggcattacttaatttttaggtagaaatgtcagtaacattgcatggtattcatctgtatattttcagatatttgtggctgtttgacaaaattgctagtttggaagtaatgaagtcagtacatgatcttaacctcagcacccagatgatcaggcaggaagcttggtagaagttcagggccagcctgggctacaatattaagggctacataaaaatgtcctatctcagaaacgtcaaatcaaacaacagaagcaaagaaaggatgaccaatcacttcatcataatcattaacaattttcttcaaattctgaatttgagtttctttaattttaatagattaaagctttgccctacatctgttgaatagtgtgttgtttgtgataacatccatagaagaattgttttatggttatgatggtagatatgggaaacattgtctatttcctgtcttaaacatcccagaagaaactgaggaaattaagggatgagaagaggaatacattctcatgtttggttttcacaccctcaggaacgtgttgggcatctttggaagtttcttcactgaacatactggttcagatgctaaagaaagccatcatctctcaaatacagtatggagttgcaacggagcagtatattactaatattaaagttcttttagaagtgataaaagaagtgcataaggtaaaatctcctcttaaaaaatgtatataccaatttattaaataataaattattattattattatttgattccttatttctctgtcaattacattttaaaaaatacttgaaattaaaatatgattataaaatctctccttccctttcttctcaaaaccctttccatatctccctgacatttctcttaaattcatggagtccttaaatatttttttacatatatgtataaatgcatatatttatcaatacaacctgttgggtccaattagcattgcttctatgtatatgatttcaggtcagattttggttagtattaaataaccaattggggggatcatccctggagataagtaatattccctttcagcagtccttgggttgactgtagtcttttttgtaggggtggaaccctgtgactgttctgctgtctgtagtagcatgtttataggtattgtcattgcttcatcctcattttggtaacctcagtattaaggtctcattgatgtagcttccctttcacttctaggaaacactatcatacaccagacttcctgaccctctaccttttatactcttttcacctccttccacagtgttctccagaactttgatatagaagttgtagatggtccttggcgaaacatggtcagttgttctctgcaatttgaccagttgtagttttttctgtaatgttctccatttgttacaaagagaagcatgtttgatgagggttaagagatacgattatctgtggatagaaggataattgtttagaatgcagttaggaattatactggtctagtaaagtaggcagtagtaggctcttctctaagactgacctcactagttctgggtagttggttagatttccagtaccaggcatggtttcccccctgttaaaagagccttacatccaattggagagctgttggttactgccaggacttgtgtaccacctttagagatctatcttgctgtactggtcgtgctgtggaacataggcatcatggctgggtagggctgtggtagcttccctcccttggcagcttccatagtatgttctgagacttctgagactataaaaactggataccagggaggggtctttctggtcagatccacatctaatgctgttagtccagtgtctgaagtatttggtgttttcaaccctctgggaagcagccaaaggcagcagcaatagcctgtatttgttttgggagtctcttgagctacccagaccaaaactcaaaaggaagtttcttatgcatagcactggagtttttgttagatagtctatagcccttcagagtacaagtgacataattttgtctctctctctctctctctctctctctctctctctctctctctctctctctcacacacacacacacacacacatgcatgcatgcaggcacacgcatacatgcatgtgtgtaattgtaggttaatataaaataaagtgattccttatggctttttcaaacatccttaatgtcattttctctgccctggaacatccttttctctattgatcccttgtcccctctctaattaaggtctctcaggattttgcatttcccctttcatatctcttgtatctgattattcccctttcaaatattgcttttctttcactctatccccatagtccccttttactatcctggtttctgtgatttcttcatgttctatgttcacacctaaagatttgggcaaggatatatggataagataaaacttgtgacattgcctttctgagtctgggttacctcactcagcataaacatatatagccctatttacatgaaaatttcactttttatttagagttgactaatattcagtagtgtatatgcaccacattgcatttttccattcataaacttaaggacatttatgttgtttccactttctagagattgtagacagcatggcaatgaaaatggccaaggaagtatctgtaaagtagagtattgtgatattttgaatgagaatggctccacaggcttatatgtttaaatacttgtcctgcatttggtggctgtttaagaaagattataagatatggtcttgttggagaagtattttacttggagaagtagcctgggggcaggcttcaaagattcatgctactttagactgcctctctctacttcctgtttgtgatccagatgtatgaatacatacatacatacatacatacatacatacatgtgatatataacctattcctgttccatgtccttatagactccaaccttctgaagcaataatcatagttaaatgctttctttttttttttcttttccattttttattaggtatttagctcatttacatttccaatgctataccaaaagtccgccatagccacccacccccactcccgtacccaccaactccccctttttggccctggcattcccctgtactggggcatataaagtttgcgtgtccaatgggcctctctttccagtgatggccgactaggccatcttttgatacatatgcagctagagtcaagagctccggggtactggttagttcataatgttattccacctatagggttgcagatccctttagctctttgggtactttctgtagctccttcattgggagccctgtgatccatccattagctgactgtgagcatccacttctgtgtttgctaggccccggcatagtctcaaaagagacaactacatctggatcctttccatgaaatcttgctagtgtatgcaatggtgtcaacgtttggatgctgattatagggtgaatccctggatatggcagtctctacatggtccatcctttcatctcagctccaaactttgtctctgtaactccttccaagggtgttttgttccctcttctaaggaggggcatagtgtccacacttcagtcttcatttttcttgagtttcatgtgtttaggaaattgtatcttatatcttgggtatcctaggttttgggctaatatccacttatcagtgagtacatattgtgtgagttcctttgtgaatgtgttacctcactcaggatgatgccctccaggtccatccatttggctaggaatttcataaattcattctttttaatagctgagtagtactccattgtatagatgtaccacattttctgtatccattcctctgttgaggggcatctgggttctttccagcttctggctattataaatgaggctgctatgaacagagtggagcatgtgtccttcttaccagttggggcatcttctggatatatgcccaggagaggtattgctggatcctccggtagtactatgtccattgttctgaggaaccaccagactgatttccagagtgtttgtacaagcctgcaatcccaccaacaatggaagagtgttcctctttctccacatgcaccccagcatctacggtcacctgaatttttgatcttagccattctgactggtgtgaggtggaatctcagggttgttttgatttgcatttccctgatgattaaggatgttgaacattttttcaggtgcttctctgccattcggtattcctcaggtgagaattctttgttcagttttgagccccattttttaatggggttatttgattttctgaagtccaccttcttgagttctttatatacgttggatattagtcccnnnnnnnnnnnnnnnnnnnnnnnnnnnnnnnnnnnnnnnnnnnnnnnnnnnnnnnnnnnnnnnnnnnnnnnnnnnnnnnnnnnnnnnnnnnnnnnnnnnnnnnnnnnnnnnnnnnnnnnnnnnnnnnnnnnnnnnnnnnnnnnnnnnnnnnnnnnnnnnnnnnnnnnnnnnnnnnnnnnnnnnnnnnnnnnnnnnnnnnnnnnnnnnnnnnnnnnnnnnnnnnnnnnnnnnnnnnnnnnnnnnnnnnnnnnnnnnnnnnnnnnnnnnnnnnnnnnnnnnnnnnnnnnnnnnnnnnnnnnnnnnnnnnnnnnnnnnnnnnnnnnnnnnnnnnnnnnnnnnnnnnnnnnnnnnnnnnnnnnnnnnnnnnnnnnnnnnnnnnnnnnnnnnnnnnnnnnnnnnnnnnnnnnnnnnnnnnnnnnnnnnnnnnnnnnnnnnnnnnnnnnnnnnnnnnnnnnnnnnnnnnnnnnnnnnnnnnnnnnnnnnnnnnnnnnnnnnnnnnnnnnnnnnnnnnnnnnnnnnnnnnnnnnnnnnnnnnnnnnnnnnnnnnnnnnnnnnnnnnnnnnnnnnnnnnnnnnnnnnnnnnnnnnnnnnnnnnnnnnnnnnnnnnnnnnnnnnnnnnnnnnnnnnnnnnnnnnnnnnnnnnnnnnnnnnnnnnnnnnnnnnnnnnnnnnnnnnnnnnnnnnnnnnnnnnnnnnnnnnnnnnnnnnnnnnnnnnnnnnnnnnnnnnnnnnnnnnnnnnnnnnnnnnnnnnnnnnnnnnnnnnnnnnnnnnnnnnnnnnnnnnnnnnnnnnnnnnnnnnnnnnnnnnnnnnnnnnnnnnnnnnnnnnnnnnnnnnnnnnnnnnnnnnnnnnnnnnnnnnnnnnnnnnnnnnnnnnnnnnnnnnnnnnnnnnnnnnnnnnnnnnnnnnnnnnnnnnnnnnnnnnnnnnnnnnnnnnnnnnnnnnnnnnnnnnnnnnnnnnnnnnnnnnnnnnnnnnnnnnnnnnnnnnnnnnnnnnnnnnnnnnnnnnnnnnnnnnnnnnnnnnnnnnnnnnnnnnnnnnnnnnnnnnnnnnnnnnnnnnnnnnnnnnnnnnnnnnnnnnnnnnnnnnnnnntgggcagccttgtctagtccctgattttagtgggattgcttccagcttctctccatttactttgatgttggctactggtttgctgtagattgcttttatcatgtttaggtatgggccttgaattcctgatcttttcaaaacttttatcatgaatgggtgttggatcttgtcaaatgctttttctgcatctaacgagatgatcatgtggtttttgtctttgaatttgtttatataatggattacattgatggattttcatatattaaaccatccctgcatccctggaataaaacctacttggtcaggatggatgattgctttactgtgttcttggattcggttagcgagaattttattaaggatttttacatcgatattcataagagaaattggtctgaagttctctacctttgttggatctttctgtggtttaggtatcagagtaatagtggcttcataaaatgagttgggcagagtaccttctacttctatcttgtgaaataatttgtgcagaactggaattagatcttctttgaaggtctgatagaactctgcactaaacccgtctggtcctgggctttttttggctgggagactattaataactgcttctatttctttaggggatatgggactgtttagaaggtcaacttgatcctgattcaactttggtacctggtatctgtccagaaatttgtccatttcatccaggttttccagttttgttgagtatagccttttgtagaaggatctgatggtgttttagatttcttcaggatctgttgttatgtctcccttttcatttctgattttgttcattaggattttgtccctgtgccctctagtgagtctagctaagggtttatctatcttgttgattttctcaaagaaccaactcctcgtttggttaattctttgaatagttcttcttgtttccacttggttgatttcacccctgagtttgattatttcctgccgtctactcctcttgggtgaatttgcttcctttttttctagagcttttagatgtgttgtcaagctgctagtatgtgctctctcccgtttcttcttggaggtactcagagctatgagtttccctcttagaaatgctttcattgtgtcccacaggtttgggtacgttgtggcttcattttcactaaactctaaaaagtctttaatttctttctttatttcttccttgaccaaggtatcattgagaagagtgttgttcagtttccacgtgaatgttggctttccattatttatgttgttattgaagatcagtcttagtccatggtgacctgatagaatgcatgggacaatttcaatatttttgcatctgttgaggccttttttgtgaccagttatatggtcaattttggagaaggtcccgtgaggtgctgagaagaaggtatatccttttgttttaggataaaatgttctgtagatatctgtcaggtccatttgtttcataacttctgttagtttcactgtgtccctgtttagtttctgtttccacaatctgtccattgatgaaagtggtgtgttgaggtctcccactattattgtgtgaggttcaatgtgtgctttgagctttactaaagtgtctctaatgaatgtggctgcccttgcatttggagcgtagatattcagaattgagagttcctcttggaggattttacctttgatgagtatgaagtgtccctctttgtcttttttgataannnnnnnnnnnnnnnnnnnnattttatccgatattagaatggctactccagcctgttgcttcagaccatttgcttggaaaattgttttccagcctttcactctgaggtagtgtctgtctttttccctgagatgggtttcctgtaagcagcagaatgttaggtcctgtttgtgtagccagtctgttagtctatgtctttttattggggaattgagtccattgatattaagagatattaaggaaaagtaattgttgcttcctattttttgttgttagagttggcattctgttcttgtggctgtcttctttttggtttgttgagggattactttcttgtttgttctagggtgtgatttccgtccttgtattgcttcttttctgttattatcctttgaagggctggatttgtgaaaagatattgtgtgaatttggttttgtcgtggaatactttggtttctccatctatggtaattgagagtttggccgggtatagtagcctgggctggcatttgtgttctcttagtgtctgtataacatctgtccaggctcttctggctttcatagtctctggtgaaaagtctggtgtaattctgataggccttcctttatatgttacttgacctttctcccttactgcttttaatattctatctttatttagtacatttgttgttttgcttattatgtgtctggaggaatttcttttctggtccagtctatttggagttctgtaggcttcttgtatgattatgggcatctctttctttatgtttgggaagttttcttcaattattttgttgaagatattagctggccctttaagttgaaaatcttcattctcatcaattcctattatccgtaggtttggtcttctcattgtgtcctggatttcctggatgttttgagttaggatctttttgcattttccattttctttgattgttgtgtcgatgttctctatggaatcttctgcacctgagattctctcttccatttcttgtattctgttgctgatgctcgcatctatggttccagatctctttcctagggtttctatctccagtgttgccttgctttgggttttctttattgtgtctacttccctttttagttctagtatggttcatttccatcacctgtttggatgtgttttcctgtttttctttaaggacttctacatgtttggttgtgttttcctgcttttctttaagggcctgtaactctttagcagtgctctcctgtaattctttaagtgacttatgaaagtccttcttgatatcctctatcatcatcatgagaaatgtttttaaatctgggtctagattttcggttgtgttggggtgcccaggactaggtggggtgggagtgctgcgttctgatgatggtgagtggtcttgatttctgttagtaggattcttacgtttgcctttcgccatctggtaatctctgaagctagctgttatagttgtttctgttaagagcttgttcttcaggtgactctgttagcctctataagcagacctgggagggtagctctctccttagtttgagtgggcagagtattctctgcaggcaagctctcttcttgcagggaaggtacccagatatctggtgttcgaaccggattcctggcagaagttgtgttccactcaccagaggtcttaagatcccgtggggaatcctgtgtgggcccttgcgggtgttgggcgagactccgctggcaaggtaccctggtgctggagtggagcggaaggggcttgtgccccaggtcaggcctgggtagtctgcttccctatttaccgcagtctcaggttccgcgcgattggattggggcaggggctgtgttccactcaccagaagtcttaggatcccgtggggaatcctgtgtgggcccttgcgggtgtcgggcgcctgcgctggcaaggtacctcggggctcgagtggagcggacagttaaatgcatttatttatggttttttttggtcatgatattttgtcctttcggcatatgccagcagttctcaacctgtcagtcacaacctatctgtgggttccaataaccatttcacagggttcacctaacaccattagaaaacagagatatttgcattatgatccctaacagtagcaaaattatagttatgatgtagcaacaaaaataattttatggaatttggtgcattaatctgtcatttcattgttctgttaagcctacttgcattcacagttataactgaaaagagctggattttgtgaatgattttgttcttcatcctggatagtttcttgtaaattcctttctttccatattggtagtgttggattttcctggagaaaagtaaagatacttggaggttaataaagaagttaataagaattgttcaagtgatgatgtaaaaaataattttatggttggaggtcaccacaacatgatgaactttattaaagagtcatagcactagggaggttgagaaccactggcatatatcaagcagtggtatagctgggttatttggtggatttatttttggctttttgaggattctccacactgatttccagaatggttgcaccaatttgcaattcaactaacagtgaatgagtgctcccttctcggcaggtctctctggtgtctgttgtcaccttccttaatgatcttagccatgtgactagagcaaaatgaaatctcaaaattgttttgaggacatttctctaattcctaaggatgatgaactttttattttcagatgtttcttggacatttttatttattcgcttgagaaatctttttttcagacccatagctcattctaaaattattttatatatttatattctagccattgcccctccttcaggtcccccctcccacagttccttatcctcctcctccttgcctctgagagggtgcttccctcccttccaggcatccctcttccttggagcctcaagaatctccaggattaagttcactttccctcactgaggacagaccaggtagtcctctgatatgtatttgctaggggccactgaccagcctgtgtattctgcctggctcatggctcagtctctgggacctcccaggggtcttggttaattgagaatgctggtctttctatggagttcccctccccttcagcttcatcagtccttcccctaattcaaccataggggttccagacttcagtgcagtggttaggtataagtatctgtgtctgactcagtcagctgttggtagggtctctcagaggacagccgtgctaggctcctccttcctgtctgtatgcacatcaagcatcagtaatagtgtcaggccttagagtccccccatgagatgcatcttaagttgggcagatcactggactacttcttcttcagcctcttctctatttttgtccctgcagttcttttagacaggaacaattctgggtcagaaattttgactgtgggttgataactccatcgatgggattactacaactcattttaaattagattatttattttcttaacattgttttttgaagatccttatgtattctagagattaatcctctgtcagatgtatcaatagcaaacattctctgccactccacggaattcctcatcactctgctgattttcttatgcaaagttttattattattcttattaatttgttatcctaggcaaaagaagttctattcgggaggtcttttcctataaccatatcttatagaataaagccaatctttcttccagaaatgtcaggtttgaaattgaagtcttttattcacttggagttaatatttgttcagtgtggtagatacaggtctgttttgattcttctatgtgtggacatccagttttcccagcaccgtttgttgaacatgctgtcttttccccagtatatgttattgtcaaatatcacatggctgtaacttcctgcattcatgtttgggtcttttattatgtttcatcggtctatatatttttacattttggttttgtgcctataccagacttttcttttgtcttatttcttcttttttttttttttttccctatgctttgcaatatactttgatatctggagtggcaatccctccagcattttgctcaggattgctttggctatatggagtcttttctggatccatatgcattttcaaacttttttttctatttttgtgggaaatactgtggatatattgattgggattgcattcatactaattttgtattgattacactattaattaactacagtattaattttcccactcaacaagcatgggctatctttccatttcctactatctttatctatctctgtcttcagagatctaaagttttcgttgaagagggcctttacttccttgattaggtttattcccaggtgatttaattttcaagttttattaatggaagtgtgtgtatgatcttggactcagcatgattgctgatggcgtatagaatgtataagcattacatctctgaggggaaagaaatcctggcagttgggagctgtggaatatggcacaacaaacctcaatttcttgagagggaaaatccgagaatggctgcctctgctcgggatgagaagcagcagagacttatatagggtttcttggggagtgaaacgttccatggtgtcctgggattcttggaggaattatatcttggggcaagctctgggactggtgagggttttttgtttggttttgttttgtttttaatgtttttttcgagacatggtttctccgtgtagccttggctgtcttggaactcaccctgtagaccaggctggcctcgaactcagaaatccgcctgcctctgcctcccaactgctgggattaaagacgtgtgccaccacgcccggctctggctactcttctacctcaagggcctctggagtttctcaggagcctggccctgcaattggagctcttcaaggatggggtgtcttatcttgcatgcaggtagaggtcaggcctttcagccagagagctgcaagggtagtgcctataacaggagtctctgcatttggtctggaaagtcaccctgctgcctgagtcacttcacaacaaacctctcacaaaagattcattgggaaaaacacaggaggagggctgggtggcctctgcttgcaagagagaagcatcaaagaattgagcaggagccagagataacataggtgtcctgggggtggagctatctaggatgtcttgggattggtggcattttatggcctgatcttgggccattttactccatagggcagtgtgtggccacttccgatttgaggggctggatccagccattatggctggtagagtgttctctcagtggaacctggtgagtttctgggtcctgggggttgaaccgtgctactcctgtacctccaaggcttatagaaaggtcgatgaattttgtaagtttcctctctatattgccacttttctgaagtccagaagtttcctgatcaagtttttggtatcttttatacatattgtatcatactcaaacagggctaattttatttattcttattttctaattgttatccctcactaatagaggaaatgccttcttgacttactgctgtagttagtgattcaacttagaaattcatgtatttcttttaggtttttttttatcagtttaatgatggacagatatttccttataatgttctgaatttcttttgcatcagttgtaatgtctctattcatttttgattgtgttattttggatcatctctttattttagttagttgagacagggtctgttgattttgtttatttttctcaaacaactaggacttagattagttgataccttgtattagttagttgtttctatttattttattttcctctgaggactccatttaatgtgttcagatgtcaggtgttgtgtttttatctttgtttatctctagaattttaaaatttttctttctcaatatcttttttgattattttatcacctatttaattttcatgaatttgtgtacttattagagagtaacttaattataagattgtaacgatatagtcttcaacccaatcagagacttgagaaggaataaatattaaatgagtaggcatgtaatacaggccggaagcttccaaaattatagaaatgtcagagaaagctggctgcctggatagtctcacaaatttctctataatgttggcgtatccttcttcagcctttaggcccagaatatctgataaattcttctttgaagcaagaattatgaaagactgctcaccttgtcttgacaaagcttagcagttgacttttctgcttcttatttgtccattttggacagcatgttgtctgcagttgaagcagtttcttgcccagtgactatcttgccatatatgaagcaagctccatatggaattcttcaatgctcagcatcttcttcaagtagaatgggagtactgctaggatcagacctgtcccactgttataaaaggtcatttatcagtaagatgtctttaaatgccatattctgttgtctctgagatttgtgaagagcatctatgtataagtccgtctgcataggtaaatgtttgtttctaggtatttactatctgttcaaccttggaaatatatttctgtaataaactaaacatgtttctagcatgaccatgagattgactgtctgactattaactgacattatcttaattatcttaaacagtttgtaatagtaactttcagaaagactagaagttaacattacatttttaaggtttacataggtacaatagcttttaaaaagttgatactactatgttgtaactaaatataaccttaattttgtatcaatatataaaaacctatactaatagaagattattttgactagtagtggctcaataatttaagagtagatccaataatcagccttttattctaattattcctatattctacttctttcttttcatcccttctccctcctccccctaacactagatagaaaagaaagaaggatagaggaaagaaaaagaaagaaaaatctctgagtctaaactcccttagtttgtttctttcctgattcaagaccattacaacttgtaactacccaccttaaatgaaaacaaagagcaatcatccattgaacaaaaagaaccatccaccccacttttggcaaatgggttgtttttgtcctaaagttgcatcctgctgacttgaagcattgtttttcttttggaggtggtcgcctaaaaattgtgatttgggtcagtctaagaaagctagctgtagcatttattgtccagtctttgcatgctgggaaaattcagggcttaactgaagtcctgactggaacagtctttgatgctcaccaactgggccagtagcttactttgaatctgtcctggatacacagttttaaggaaacagcattgaggcagcctgaggtaggatcaggcaggatgtggggataaatatatctcaatgtctcagcatcttttttgtcatccttaaggtaattgtctcagggctgcttgtctggttgtttttttctgtgaatatgtaagcgttgaggggtaatacacatttttctatttacacatgcatgggatgtgcagtgtttaccatccagcctcagatgagtctcggctctctgtccttctttataagttagtttggattgtttaaccaaactataatatgaattatatctaagccatttgaaaggatggtatcagaattcttgaggaatctatagccaaaatgatttattggatacacatagctgaagttttggcacaaaacactgtcatgtctcagccagtctcagaactgtccctatgtagaagggtcagtgaaacaagttacctgtttagttggttttcgtagtgtttgtttgtttggttggtttttttttttttttttttttttttccctatctgtagccagaatcttcaggggtctgaagtcacatctgtcagatctgatttttatcagtttggaaggaatgcatagcttttctattcctgtagagagaaacacaaaatttctcccccaaagaatcacatttccttccttccattcttaggttaggacatccttaatataagcagtctggtttagttcagcagtttttccataagtcaatgtattttagcagttatgctatctatctcattgaagaaacagcattgaggcagtctgaggtaggatcaggcagggtgctggaataaatacatctcagtgtctcagcattctttaaaatcacacacacacacacaccaccaccacatttaagacttgaaatattgatgtcaacaaaatattaaatattaaactctctttgggagattctgtatcgcccttttgttctatgaacattatctttaaagctctgttagatcgctgcacagttacttgtgtggtatgattgtaaggtatgcctataacaggctttatgtcataatgtctaaaaaattgttgtattctaatatatgatacccgagcataaatagcttcagtctgcaaatgcttctctaaggtagccaccatctaaaataaatatgcaatctcagactcagcctttctagaacttaaggcggaaaaccattaggatttgaaatatgcatcaattgtgtgatgtattatcacatatgtatattttcaattttcaaaatctgcaaaattatatacataagctattgcatgttattgctcccaggtaacttcattaagcattgtattgctatgagttgccattataattcccccaagcatttatgaatttccatttcatctggaacttctttttttttgttgttgtttttgttattgtaggatccagattggattcttttgaaggttctttactccgatttaaagaatcctctaacctctgttctatggccgtgaacctagcattctgtctttcagttctctccttacctaggtctgttttattctgatctttcttagagaggatctataaaattgtaattgttacagaaaaaaaaaaacatttaaatgctgataaacaagacaaagtcatatgcaatccagatgcattgagtcattgtgcttctccgcattttcaacacagaaaatatttttcttttcaaactctaattctttacttccttcagagactttctccctgtattctttctatattcattttttcccctttagcacttaaacacattttcgagcatattatacctgtttagagctttgcgtctgggcttggattttttttttctttctgcctgttgcttttggcgcttctcagctagtaccttgtgttgccagtttagcatctggcagtttgagttgattctgacccatgagggctggtgtctgtagcaggctccctttgtgggtttggcctggagccaatgtttgccctctgacttctgggctgcagtgtacactgtctctttttggctctgagccattaccaaactgtgctgcagtttccctaagggctcctagctctctcaaaaaattttagccttctaaatttcctccagctaggaaatcgtgtcccagcaaccacacggtgactcacaaccatctgtaatgagatcatctagtgtgtctgaaaacagctacagtgtacttaaatataataaataaataaataaataaataaatcattaaaaatacactttaaaaaaaatctaacctttcccttatagcttaatttactgcttaataaactacatctctccttggtgacttttagtattgtttagataatcagatgctctaaatttatttaattttgtaaatgaacaatgaagatgtttaattacttattagtttactgaatactcattctttacttggaagaaaacttctagtaagcacattatagttaaaaatatggaaaaataagcaaagaaatagggaaaaaagaaaaccagatgctcactagtcagatgcacctgttaatctaccctctaccaacattaaactgtcctacccagggttagtgctggatcctataatttctgcatttggtaggagaggaagaagaaccagaagtttaagctcatccttagctacctatatataggcagagatatcgtgtgtgtgtgtgtgtgtgtgtgtgtgtgtgtgtgtgtgtgtgtgtatttgtgtactatnnnnnnnnnnnnnnnnnnnnnnnnnnnnnnnnnnnnnnnnnnnnnnnnnnnnnnnnnnnnnnnnnnnnnnnnnnnnnnnnnnnnnnnnnnnnnnnnnnnnnnnnnnnnnnnnnnnnnnnnnnnnnnnnnacgcacacatgcacacacacacacacaatattgatatgttgtagaataggccaaggattttacgaaagtatgaaattgcattctcatattcttctcagctacttactacctgctattttggttatgttcccatagtgggtaataaacgatatcttactgtgattttcattttcatttttctgtcatctaatacttaataagtttgaacaaccttttatgtagttattgactaatatactttatttgaagattttttttgcttattttacaattatttcatctttgtttttattattggattataattatatatgcgtgtatatgtgcacatagttagtatatacaggtttttaatatgatacttttgctttactctgtgcatctatttcactttctcagtggtgtcctttgaagcatgaaagtattgttacttttctcccttcttccctccctccttccttccctccttccttgcttcccttcttccttccttctttctctctctcctttgtagtgctggagatgcaacctacagcctcacagatgctaggcaaacactctgtcacagaactaagctacgccccacacagcccttttgttgttatttttgtgtccggaccgggcttttgctatcaagttatagctggcccagaacacgtggtcttcctgccttagcatccaaagtgctaagataggcattttcctgatgttcatcttagtttttaattttggtaaaatatctctctggctctctgtgtgtgtgttcctatcactgtctctgtctttctctaccagggcctcatgaacccttggctgtctcaagtccactatataactgaaaataaccttgaccctctggtgcgactctctctgtctcccaatagctgagatgacaggcttatttgcctctgggtttgtatgaggtgctgagaactgactcctggactgtgttcatgcctggtacaaactactaactaaacaatgtccctcagccttaccttttttttttttctgaaagttaaatctctaaccatttgtcattactttgtagaaatcttgctagatttacccattaatactaaattgtggttccacctttgagtttctgtgcatacaatcctataatttaataataataccatttttcttttatctttttgcatgtagtacatataagttgtggatgcatgcctactgaaatagttgatttctgagcattgtttcttctgggaacctttgttaatccccttacatacatagctaatgagaaactatatcctagatatgtggctactttctgattagttacaagtgggcaacccatatcttgttttttcaaataaacctttatttttaatctatatgtgtgggtgtttgtcttgcatgtatgtctgtgcaccacttgtatacaaatatctatggagagcagaagaggtcattggatcccctagaattggagttgtgaactatcatgtagtgctgggaattgaactcaggtcctccagaagagcagcaaatgctctgaactgttgagccatctctccagcctaaagaagtttttggctaagccagcagtaatttattctcaaggtcataggtatcttggtttaaaggcctactaggaacctggtttgaggtcagagcaggcagcctctgaggctatgtctcaggaattcttacatctatctgctcttggaagatgtagtttttttttcccatttttattaggtatttagctcatttacattttcaatgctatccaaaaaatcccccatacccacccacccccactcccctacccacccactccccctttttggccctggcgttcccctgtactggggcatataaagtttgcaagtccaatgggcctctctttccagtgatggccgactaggccatcttttgatacatatgcagctagagacaagagctccggggtactggttagttcataatgttgttccacctatagggttgcagatccctttagctccttgggtactttctctagctcctccattgggggccctgtgatccatccaatagctgactgtgagcatccacttctgtttttgctatccccggcatagtctcacaagagacaactatatctgggtcctttcagcaaaatcttgctagtgtatgcaatggtgtcagcgtttggatgctgattatggggtggatccctggatatggcagtctctacatggtccatcctttcatcttagctccagttcttctgtcaccatgtatctgagtacgtgtgtcaccttctttgtagcctgtccctgactttaaaggactccttacccagaattcttaccatgacctacactatctccattgttttttttcccactatctccactcttactctcacatagaatgatatctcccccaaagatagttttttaaaatttttaattaaattaattgagaagacctttgtaaattgaccatgagtaccttacacggattatattttgggatatgtacctcatttggtagagttttaaaaaattttttaattaaatttattgagaagatctttgtaaattgaccatgagtaccttacccggactgtattttggaatacacacagtgtatcaaaagtatcaaaaatatctacgtgtatcaagtatcaaaaatacatgtgaaattgtaaaagcaagacaacacataaacaaattgatatagaatgagcatttgtatttgtaggtaaaggggaaaaaaccccaactgtcctgcaaaggcacagagagactggcactagaaaagatacgtggagaagccagaattttaaaaattctgatagataccatgactgatagataccatgaggatggaaaattctttgttgttgttgggtttttttgttttgttgtttgagttcagtttgtttattcccttgttttgagacagtttctctgcgtagcttaggctgccctggaactcactttctagtccaggctggcctcccagagatctatctgtctttgcctactgaatggttgaattaaaagtgaacaccaccaccacctggtagatggaaaattcttgagtgacagaatttgatttttcagtgaaatatgctgagtgaagtttatcccatttagttcaactagtctaaaacacactttctcagtcactgacaaatgtatatatgcatataaatctaggttttacctgctatataatttattaatagaaaatgaaattcaaggtcttgttttctttaaggctaactgtcaacttccagaaagtgccttcatcataaatgagctttctggcatctttaactttgatgcagaggcaggaagaatgttcatacggcataacgatctggtaagtataacatatcgccttgtaagaatgttcatgacttaaagttgttagcaactatgtcatccctacatcagaaaatgtccttattacaatactaaatttgctaaattgcatgccattgaaaacttaaacactttgctcataaaacaaatttattttcttgtagaattatctctaagggctagatatgaacctcatttggtagagtacttgcttagaacaaatggaggcctcggttcttgatccatagtactgcataaagcaggtatggaagtgaggtcctgtaatctttatactttggtgaaggatagagaatcagaagtacagggtcagggcttgagagatggctctatggttaaaagaactggatgttcttccagagaacctggttccatctctagaatccatatggtagttcacaactgtctgcatctggaactctagttcaaggagatcagacatgatcttctggcatctttggacattgaagacactgcatgcatgtcatacacagacacacatgcaacactaaaaacccataacttaaaatgataaaataatttaaaattttaaaaataatttaaaaaagaggtgcatgttcattctctgggacatagtgagtttaagatcaacctaggatatatgacattttgtctcaaaaacaaagaaggaaaggcagatagacagacagacagaaggaaggaagaggaggtgcttcattgtaatagattcaaaagatcctagcagtaaatatagtgataacgttaggaaagggatgaatgttattcttttttcattgtcaaaacctttttgcctcttttttctttttttaggactgtacagaatcctcagatatggttgttttcagtgattttctatttgtctttgatttgccatccaaaattaaactaatgaaatgtgactcatttgtaaaactgatggtatgtatgttttctgttactatgccaaactaactgaggcttatcctttataaagggatttatttaactcaaatgttcactgacatgatgtaggaatcctgacaggcccattcttgtttcttcactaccctgtctcccaccaccagcattaaaacacgaggagaaccacaaaaggactttgccatgtgtgatagaggccagttgcattggatggcctcactttataacaacctgttctcacaggaaataacccactctgtgaggctcatagtgatcccttccaagagtagtgtcccatgacctaattatcttctaggaagtccagttaaaagttaattatggccacactagagacaaagtttcacatgaatctttggagactcagtcaaatgatattcaagctaatatgggtaaccacttttttgtgatgagaaatttaaaacatatataaagtaaaaatagtagtattctttaccaagaccctcaggtatacacattttaccacatgtgttggtctaccacttttgttaattttgcagttactactagttctttcttctgaagtattttaagacaaatgccagctcaaatttcttttcaggatttaaccctttagtcagctaatctggtcacctcatttctctgtgttctggcttccagtttaatattttcctcacttattcttttttattaaatttttaatttaattttaataaattatttacattccaaaagttgccagtcccctcccctagttctttaccccatcgctttacccccctgcctctgagagggtgctcctccacctgcccagtttctcagagcttgacttgtaagcataaacatatttgaatactattttgttaattctttgagttaattcttttgacaatattaacttctcatcaagctcctcccagatccaccctcacctctctacctacctaatttaaatgttctttttctctccattacaccctgtttttaatccccagtccaattagtgttgcccatctaccactcctgaattttacagtcttaccaccccttcttctgtgaaggtccctgagcctgcagggaaagggtatgatatacgccctatcgctgaagacactggatacatgactcatagaacatagaggaaatcaagtaggtactgacttagaagctgcattcctattggctagcttttgtggtcctagaaggtgctaatcacactaccacaggggtaaaaaaaatcatcaatctgacctagagatgaatcctgcaagataatgactgtcctggcaagagatgtcaactgctgcaagagtggcatgagtgtctggaaataaccaaccattttctggttcaatttgaagctcattctatgagattaaaccaatacctggcaccagtatcagggccaaggaacttgtgcctacgtaggttagagatcctagaggagaacttactattattattctgctaaatggacatggtattaaaataactactaatgatttattgctatacacatagattattagtgaatttctcaaactctattaaagaaactgcttcttataacacatactaattaacatagagacccataactgctcaacatgcaaataatgagactgcagaatgcacagttcaaatatgatatctatatcctatatctaacacatactttctaatttttagaactttctactttgactgttttgttcctctctcacaattgtatcactagcatacaacatttacatataacatttacatattatattatgtctaaggaaaaattatatatttatatataactatatataatatagctgtacattaatataattattatatataattattaagataattatatataaatagtattgccctagactttatattaaagatttttcaaactttttttgattgctacagcttgttttctaggtcatttcccaggaaagattcatatttatttaagctatttagatgttaatgatttattggaatccaacatcatgccaggcagtggtggctcatgcctttaatcccagcacttgggaggcagaagcaggtggatttctgatttcgaggccagcctggtctacagattgagttccaggacagccagggctacacagagaaaccctgtctggaaattaaaaaaaaaatccaacatcatatacattactgcagttgttataaatgcaaacaacactgaccatctgtataaaacaaagaagtctagggcaccatgtccacaaaagaagccatttgacacaaagtatttcctttttatacactattaattaggtttgattttgtcaggggatcatgccataaattccagggttttacaataagaaatcaagacacaagaagcatgctagtaatatcattccaaaggtagacttatcactctattgttattaatgttgtgttttataaaaaagaaagagccagggtaagtttgttagaggcacggtatggggagacggaaagggatgcctctgcgtgcccatcccttcctcctgaggtgccaggcatatgacagatatagcacagaattgagtttatttagtgtatggggagttgaggagaaagtagagacagagaaaggcagagagagaggtgggggaggaagggagggagtagagggtagaggnnnnnnnnnnnnnnnnnnnnagtagagggtagaggccagctaggaacacacggagagatgggggaggggaatggcaagagaagggacagagagagtaagagaataagatggggggggggggaccaaacagctcctttcataatgagtcaggcatacctggctattcccagataactgtggggtggagtctagaaggaatactaataactagctccttttaatcaccatgtcattagtgagtttgaccaagtcctattttcatctgtctgacattctggcaaagggaaaaagtaaagcctttccctcccacatgtaacctcctcataaaattcctttaagcagttccttccatatgtagtattttctctatagaaatatctaatctatcatgttaatgagaaaatacgtgaacttttacaagttacatataagaaggactaggagagattatttctagtagtaattctcatgggtatacttgggaagcagacttcacagctctgttctccaaaggatttgatgtataaagtcaaaaactgtaagctccaaaattaacctaactaactaatttgaactaactagccaattcaaacaaaataatgtagaaagggaagactcacacacagggaccaggtggagattatgtggacaatagaataagatggagattcttaaaccaggtcttcactaagcaagagaaatttctgcctgttatggtcagtggccactgtgggtcattcagagccatgaacaacattgtctaacagtcagtgttgctgaagcatccaactacagatcccgaacacaggagtcaataaagaaccagaggaaaagaaaagctcaaggaataacagaaaaatttagtagaattgtgtgaatgtctcagtacttggtggtgtggcagaggggttccccagtccagagtcgaatatgccttacctaaggtggtagaaagcttgtatgaacaaacacacctgccctagaaacttgttatccattaatcaaagtatcgctgttgcaaagcagaccccaagggaactgtcttgactcaggattcctaaacagtgctttattgtctgtgtgctagacctgaaggctcagaggtatgttgaagtttaaatcaagggtagtcaagtccagtgctaaatttctaatccaaagaagtttagcagaaacaagaccaaggcctattggaatattgacaatttaagaaagctcaggacactgctgctttaaatggcagaacactgctccagaacagtgtggttccctgagacagttttagagacttccaaaatggatgcttattatattcatggagaatcctctcagagaatgtcttccctttgtcttcttcctattggcatcacctttcctcatctgccccatgccacttacagtcatttctgagctttacatgtaacactggacttctgaaggttgatggtagattgttctcttagcaggtttgatgtcagaattatgattactataggaaggggttatagacatttttaactacttaactgttcatggctgattactcatttttgcacaagaacattaggtgctacaacttgtttgatcctgtaattgtattatcttacaatttaataccacgtttcttaaattataagtatacagaacactggcatcaagacacaaaaatatttttattagaactattcaatataaatcaagcctgatgctttgtgcctgtaattccagcactcagaaggttgactgggtgtgtggcaggggcagggaaggcacggtggctgcacctgttgcaagaacaaacaataaacaagtacttaaaactttttaggtttattttttgtaaaaagatgggaaaccatgtagcccaggccagccttgaatttgagccttgtatatatacccaagatggccttgaatttctttctaaaaatgtttttatgtttatgtcctgtactcatgtgtgctgccatctacatatggagttcagaggataatttgcttgggtcagttctctccctccagcatataggttccagagaggtaattgaggttaggatgctaggcagcaagtttctttgcccgctaaaccatctcaccagccccagatctggaattttcgatcctccagcctctaccccagggattgtaggcctgctccaccattcacacttttatccctgagattattaaaggtccaaaagataaccagcttaaaaattctttttctaaaagtctgaagtcatggcatttccagaaaagatgagctccccaccataccttatactgaaagtcagacgaagtcacctggtggaagacacattgcgtcaattaagacaagtggaagactttgaccttaggaagcaactatcggtaaaaagaaaaatttcactggactctctctctctctctctctctctctctctctctctctcaatctctctctttgtgggaaggaaccttcataattaaggagcagcattcacaactctgatttccagagatttcccctttcccttgagacagaagaatgtttaattacatatttagttgcaggttaacttaactattgatggttagaatgaatcattccaatacttaatgtcataaaaataacaattcattttaaaatcttctagtgcacctgaatttctgggtgtctttttttttttatgaatatgtgtttgtatgtatgagactaggaataaagccagagtttccacacatgctaagcaagtgctttaccataacctacattcccagctatacacatttttgcttgagtttgttcacatatccaaaagttaggtggggattggctatgctatgcaattattggctgaggacattgggttatactttaatgttcttcttcctcttgggaccagcaagcatgttcttctcagagcagtgctggaaatgcaatctagtcatcattaaatattgtttgaaccaaagaagtctcgtgaatgaacccaagccaaagactgggaacatacactaacctcttaatgagagacattgcaaaatcatattcaaaagaattcaatcaataaatagtgaagaactgagacgatccatacacccaacagatagcaggtgtaacaggcacattcccccacattgtagttctaggctctgcaatgtaggttttgattccaaccactctttgtttaatcctttgtggatgcctggtgagtgtttatggtgtagcacctaaggccatattacatacagaatagaatagtgacaaattctgtgggtaaaagctagagcctggagtttccaaaggagtggattttcctgataccagctgcgactgtaagtggtcaattcccaaagaaaacagatcctggaaaagagtactcaaaccagaaagggctatttcccagcatgtgattcaaatagaaaataaagaaacaagtttattttagaagccagtctcccttggtatttagttttcttatacttttgtctgtgaggaagatatcagtagaaaattctttcctctgtaggaaatgactctcctttaagagagttgttaacttcaagactcatacaaaatagactgagcatgacaagagtgtctttcctaacccttggcatcactgtgagtcctgagcaggccaaagcttttgatcaaacagtagcaggtgcgctctctcaggcagacaagaagggcaacatctgggaaaatgaagcttgaggatacatacacatatttaaaatacaaggtctgggaatgctatagtgcttgcctagcattcctgaggacccaatttaatccctagcaccaaaaatcaggtatataaattaatgaaaactattaagttagccagaaaaggaattctcagaattggcagggtaaaatcaagtcaatacatggccatcaaaagcaggaacatggagaactgctttttgtctttgtttttgtttttagatttatttattcattattatatgtaagtatactgtagctgtcttcagtcaccccagaagatagcatcagatctcattatggattgttgtgagccaccatgtggttgctgggatttgaactcaggacctttggaagaacagtcagtgctcttaaccactgagccatctctccagccctgtcccccaccccccattttttttagaactgttaacccatgctcactagaagggctgcttactagaagtactttgaggaggggctggagaacacaaagagctgttcattaggccaaggttgctcagtctgaaagctactatgaagacagacaaggtggaataacttgataatttcatgacccatgggtttaaggaatattaaattttatatcaagatactcttccttcttccagaggtaagtgtgtcagtctaaaggatccactcactgacttaccaacctgggaataaatgggctcctggctttcactgcttggcagcaaactgagggatggcagggtgtgagaaggaaaagaactgtgtggatcttgccattgtcgtgagctcaagaaggccagaacacgctgaagacttttccataaagagcaagggagctatattttaaataacagccctgaaataaattttctttcttcaggttggatttattaatgaaattcgtcctgaggctgggggagtgagttcagagttcttccactgtatatttgaagagatgacagaccccaaatatgaaatgttcatatatcctgaaaagggttccagcatgtggtttccagtcaatgtaagttctgtctttctcaaaaaacgcattacatgctgcaatatgcaaagcacagtgtaaaaaatcaggactgtatcacctagcttctctattttgagtagtaccacatcacctgtggtactgcagctgtgctctggcatgattatgtaatttgtggaaaaccatgtcctggcatgtgtccgtaatttttagagttatagtgcagaatgtttcaaattagtagagagaaactgtaggtaaactagtaaagatagctgttcattctgagatattggttgattcttttgattataatttttttcatttttatctttttataagttgtcttattcagtgccttgctatatattccaagctatccttgaactcacggttctcctgcctctaccttctaaatgctttggattgtaggagtgcatcacactgagcaaagccctcactttaaagtacatttatacagttccgttaagtagaaaacagaccacacacagacacacacacacacacaaacacaattttattttaatttatatatggcttgataaaacagcaaaattaagttgaaccagagtacgcattacaaattatgggatgaaaagctgactgggagaggcctttgcagattgtgctgcactttaactcatttcagaattccagtagaggagtaaatagggtaaggagaactgggagaacacacatcctgtgagtcactgaacctcagaacctgctaacatccagaaaggtactggagcaggaatcctggaatgtcacactaggatagcttccttcctgggctgctgttttggcctggaaagtttttttgtcctttagttttagtttctctaagaaggagaacaagatgcagagaagaaaagtgagggcagctgctgtggtctgtttttgttgatgtcacattagtgaaccaccaaagtactttgttaaggagctcaaagataaaagcccaagggcatggtgctgacgtaaatcagctctcaagaggtctccttaacacaaggcatcatgacatgatcgtctgcaggcaaagggtcttcgttgtaagacaggatgccagagtgacaatacggcctcatgagcaccactccagtgttaagccccatgtggggctgcattgccaaatggagccaccattcttggaatactcatctggcattcattctgctaagttgaaatcttgctacagaacaaccatcctttctcattgtcagctgtctccatgaattggatggtcaggaccttaaaatttcaaaagaaaactttgtaattccaccagagcatgtttctacatttcagaaatactaccagtaaccaaaaattcatttacttaatgttctgtattgttaatttatattgaaaattatgcaagaagctgggcatggctgcatgtggctataatcacttgcttaggaggtacaggcaagaggagttgaagctcaggtgcttcgcagccattcggtattcctcaggtgagaattctttgtttagctatgagccccattttttatcatcagggaaatgcaaatcaaaacaaccctgagattccacctcacaccagtcagaatggctaagatgaaaaattcaggtgacagcagatgctggcgaggatgtggagaaagaggaacattcctccattgttggtggaattgcaagcatgtacaaccactctggaaatcagtctggcggttcctcagaaaattggacatagtactaccggaggatccagcaatacctctcctgggcatatatccagaagatgttccaatcagtaagaagaacacatgctccactatgttcatagcagccttatttataatagccagaagctggaaagaacccagatgcccctcaacagaggaatggatacataaaatgtggtacatttacacaatggagtactactcagctattaaaaagaatgaatttatgaaattcctagccaaatggatggacctggagggcatcatcctaagtgaggtaacccaatcacaaaagaattcgcacaatatgtactcactgataagtgggtattagcccagaaacttagaatacccaagatataagataaaatttgctaaatgcatgaaactcaagaagaacaaagaccaaagtgtggacactttgccccttcttagaattgggaacaaaacacccatggaaggagttacagagacaaagtttggagctgagacgaaaggatggaccatctagagactgccatatctggggattcatcccataaccagcttccaaacgctgacaccattgcatacactagcaagattttgctgaaaggacccagatatagctgtctcttgtgagactatgccggaacctagcaaacacagaagtggatgctcacagtcagctattggatggatcacagggcccccaatggaggagctacagaaagtaaccaaggagctgaagggatctgcaatcctatgtactaaccaataccccccggagcttgtgtctctagctgcatatgaatcagaagatggcctagtcggccatcactggaaagagaggcccattgttcatgtaaactttatatgccacagtacaggggaacgccagggccaagaagtgggagtgtgtgggtggggggagtggttggaaggaacctttgnnnnnnnnnnnnnnnnnnnnnnnnnnnnnnnnnnnnnnnnnnnnnnnnnnnnnnnnnnnnnnnnnnnnnnnnnnnnnnnnnnnnnnnnnnnnnnnnnnnnnnnnnnnnnnnnnnnnnnnnnnnnnnnnnnnnnnnnnnnnnnnnnnnnnnnnnnnnnnnnnnnnnnnnnnnnnnnnnnnnnnnnnnnnnnnnnnnnnnnnnnnnnnnnnnnnnnnnnnnnnnnnnnnnnnnnnnnnnnnnnnnnnnnnnnnnnnnnnnnnnnnnnnnnnnnnnnnnnnnnnnnnnnnnnnnnnnnnnnnnnnnnnnnnnnnnnnnnnnnnnnnnnnnnnnnnnnnnnnnnnnnnnnnnnnnnnnnnnnnnnnnnnnnnnnnnnnnnnnnnnnnnnnnnnnnnnnnnnnnnnnnnnnnnnnnnnnnnnnnnnggagtgggtgggtaggggagtgggggtgggtgggtatgggggacttttggtatagcattggaaatgtaaatgagctaaatacctaataaaaaaaggaaaaaaaaaaagagaactatcaaaagaaagttttctcagtatgtctcaagcaaacaaacaaaaccaaaaacacataaagaatacaacgaacattatggaagaaattgaaattgtattataacttataaaagagtctgaatttttctattctttgaaacccagtttttgtctaacttgtgatattaactagtaaaggaagctaaaatttgttccttttttggtctagttgtgcctttgtagaactgattatttataatagcttagcaacttttttcaaatgtattttccagcccaagtttgagaagagcagctatttcctatttgggatcttatgtggactctccctacataacttaaaggttatcaaccttcctttcccactggctttatataaaaaacttttgaaccaaaagccatctttggaagacttaaaagaacttagtcttcccttggggaggtaagtacatatacttgctttatgaaagcagcattaaggaccattaatatcacacatgacacaggtcagatcttcaattttaatgttgtgtgtcctgtagatgggcttccattagcatgacttgcagtaaatggagtaagccttcagaaatgaagaaaaagcagatgttcctctgatcaaaaaactagtataataaagagtttggacctgggttctttatcaaggtggaaagtacttaggggagttctcaggatgaacatgtgtcatccttcttatctataaatatatatgatgctataagagcatatacatatataaatatggtttacaaatgtatacaatgtataagtgcatatatatgtagcttataaacagatgcagtgctatacttataaatatatgtaatgtggtttataagtaaattagtgctataagtgcatatatagagatatagatatgacttataaaaagtgctataagttcacatatacatatggtttataataaatatagcatgataagtacatgcacatagttgtggtttataaatggatacagtgatataaacatgtatatatatatacactcagatattgtttgtaaatatagtgtgataagttggcacagatagatgtgatttgtaaaaatatagtactatgactatgtttatacagatatataatttataaatagatacagtgttataagtgcatgtatttaggtgtggtttattaatatagtgctatagtacatttgtatggtttataaattgagttagtaccataaatgcatatacatgtgttttatgaagaaatagcgccataagtgaatatgaatatggtttatccaaaaataaaagcatgttcaagttcactaggaactaagtggataaaatgttctttttctgccacagatttttcttaaagtgttgataaccaattgaatgaagtaattcttttttttttttgtggtccattagtggtaggtttttcttaaagaggggtttctcaagagtgacaatttgatattttggtcttttctgttttgaatgttttgattgggtatccaaccctgggcctcctccctcttaaacagcgcatctactgagccataaccacaggcatgtggctgttttacttctctttgtggcaggttttgcagggcatgtgatgtatttgaaagtgtctggagtcactagatgacaacctttaactgtgacaaccaaagacaccacagacttggcaaagtaatttctctctgctttaaagtcttgtctgcataatcattttcacagtacacagcactatcaatgaggtagagcagactaacaaatcaaatcctaaatcaagattattctaagaagatgagtgagaaggagtaggagacaaaattcatactgaattttgtgcatgtctgtgttacttaatttccgccactgaatgattatcactttgaaattttataacatcaaatatgtcattttaaatcaattttcaataggaatttgcaagaagttctaaattgtgaggctggtgatattgaagaacttcacatgtatttttctgtgagtagcaagaaatctcgattatacgttggctttaatcagtttttgttgtatgtatgtatgtatgaatgtatgaatgtatgtatgtatgtatgtatgtatgtatgtatgtatgttttagtgtcacaaggagttgctggagattgcacctatgccaataaagtattatacaattaatatatatccccagccattatctattactttaaaaataattttattatagaatctttaatatgaattatcaatattttaaaagatgatttctgtaaaattttagggaaggtatatggatgataataatgacagattcatatttatgtttatcagttgattacattttgtttatagatatactgggatcaaaaagatgttgatttaattccagatgggatctctgtgcctgtgaatgaaaccaacaagtaagtttagagacctaaaatatctactttgaataggcataaaatgtttgtattgatacagtttaaagtatatttgagcttcttggatgtttgttttagttttttttttttttttagaatgctaaacaggtaggagaagagaagaaatgattcaataataaatatttctgtcctctaaggtatatttttagtccctattctctgccacaatatattctagatattggtaacagaagcatgaaaaaggcaaaatatataacttgtatcatagtggtcagaaagctgatacccaaatagaccatcatgtaatttatcagataaaccacttggtactagtttatgggatctgactgcaaaattttcatcactgtgcaaaggttattatttaaagtattagtaatttgaagtcaaccatggcaggaatatttagagcataaacattggcaaatgatacaaatgaggttttccttcctgtcttttccgtttccgctccctctgccctctctctgtatttctcttcctttctgtctcctgacatcccacccacccccctccttcttttgggaaactggttattatactggcaggacatgattggttacagtgagtacatagagaggtggttcaaataggctagttacaaaagctgtttaaaggggtgatggtgaggtgagggtggacatgtttgtaatgggcatgtttctataccccacatagtccactttccattactgtaatgaaatatcaaatactgggttactttataaggaaaagagttttatttgtgtcacagttctggaaatttaaggaccatatctgtgggtggccttcttgctagcctcatcttgagtgtgagagggcagcacctgacagacatgaggagtgtggatgtgtgtctcttttcatcttcttccctcacctagtaagactaccagagttcagtcttggggctcttctgtgatgatttcatgtaactgtaatcactcttcaaaggtccttccatgaacagtacagttagaccaagtttctaccttcttaatacccaacaatgggagagataaatctctccacatatgtgcttgctggacagagtcaaaccacatccacacagtgtcgcttgccactgggaaatctatcatactgtggaaagtgtatctgataatgcaaggccagccttgcagaacttatttttcacaaagtgatccactagaagagagatgggggtgggagaagagaagggcccgccctgagaatttcattttcatagaaaaatctgatgattagaaagaggaagcatgccatgctgggagaatgcttacaacatatggtttcctgcgaacaagaggtagccagataaggatgtcagaaaggaatgtgtagaggcaaagaagcaagggccaaatggttggacttattcccgtagttccctgtgatgtgaaagcatatgatgttccatggtcaccatactccataaattttggatttttgaccattctttaagctagctatttactatgcaatacttctgacgctggagagcactagtgagggaaaatggctaaggtacaatatttagtaggtcagatgtgttacaatgcattttccatgtataatgagctctttgggacatgtccctgttcaaagacaaatattcagattggagacacaaatactccttgtaatatgtaaaatgagaatactgtagagtctgagtccttctcttatattctctaaggaccttttttttttctagttagtcaggttttcatttccctgtcttttatagacttgtgagctacacagaaaatatacttttctttctcaatagagtaaagagagaaaaatagatagtattgtagtcacggagaaggcatgtcattggattttttttttcttccatcaaggagagactatgtgtctaagtatgttgattacatttttaacatctctataaagacgatttatgaagaatttcatagaggattttacaaagtgtgtaactgggatataattaggcaattccagcccgaagaactaatgacagcaataattggaaatgctacttgtgactggaaacaatttgaaaatgtaagtggtaacccaagtatcctttaatgtttccaaataactgacacatatccttcctagaactttctcttctttttttctcttgttctcaagaattcaaagtataaagatggatatgacaaatcacacccaactattctgctgttttggaaggctttccatgacttaactttggatgaaaagaaaaaattcctctgtaagtactataatagatatccagacttcagaaaatagatcattttaatggcaaggcacatatatgtgtagagcacaaacccccaaagtcatgatttttctaggctttccctgcccctgcccctgcccctgtgcagtttttctgcacaaaaagtgtactcaatatttattaaatgtgatgtgatcattatttctttttatgtatcttgaaaatttctagatgaaaattcttaagaaaattgtattcctttctagtgtttcttacaggatgtgataggctgcatgtgaaaggcctacagaatgaaggaatagtattccggtgttctgaaaccttcagtgaagaagataacccaagatcattgacatgtcacaggatgctagacctacctaagtattcctcaatgcgaaggatgaaggaagcacttcaggttgcaatcaacaatagcacgggatttgtctcacaggaatgatgcagaaacattcacctcccagcagttcacagcctcgggaactaggtgtttcactttgggattcttctgtctttccttaatctaagtagggacaagaggttaaaggattttacttgaattgcacagtttttgagataaataaattataaattaatactttagtgaaaaaattctgtaaaacatttgctgcattcttaactttgatgcttttgaatgtttgttttggctgaaatatttcctgaacaacaatgttcatttaataatatactaaatatttaaaatgttcaatattgtgagctaaagagagagctcaatgtttaagatcactggctgctcttccagaggaccagggctcagttcccagcacccacaatggctactcacctctcgtctttaactccagtcctaagggatccaacaccctcctctggcctccaagacattccatggatatggtacacagatatacatgccaccaaaacactcaaacacctaaattaaaaaaacaaataaaataaaatagtgtttatttaaagatttatggtacctataataaactattagtttgaaaatattaagaaaccatgcttgcaaagctttcaacgtgtttttgaagcatataggtgcatattttgtattaaggaatataattagagttgtgattttagaaaattctaaatgatttattttcaacttctaagtgttgacatttattattcatcaaaggtacttatacttagtacagtgttccaaaatacattctaaacatagataatgttattttagtaaaatactgaaaacaatcaagaactcatacctactcatggttggcaaaatgggaagaagttgaaatatgtcttattatgatgctatagagtaaattaatgaagcaatgtaactgctatggaaaatgaccaatacatcttgtatactagttctacttaatgttagaacttaatttgaattacacagctttgaaataatttcataaatataatttgtcataagaatgacatatatgctgctgtgacaatcactcatcataaaagttccatttctgtaaagatgttgtatctttatagacttatcagactttatatgtgagatgtttactggactccaaagaaaccaaataagctaattaaaaatagatcatttaaagaaaataaaatgattgtcatcaattgctacaacaaaagcaaatgaatcgttagaagagggaatacgcttcagctaattctcggattccaacattgctccagtaccagacaaagatgtcacagagagaggaaaccatagatatcttacgtgaacagacaccaaaatccttccctacattttaatatacttagaacatccaatacaatatagagtgtggtgcctcacaaccaagtgggaattaacctggagatgcacttaaaaatcaactacatctcaacagactgataggaaagaatgtccatatagtacctcagaatagacagaaaagtaactgagcaaaatgtagcacctagtcatgtatgagaaagccaacaaggcctaaaggaaactgccaatttgataaaacctagatacgtttgacttcttaatggcaaaagactaaatgctgcccactggcaagaagatgggaaggcctatcatgtacatataacattgtattcaggatatgaatttatattataaataatgacaataaaaaacataaattcaaaaccaaagaacaaaaagccttattttcagattatattaatcacatagaagagtcttaaaaagcacattaaataaatgtagaaagagctcaggactcaagatcacaaacacacagtgaattggaaaatcattgtcatctatcatatgaaaaattggaaataacagagagtaattttaataagtttttaaaatattttataatgaaaactatattgtttaaagaaactaatgaagtcttaaatcaatatgtataaaaagatcagatttactgatagcgacatgctattattccaaggtttgtgggtatgtgtgtgtatatggtatgtatttgtgtgtatctttgcatgtgtgcgtggtgtttatgtgtgcatatctgtgtctctgtatgtgtgtctgtatttctgtgtgtatgtctgtgtgtgtggtatgtgtccgactgtctatgtctgtgtatgagacttactgtgatgcttattgtttacagggaatgtttggtcttagacctagaaaagctgagtctactgacgagcacatgtagtcaaatgatcatttaatttaatttcagcaatttattctgttgacattgataaacggatcctaaagtatattatgtaaagggctcagaatagctgaggcataatttaaaaagagttatgaaaggtgagggtatggtggtttgaatgagaatggtccaatatgctaagatatttaaatacttggttcccagttggtggccctgtgtgggtaggtttaaaagttgtggcctttgctggaggaagtgtgtcattgagggtggacttaggagtttcaaaagctatgcaccactgccaggttgcatggtctgcttcatgcttatagttcaaggtcgaagcttccagctgcaacaccatgcttgcctgctcttctgccacccttcccccactaaggttgtgatggattcttagccctctggaactatagctccaaataaacttcccttctctaagaggccttgcttatgatgttttattatagcaatagaaaagtaactaatacagggggcttccatatattgattttgtgactcactttgagtataaagtgaaaaagatggtgtgaattgggaggaggtgtgtacaggtcactagatcacatagaatagaactgaaaagtcagaaatatgtacaacaactggccaaccaagattccctttcctcgtatctgggagtagaacctagaactttgtgcacggtagccaagtgttctgaattatataacctaatccttggtaagagcacaggtctgaattagacctcgcttccctgtagttctctctgggatgcagagttaacttgcagtctgtactgtgacccaacagaaactcctcatttatggtgttagccagtatctgccttccccatgcttttatatcacacacactatactaaaataaacttcatggtgtcaaatttctgctacccctaaaagattattaaaaagtcagatgttttttcatctggcgattgagctgagatgctccaggaagacttttctgggaaaggtgcccccaaagatgctctctgaaggagttcctttggcctctccgattattcctcacattccccccacccccaccttatcccatttgttaatgacattcctctccaggttttcccattccttgactttatttccctccccttatgctcatgctgtnnnnnnnnnnnnnnnnnnnntatcctccccccttatgcccatgctgtctgtctgtctatctctgtctatctgcctctgtctctctccctctctctgtctctctctctctgtctctttgtctctctgtctttgtctctgtctctctgtctctctgtctctctgtctctctctctctctctctgtgtatgtgtatgtgtgtgtgtgtgtgtgtgtgtgtgtgtgtgtgtgtgtgtgtgtgtgtgtgtgtgttatgcatgaatatatgtgggtatgtgagtatatgggtgtatttgaatgtccatgtctatgtgggccagagtttgagttttaattcttcctctaccattctctactaactttttgagacagattttattgaacctagactactttgtctcatctagaatctgcctcttttggctcttacatggaagctgggatgtaggaccaaccacaggtcctcatacttatatagcatacactttgcctatgaagccttcttcccaatcctgaccttaattatttctgtacatttacatttaaggtctattatcaacagcatataataaatgggttgcttgcttttgttttagtttataacaaactttatgagtgtttgttgttttcttctttgagacagtcttcttttttgcccaggccagctgtggccttatgggttcaagagatcctcttacgtcagtgctgggtagctggtactacaggtgtgtgccaccacacctggcttcttttgaaacaacaagtctttattctgggacactttggaagttttccccttaaattttaattttcaggtagttttactctaatgtactttggtttactttctttttaattctagcttgatttgttcaagacctaggcttgattccctgtactcgaatggtttctggttttcagatgtaggtgagtgcctattttcacaactgcctgtgagttcaacatttaggactccaggtatgtgtgctctctccaggtgcgtgtgctcactccagcggagatgttgtgtgtgctcttgtcctggcccagcttttcttcatggggttttctgacaccttccagttctctagcctcttggcatacattaagttttctatgtttttaacttgagttcttacacttttcttttttttatcattttatttttttttccattttttattaggtatttagctcatttacatttccaatgctataccaaaagtcccccatacccacccatccccactcccctgcccacccactccccctttttggccctggctttcccctgtactggagcatataaagtttgcaagtccaatgggcctctctttgcagagatggccaactaggccatcttttgatacataagcagctagagacaagagctccagggtactgcttagttttgttgttccaccgattgggttgcagttccctttagttccttgagtgctttctctagttcctcctttgggggccctgtggcccattcaatagctgactgtgagcatccacttctgtgtttgctaggccctggcatagtctcacaagacacagctatatctgggtcctttcagcaaaatcttgctagtgtatgcaatggtgtcagcgtttggaagctgatcatgggacagatctctggatatggcaatcactagatggtccatcctttcgtctcagctccaaattttgtctctgtaactccttccatgggtgttttgtttcctattctaagaaggggcaaagtgtccacattttggtcttcgttctcttgagtttaatgtgtttagcaaattgtatcttatatcttgggtatcctaagtttctgggctaatatccacttatcagtgagtacatattgtgagagttcctttgtgattgggttacctcactcaggatgatgccctccaggtccatccatttgcctaggaatttcataaattcattctttttaatagctgagtagtactccattgtgtacatgtgccacattttctgtatccattcctctgttgaggggcatctgggttctttccagcttctggctattataaataaggctgctatgaacatagtggagcatgtgtccttcttacctgttggggcatcttctggatatatgcccagaagaggtattgctggatcctccggtagtactatgtccaatttcctgaggaaccgccagactgatttccagagtggttgtacaagcttgcaatcccaccaacaatggaggagcgttcgtctttctccacagcctcgccagcatctgctgtcacctatatttttcatcttagccattctgactggtgtgaggtggaatctcagggttgttttgatttgcatttccctgatgattaaggatgttgaacattttttcaggtgcttctctgccattcggtattcctcgggtgagaaatctttgttcagttctgagccccaatttttaatggggttatttgattttatggagtctaccttctggagttctttatatatattggatattagtcccctgtccgatttgggataggtaaagatcctttcccaatctgttggtggtctttttgtcttattgatggtgtcttttgccttgcagaagctttgcaattttatgaggtcccatttatcgattctcgatcttacagcaaaagccattgctgttctattcaggaatttttcccctgtacccatatcttcgaggcttttccctactttctcctctataatttcagtgtctctggttttatgtagagttccttaatccacttagattttaccttagtacaaggagatagtaatggatcaattcgcaatcttctacatgataacagccagttgtgccagcaccatttgttgaaaatgctgtcttttttccactggatggttttagctcccttgtcaaagatcaagtgaccataggtgtgtgggttcatctctgggtcttcaattctgttccattggtctacttgtctgtctctataccagtaccatgcagtttttaatcacaattgctctgtagtacagctttaggtcgggcatggtgattccaccagaggttcttttatccttgagaagagtttttgctatcctaggtttttttgttattccagatgaatctgccgattgccctttctaaatcgttgaagaattgagttggaattttgatggggatggcattgaatctgtagattgcttttgacaagatagccatttttactatattgatcctgccgatccatgagcatgggagatctttccatcttctgagatcttctttaatttctttcttcagagacatgaagttcttgtcatacagatctttcacctccttagttagagtcacggctaggtattttatattatttgtggctattgagaagtgtgttgtttccctaatttctttctcagcctgtttgtcctttgtgtagagaaaggccattgacttgtttgagttaattttagatctagctacttcactgaagctgctgatcaggcttaggagttcttctggtggaatttttagggtcacttatatatactattatatcttctgcaaaaagtgatattttgacttcttcctttccaatttgtatcccttgatctccttttgttgtctaattgctctggctaggacttcaagtacaatgttgaataggtagggcgagagtggacagccttgtctagtccctgattttagtgggattgcttccagcgtcttaccatttactttgatgttggctattggtttgctgtagattgtttttataattttaggtacgggccttgaattcctgatctttccaagacttttatcatgaatgggtgttggattttgtcaaatgctttctcagcatctaatgagatgatcatgtggcttttgtctttgagtttgtttatatactggattatgttgatggatttccctatattgaaccatccctgcatccctgggaggaaacctacttggtcaggatggatgattgttttgatgtgttcttggattcagttagcaagaactttattgaggatttttgcatcaatattcataagggatattggtctgaagttctctatctttgtggggtctttttgtggtttaggtattagagtaattgtggcttcatagaatgagttgggtagagtaccttctgtttctagtttgtggaatagtttgtgaagaactgggattagatcttctttgaaggtctgatagaactctgcactaaacccatctggtactgggctttttttggttgggagactattaatgactgcttctatttctttggaggatatcaggctgtttagatcattaacctaatcttgattcaactttggtacctggtatctgtctagaaacttctccatttcatccaggttctccagttttgttgagtatagccttttgtagaaggatctgatggtgttttggatttcatcaggatctgttgttatgtctcccttttcatttctgattttgttaattataatgctttccctgtgccctctagtgagtctggctaagggtttgtctatcttgttgattttctcaaagaaccagttcctcgaatggttgattctctgaatagttcttcttgtttccacttggttgatttcacccctgagtttgattatttcctgctgtctactcctcttgggtgaatttgcttccttttgttctagagcttttaggagtgttgtcaagctgctaatgtatgctctctctagtttctttttggaggcactcagagctatgagttttcctcttagaaatgctttcattgtgtcccataagtttgggtatgaagtggcttcattttcattgaactctaagaagtccttaatttctttctttattccttccttgaccaaggtatcattgagaagagtgttgttcagtttccatgtgaatgttggctttctaatatttattttgttattaaagatcagcctttgcccatggtgatctgataggatgcatgggacaaattcaatatttttgtatttgttgaggcctgttttgtgacctattatgtggtcagttttggagaaggtaccatgaggtgctgagaagaaggtatatccttttgttttaggataaaatgttctgtagatatctgtcagatccatttgtttcataacttctgttagtttcactgtgtccctgtttagtttctgtttccacaatctgtccattggtgtaagtggtgtgttgaagtctcccactattattgtgtgaggtgcaatgtgtgctttgagatttactaaagtttctttaatgaatgtggctgcccttgtatttggagcatagatattcagaattgagagttcctcttggaggattttacctttgatgagaatgaagtgcccctccttgtcttttttgatgactttgggttggaagtcaatcttatcagatattaggatggctactccagcttgtttcttcataccatttgcttggaaaattgttttccagcctttcattctgaggtagtgtctatctttttctctgagatgagtttcctgtaagcagcaaaatgttgggtcttgtttgtgtagccagtttgttagtctatgtctttttattgggggagttgagaccattgatattaagagatactaaggaaaagtaattgttgcttcctcttatttttgttgttaaagttggcattctgtttttgtgactgtcatcttttaggtttgttgaggaattaccttcttcttttttctagggtgaggttcccgtccttgtattggtttttttctgttattatcctttgaagggctggattcgtggaaaggtaatatgtgaatttggttttgtcttggaatactttggtttctccatctatggtaattgagagtttgcctgggtatagtagccttggctggaatttgtgttctcttagtgtctgtataacatctgtccaggctcttctggctttcatagtctctggtgaaaagtctggtgtaattctgataggcctgcctttatatgttacttgacctttctcccttactgcttttaatattctatctttatttagtaatttgttgttctgattattatgtgttgggaggaatttcttttctggtccagtctatttggagttctgtaggcttcttgtatgttcatgggcatctctttctttagatttgggaagttttcttctataattttgttgaaaatatttgctggtcctttgagttgaaaatcttcattctcatccacccctattatccgtaggttcggtcttttcattgtgtcctggattacctggatattttgagttaggatctttttgcattttccattttctttgattgttgtgccaatgttctctatggaatcttctgcacctgatattctctcttccatctcttgtattctgttgctggtgctcgaatctatggttccagatttctttcctagggtttctatctcaagtgttgcctcactttgagttttctttattgtgtctacttcccttcttaggtctagtatggttttgttcatttccatcacctgtttggatgtgttttcctctttttctgtaaggacttctacctgtttgattgtcttttcctgtttttctttaaggacttgtaactctttagcagtgttcttctgtatttctttaagtgagttattaaagtccttcttgatgtcctctaccatcatcatgagatatgcttttaaatctgggtctaggttttcgggtgtgttggggtgccctggactgggcgaagtgggagtgctgggttctgatgatggtgagtggtcttggttcctgttagtaagattcctacgtttacctttcgccatctggtaatctctggagttagttgttatagttgactctgtttagagattgttcttctggtgattctgttaccgtctatcagcagacctgggaaacagactctctcctctgagtttcagtgctcagagcactctctgctggcaagctctcctcttacagggaaggtgcgcagatatcttgtgtttggacctcctcctggccgaagaagaagtcccaaaacaggacctttcccagaagctgtgttgctttggcaggtcccagaagctgtcatcttctgtggtgcacactctcacctatgcagactaagttcctaagttcggcagagtcccggaaccaaggtggcgcccgctgctcctgaggctgagggattcagagccaggcggacacctgtcttctggtcgggatggtggctggctgtttgcagcccgaaaagggtgctgcatcagcggctctgtggctctgcctgtcccagaagctgtccggttctgtggtgcaccctctcacctgttcagactaatttcctaaattcggcagagtcccggaaccaaggtggcgcccactgctcttgaggcagagggcttccgagactagttcttacacttttcaaggtgtaaaattttagtatccttatgaaaattttcatattgtcattttgtctgagctattgatcacacttaacattttaaaaatttttttaattggcatacattacttgtgtcacgtaacaggtttcaatctgacattttcataaatagaaaatgggttttgagcatatccaacccgtatattatctttgaggtggtgattgagaagttaagagaacctattctttcagaagacctaggcttgattccctgtactggaatggcagctgacaaccctttgtgactccagtcccaggggacctgatgcactcttctgatgtcattggacatgaaccatgcatttggtgcacatacatacatgtagacaaaatgctcatacacataaaaataataagtcatttttaaaaattagattttgttcttacatcccccttctttatccttaattggctattgtacttccatgcttttctttgtgctttcataaatcgcatatattagagggaacatgttacttgccttcatgcctctggctcatttcacttagtgtcagcacatgatttggtcatcatttggcatttctctgccctttctgtggtatactgagtcattaaaacaaatctgttgagatcttggtgttttctgcaaggagggcaccaggtcacagagtgaagagggttagctggctccacctacagagcagagttgcagcctttaagggctcagtcccttccatgtacctccacatctcaccagtgacttccctgtgactgactcaatggctttctcagccttacctttgagaaacacttatcttctttttcttatctgtacgaatcacatgtatgttgtcatgcactcagaattatagagtgttctgtgagggtttagcctatttctgaacatttagttcagaatgggacatttggccattgttcccataatgctgtaatttttccatgatgtaggtcagttatagtccagggaaagtttttctttcttccctgtcttataacttatcctccccccacccccgcttgtctttttctacacaagaatcaaatgtagaagtgtggtttcactttccatagtttaacctagtacgcagcatacctacaatccaaaactattaaatggaaacaagcatctcatccaatttaacttgttgaacagtctaagtagtttggtgaaatcacatgccatcttattctgtttcacccaagatataaaccatcttttagtttttccacactgacaggggcgtatcacagtgcctgtgttcaagtacccctgatttagttattgttccatggtatattagtagtgatatgggaagttttaatacacttaatatttt

SEQ ID NO: 835 - DNA, 4451 bp, Mus musculus
agcccatctgacataccagagccgcgggtggctgtgcaccgcagggatgtatttcagctgggctgcaggaagccggaagcctcggcgcctgaaggcgggaaccagcggcattgaactcttgcaggcagccagcggggaacaccactcgctcctactgttcagcaaccacagggtgtattcctgcggggacaacagctggggacagctgggccagaggagagaccagagtaccgaaaggccagaaccaattcaggcactgaatgatctgcatgttgacctggtgagctgtgggaaggaacactctgtggctgtctgccacaaaggaaaggtcttcgcttggggagccggttctgaagggcagctggggattggagaatttaaggaaataagctttatgcctacgaaaataaaagctctggctggcataaaaataatccaagtttcctgtggacactaccactctttggccttatcagaagatggccacgtgttttcatggggaaggaacagtgaaggacaactgggcctggggaagaattcccgttctcaagctattccacagaaggtgaagtctctggaggggatcccactggctcaggttgctgcaggtggcacacacagttttgctctgtctctcacggggacatcatttggctgggggagcaacagatctgggcagttggctctcagcgggaacaaagttaaagaacaaatctacaagccgcattcaattggtgccctgaagaatctgagtgtgatttatattagctgtggttatgagcatactgcagtgcttactgaggagggacaagtgtttacatttggaggcaatagctctggacaactacagcccagccccaggagtggacaaagaggcccacaactcatagaaggaattggtggccgtgtttcacagatagagtgcgcaagttatcacaccattgcatatgtctacaccactggtcaggtggtatctttaggccgtggaccaagtcacacaagcaacccaactcatcaggaggcccccgcagagaactctgatattacctgcctgctagctgcagaggaccttgtggatattgaagtcaaagacatttttgctggagcacacgccaactttgtgacaactcgtcgggtatcacatactaggtctacaggtgtttccatgaaaatcctgccagaaataatccgaatcaaccagtctctggtaaagaaatggagagcagcaaataaaagaaaagatcgtgaaggcgccaaaaggttttacctgctatataatttattaatagaaaatgaaattcaaggtcttgttttctttaaggctaactgtcaacttccagaaagtgccttcatcataaatgagctttctggcatctttaactttgatgcagaggcaggaagaatgttcatacggcataacgatctggactgtacagaatcctcagatatggttgttttcagtgattttctatttgtctttgatttgccatccaaaattaaactaatgaaatgtgactcatttgtaaaactgatggttggatttattaatgaaattcgtcctgaggctgggggagtgagttcagagttcttccactgtatatttgaagagatgacagaccccaaatatgaaatgttcatatatcctgaaaagggttccagcatgtggtttccagtcaatatatactgggatcaaaaagatgttgatttaattccagatgggatctctgtgcctgtgaatgaaaccaacaagagagactatgtgtctaagtatgttgattacatttttaacatctctataaagacgatttatgaagaatttcatagaggattttacaaagtgtgtaactgggatataattaggcaattccagcccgaagaactaatgacagcaataattggaaatgctacttgtgactggaaacaatttgaaaataattcaaagtataaagatggatatgacaaatcacacccaactattctgctgttttggaaggctttccatgacttaactttggatgaaaagaaaaaattcctcttgtttcttacaggatgtgataggctgcatgtgaaaggcctacagaatgaaggaatagtattccggtgttctgaaaccttcagtgaagaagataacccaagatcattgacatgtcacaggatgctagacctacctaagtattcctcaatgcgaaggatgaaggaagcacttcaggttgcaatcaacaatagcacgggatttgtctcacaggaatgatgcagaaacattcacctcccagcagttcacagcctcgggaactaggtgtttcactttgggattcttctgtctttccttaatctaagtagggacaagaggttaaaggattttacttgaattgcacagtttttgagataaataaattataaattaatactttagtgaaaaaattctgtaaaacatttgctgcattcttaactttgatgcttttgaatgtttgttttggctgaaatatttcctgaacaacaatgttcatttaataatatactaaatatttaaaatgttcaatattgtgagctaaagagagagctcaatgtttaagatcactggctgctcttccagaggaccagggctcagttcccagcacccacaatggctactcacctctcgtctttaactccagtcctaagggatccaacaccctcctctggcctccaagacattccatggatatggtacacagatatacatgccaccaaaacactcaaacacctaaattaaaaaaacaaataaaataaaatagtgtttatttaaagatttatggtacctataataaactattagtttgaaaatattaagaaaccatgcttgcaaagctttcaacgtgtttttgaagcatataggtgcatattttgtattaaggaatataattagagttgtgattttagaaaattctaaatgatttattttcaacttctaagtgttgacatttattattcatcaaaggtacttatacttagtacagtgttccaaaatacattctaaacatagataatgttattttagtaaaatactgaaaacaatcaagaactcatacctactcatggttggcaaaatgggaagaagttgaaatatgtcttattatgatgctatagagtaaattaatgaagcaatgtaactgctatggaaaatgaccaatacatcttgtatactagttctacttaatgttagaacttaatttgaattacacagctttgaaataatttcataaatataatttgtcataagaatgacatatatgctgctgtgacaatcactcatcataaaagttccatttctgtaaagatgttgtatctttatagacttatcagactttatatgtgagatgtttactggactccaaagaaaccaaataagctaattaaaaatagatcatttaaagaaaataaaatgattgtcatcaattgctacaacaaaagcaaatgaatcgttagaagagggaatacgcttcagctaattctcggattccaacattgctccagtaccagacaaagatgtcacagagagaggaaaccatagatatcttacgtgaacagacaccaaaatccttccctacattttaatatacttagaacatccaatacaatatagagtgtggtgcctcacaaccaagtgggaattaacctggagatgcacttaaaaatcaactacatctcaacagactgataggaaagaatgtccatatagtacctcagaatagacagaaaagtaactgagcaaaatgtagcacctagtcatgtatgagaaagccaacaaggcctaaaggaaactgccaatttgataaaacctagatacgtttgacttcttaatggcaaaagactaaatgctgcccactggcaagaagatgggaaggcctatcatgtacatataacattgtattcaggatatgaatttatattataaataatgacaataaaaaacataaattcaaaaccaaagaacaaaaagccttattttcagattatattaatcacatagaagagtcttaaaaagcacattaaataaatgtagaaagagctcaggactcaagatcacaaacacacagtgaattggaaaatcattgtcatctatcatatgaaaaattggaaataacagagagtaattttaataagtttttaaaatattttataatgaaaactatattgtttaaagaaactaatgaagtcttaaatcaatatgtataaaaagatcagatttactgatagcgacatgctattattccaaggtttgtgggtatgtgtgtgtatatggtatgtatttgtgtgtatctttgcatgtgtgcgtggtgtttatgtgtgcatatctgtgtctctgtatgtgtgtctgtatttctgtgtgtatgtctgtgtgtgtggtatgtgtccgactgtctatgtctgtgtatgagacttactgtgatgcttattgtttacagggaatg

SEQ ID NO: 836 - protein, 747 aa, Mus musculus
AHLTYQSRGWLCTAGMYFSWAAGSRKPRRLKAGTSGIELLQAASGEHHSLLLFSNHRVYSCGDNSWGQLGQRRDQSTERPEPIQALNDLHVDLVSCGKEHSVAVCHKGKVFAWGAGSEGQLGIGEFKEISFMPTKIKAGIKIIQVSCGHYHSLALSEDGHVFSWGRNSEGQLGLGKNSRSQAIPQKVKSLEGIPLAQVAAGGTHSFALSLTGTSFGWGSNRSGQLALSGNKVKEQIYKPHSIGALKNLSVIYISCGYEHTAVLTEEGQVFTFGGNSSGQLQPSPRSGQRGPQLIEGIGGRVSQIECASYHTIAYVYTTGQVVSLGRGPSHTSNPTHQEAPAENSDITCLLAAEDLVDIEVKDIFAGAHANFVTTRRVSHTRSTGVSMKILPEIIRINQSLVKKWRAANKRKDREGAKRFYLLYNLLIENEIQGLVFFKANCQLPESAFIINELSGIFNFDAEAGRMFIRHNDLDCTESSDMVVFSDFLFVFDLPSKIKLMKCDSFVKLMVGFINEIRPEAGGVSSEFFHCIFEEMTDPKYEMFIYPEKGSSMWFPVNIYWDQKDVDLIPDGISVPVNETNKRDYVSKYVDYIFNISIKTIYEEFHRGFYKVCNWDIIRQFQPEELMTAIIGNATCDWKQFENNSKYKDGYDKSHPTILLFWKAFHDLTLDEKKKFLLFLTGCDRLHVKGLQNEGIVFRCSETFSEEDNPRSLTCHRMLDLPKYSSMRRMKEALQVAINNSTGFVSQE

SEQ ID NO: 837 - DNA, 84316 bp, Homo sapiens
  misc_feature (1)...(84316): n = A,T,C or G
gtgttttccacaggcaacactcaggagaataagaaggatctatttgtgatgccagttgttagatatagagacatttgagatgttgttgccaaagacctcaactctggtaggagtgatggagacagaaagaagtagatagaaaatgggatattgatgatatcagccaatcagcaattaatccattaggggagggttttccttttttgttttttgaagcagggtcttgctctgtcacccaggctagagtaaagcagagtgaacacagctcactacagccttgacctcctgggctcaagtgatcttcctgcttcagcctcccgtgtagctgagaccataggtgtgtgccaccacgccaggctaacttttcgattttttgtatagacagggtcttgccttgttgcccaagctggtcttgaactcctgggctccagctatcctcccctttgacttcccaaatttttgggattactggtgtgagccaccgcccctggcctgagagttttgcagtggcaagaaaatgtaagatgaattggaggtttttagctggaatggttttaaggaagtgccactagggggcatgaaaggaaagatcagggaataaagagtgttctaagactttagtaaaaattaaacaggctttctagtcaaatggatcagtgttaatatcctaccatttaggccagtgcagtggctaacacttgtaatcccaacactttgggaggctgaggcaggtggatcacttgaggtcaggagttcaagaccagcctggccaacatggtgaaaccctgtctctactaaaaatacgaaaattagctgggcgtcgtggcacctgcctgtaattccagctacttgggaggctgaggcagaagaatcgcttgaacctgggaggcagaagttgcagtgagctgagatcacaccactgcactccagcctgggtgagtgatagagtgagactccatctaaaaaaaaaaaacaaaccctgccatttatacacatcgtgtaacttcaagcaagttacctaaactctctgagccttaattccttaccctcaaaaatgagaataataataataatacttattttgcatgattgatatagaaagtcgtgttgcttaactccttagcatctgtctcagctttcttccagcaacatgcctttcatctgggatctgcttactccgctcagaaagtgcatggatgagattccatcctgatccacaaggtagactgactaccccattggcttccacagtgattgcctcaggggtagacatatgacccaaatcgggtgaagacttttgttttgagcagattttttctgtacacaggctgtgaagctgagagctggatatatataaagtttagagctgctgtaaccctcttgcaatctcagaggagctcctggaattgcaagatagactgcatggagcctgaagatgaagccctcatagcaagaggcggagtgaagagacagagaaatggagtcattaaggacattggttaagtccttgttttcagtagtgcctgtaatcagccattctggtggatttttcagttacttgactttaataataaacagttgcgctgtaatcataaatacctcctaaatgctcacgtgcttacaacaacaaaaattatctcttgctgatgctacatgggctacctgcagcgctgctttattgttgtttttaatctgggactcagtaaaatagagcagtctctctctagaaaatcacctgttgtaacggaggaaaagaaaagtaggaaaagaagtgctcgctctaaactatctgcctgaagttgcttgcttcccacttgcatataattggccagaacaaatcacatggtcaagattgatgtcacagggtggagaggggcagcaaagttttttgaaaaataataatgcaatctacaagtaaatttcccttttgcttaagtgagcttgggctatattttctgtcacgtgcaaccgaaagaatctttttttttttttttttttgagacagagtctcactctgtcacccaggttgtagagcaatgacgccatctcagctgactgcaacctccgcctcccaggttcaagtgattctcatacctcagcctcgcaagtcgagtagctgggattacaggcgccctccaacgcacctggttaatttttgtattttagtagagacggggttttgccatattggccaggctggagaatcttaactaaggaaaggtgatgaaagaattagatattttatataaaatcatcaacacatggtaagtactcaaaatatcggaccttctgtttccaagtgcatgaacacagattaagtgaaaattatctttcttaaaaaaaaagatgtgctcaatttctttaatatacattttattcacttatctcactaacatttattcagttttttttttttaaatttggcagacactgtgctaggtgctgggaatacaaaatgagtacaatgcgcttacattttagttattcagtagattttcttttaagaaataacaatatgaggtttcagtgtcttatattgataatatcaaactcttacagtctgagcatatgaaacattctccaaggtcagccatatcttaggccacaaaacaagactcaacaaattttaaaaagtaaaaattatattgtgtcttttgtgatcatagtggaataaaactagaaatcaataacaagaacctcagaaactacacaaacacatggcaacacaaacaacatgctcctgtatgaccaatgggtcaatgaagaaattaagaaggaaattaaaaaatttcttaaaacaaacgaaaatggaaatacaacataccaaaatctatgtgatatggcaaaagcagtactaagagagaggtttataccaaaaaactaaaaagacatcaaataaacaagctaaaaaatgtaccccaagagaccagaaaaacaagaacaaaccaaacccaacattagtagcagaaaagaaacaataaatatcagagcagaaataaaatcagagcagaaataaacgaaattgagactaaaaaaattacagaagatcaacaaaacaaaaagttttctcgaaaagataaaattgacaaaactttagctagactaagaaaaaaagggagaggacccaaataaataaaatcagaaatgaaaaaggaaacataacagctaagaccacagaaatacaaagaatcattagagactattatgaaaaactacatgccaacaaattggaaaacctagaagaaatgaataagttcctggacaaatgcaatctaccaagactgaaccacgaagaaatagaaaacttcaacaaaccagtaacaagtaacaagatcaaagccataattaaaaaaatctcccatcaaacagccgaggacctgacagcttcactactaaattctaccaaacacttaaagaagaactaataccaatcctactcaaactctgttaaaaaaaaaaaaaaatgaaaaaggagagaatactttcaaactcattttactaggccagcattaccctgataccaaaaccagacaaggacacaacaacaaaaactacaggccaatatgcctgataaacatagatacgaaaatcctcagcaaaatacaagcaaaccaaattcaacaacacattaaagagattattcactcattaaagagagtgatcattaaagagagtgatcaagtaggattcatcccagggaagcaaagatggttcaacatacaaaaatcaataaatgtgatatatcacattaacagaagcaagaacaaaaaaccacatgatcatttcaatagatgctgagaaagcatttggtaaaattcaacattcctttatgataaaaaatcaaaaaactgggtatagaaggaacgtatttcaaaataataaaagccatatatgacaaacccacagccaatatcatactgaactgaaaaactggaaaacctttcctctaagatctgaaataagacaagggtgcccattttcaccttttttgttttttgtttgtttgtttgagtcaaggtcttactctttcacccaggatggagtgcagtggcatgatttcagctcaatgcaacctctgcttcacaggttcaagggattctccttcctcagcctcccgagtagttgagattacaggcatgcaccaccacaccaggctaatttttgtatttttaggagagacagggtttcaccatgttggccaggctggtctcaaactcctgacctcaggtgatccacccacctcaggctcccaaattgctgggattacaggtgtgagccaccgcgcccggcccactttcaccatttttattcaacataatactgaaagttctggccaaagcaattaggcaaaagaaagaaataaagagcatccaaattggaaagaaagaagttaaattcgtctttttcacagatgacatgatattatatttaggaaacccaaagactccaccaaaaacaactgataaacaaattcattaaagtgacatgatacaaaatcaacatacaaaaccagtagcatttatataaaccaacagcaaacaatataaaaaagaattcaagaaagcaattccatttacaatagctaaaagaatataaaataattaaaaatcaatttaaccaaaatgatctatacaaagaaaactataaaacactgattaaagaaattgaagaggggctgggcatggtggttcaaacctataatcccagcactttaggaggctgaggcaggtggatcacttgaggccaggagtttgagaccaacctaaccatcatggtgaaaccctgtctgtagtaaaaatacaaaagttagccaggcgtgatggcacacgcatgtaatctcagctactcggcaggctgaggcatgagaatctcctgaacccaggaggtggaggttgtggtaagccgagatggtgccactgcactccagccttggtggcagagtgagactcagaagaaagaaagagaggaagagacagagaaagagagagaggaaaggaaggaagaaaagacaaaaagtagaaagatgtttaatgctcatggattcgaagattcaatattgttaaaatgtctatattatccaaagcaatctatagatttaatgcaattcccatcaaaattccaatgacttttttcagggaaataaaagttattattattttttttaaatagaagaccattaacagccaaagcaataagcataagaacaaagctgtaggcatcaccctacctgtcttcaaaatgtactacaaagctagtaaccaaatcagcatattagtataaaaacagatacacagatcaatggaacagaatatagaattcagacataaatccacacacttagagccaactcatttttgacaaagaagccaaaaatatataatggagaaaggacagtctcttcaataaatggtgctgggaaaacttctgcatgcagaagaatgaaactagacccctggccgggcgtggtggctcacacctgtaatcccagcactttgggaggccgaggcgaatggatcacctgagatcaggagttcgagaccagcctagccaacatggcgaaaccctgtctctactaaaaatataaaaattagacgggcgtgatggcagaggcctgtaatcccagctactcaggaggctgaggcaggagaattgcttgaacctgggaggtggaggttgcagtgagcagagattgtgccagtgcactccagcctgggagacaagaacaaaactccatctcagaaaaaaaaaaaaaagaaagaaagaaactagacccatatacaaaaatcaaatcaaagttaattaaagacaatataagatgtgaaactactagaagaaaacattggggaaatgctttgggacattgctctgggcaaaaaattttgtggaagatctcaaaaacacaggaaacaaaagcaaaaatagaccagtgagattacattaagcgaaaaagcttctccacagcaaaggaaactcaacaaagtgaagagacaacccacagaatgggagaaaaatatttgtaaactatctgtctgacaagggattaataaccatattattataagaagctcagataactgaacagcaaaaaaaaaaatctgattttaaaagggcaaatgatctgaatggacatttctcaaaagcagacatacaaatggccaacaagtataagaaaaaatgctcaacatcactaatcttcatagaaatgcaaatcaaaaccatgagatatcatctcaccacagctagaatggcttttaccaaaagatagggaataaggaatgcaggtgaggatgtaaagaaacgtacactgttgatgtacatttcatacattgttggtgggaatgtaaattagtacagccactatggagaacagtatggaggttcctcaaaaaactaaaaatagaaataccatatgattcagcaatttcactactctgtgtatatacaaaagaaaggaaatcaatatatcaaagagacatctgcactcccacatttactgcagtactattcacaatagcccaaatttggaatcaggctaagtgcccatcaatagatgaatggataaagaaaatgtggtacatatacataatgaaatattgttcagccataaaaaaagaatggaattctgtcatttctgcagcaacatgggtggaatggtcattatgttaatgaaataagccaagcacagaaagacaattatcacgtgttttcactcatatgtcagagagtaaaaaaaaaaaaagtgaatctcatgaagataaggagtacattgttggtaaccagagtccaggaagagtaggggtaggggtgaggaaaatgaagagaggttgattaatgggtacaaatatacagttggatagaagaaataagacctggttcaatagctcagtagaatgactataggtacatttcaaaaccactagccaataataatttgaatgttccttttttttttttttttttttttgagatagggtctggctctgtcgcccaggctggagtgcagtggcacgatctgggctcactgcaccttccacctcccaggctccgggctcaagcaatcctcccacctcagcctcccacgtagctgggactacaggtatgtgccactgcacccagctattttttgtaaagatggggtttcaccatgttgcccaggctggtctccaactcctgagctcaagcgatcctcccatctcggcctcctaaagtgctaggattataggcatgagccactgtgcctagcccaagataaattatttaaggcgatagatatcccaatttgataatgtgtcaaattatcatatgtacccccaaaacatgtgcatctattatgtatcaataaaagattttttaggccaagagtggtggctcacgcctgtaatcccagcactttgggaggctgaggcaggcggatcacttgaggttagaagttcgagatcagcctggccaacatggtgaaaccctatctctacgaaaaatacaaaaattagccaggtgtgatagtgcccgcctgtaatctgagctgttcaggaggctgaggcaggagaatcgcttgaatcggggaggtggaggttgcagtgagctgagatcgtgccactacactccagcctgggtggcaaagcgagactctgtctcaaaaaaaaatttttttttaaagaaataacttaatttgagggctcagtatcttatggtaataataccaaactcctacattttgtgcttgagaaaagaaataaacattaagaaattactattcagaaaaaggttatatttggtatacagcaaaacagaaccagaaatactaatactatccactgactcactactcatcaatccaattgtccgacatacccttattagcatctaccaagttccaggtactcttgaggtagaaaaataaagaacatttgttcttctctttaaagaacttgaaacatggtcatgaagagtggtgaattgaaattacataaataggttctgtaatagtttcttttaaaaaaaaatcaataatgctgatgatggctaacattatcaaagttaccaaatctaaaaaccagtgctcagcgggacatggtggcctataatcacagcactttggaaggctgaggtaggcagatcatctgaggtcaggagttcaagaccagcctgggcaacatgatgaaaccccatctcttcaaaaaatacaaaagttagctgggcgtagtggcacgtgcctgtagtcccgctacttgggaggctaaggcgggaggattgcttgaacctgggaggcggaggttgctgtgagttgagatcacgccattgcactccagcctgggcatcaagagcggaaactctatctcaaacaaacaaacaaataaataaataaaaatcagtgctcaatccttaccttgctccacaagaaattgacagagttgatccttcctttattcgttacttgctctgtctataactcctcctcctggttttcctcctatgatcagtcctctagcctctgctatactgtcaccacattcaccccctgggtgttctcattcagccatctggctttaagcatcacctctacactgatggctcccaattttctgactacacccaagcttctctctacaactccaaaacagtttatcctattgccttcttgattaacaagcatcttacagttatcattaccaatctgtattccagacacacatagcttaaacctgcaccttcctcagggtttcccagtccagtagagtttaccttggagtaacccctaaagccaaccctggagtaatccctaatcccttttcttctttccccccaatttctaatccatcatcaaatctgtggactcttactttcaaaacatgtcttgaatctaataacttctcctctcttcccttctaggatatcacctgacctgaactctgaagtagtctctgctaactggctttctgcttccatttttgtcctattatttttcacacagcagccagatgaatctttaaaaactgaagtcagatcatggctcttctctattcaaaaccttccaactgcttcttttcatcctctgccctcaggtgtgatcacgactcattccctcatttcccatgtcccctcagctctctgcacaaatatcacttcatcagagagatcttccctaatatcatctcaaataccagtgccttccgcctccaccctctggttcctgttgtatttttcgttgccccttgatattacactatgtgtttatctgtttatgttctctttccctcaggagaatgtaaacgcatcaagaggatcttgtctttcactaattgtattttcaggcggggcccagaggctcacgcctgtaatccctgcactttggaaagctgaggggtggatcacttgaggtcaggagttcgagaccagcctggccaacatggtgaaaccccatctttactaaaaatacaaaaattaagtcgggcgtcgtggcgcatgcctgtaatcccacctactcgggaggccgaggcaagagaatcagcttgaacccgtgaggtggaggttgcagtgagccgagatggtgccactgcactccagcctgagcagcagagcgacactccatctcaaacaaacaaacaaacaaacaaacaaaaaacaaacatattttcaatgccaaaaaaggtctggaatgaggtgggcactcagatgctttattaaccactctaggtattattctaacactttatgtgcctattaaattatcccgacatattagatttgctgaattgcagtccatatttcgtagatatgatagctgaagcacggaatcattaggtaacttgcccaaagtggcattcacgactcataaatggcttaggatgtaaactcagttttattccctgggacgccctctctgctcttcagcacttgaagttcaggcagcgagagttgacatggggccagggctgcgcccctggggcgggttgaagacagggtgagtctcttgatattcaggaaatcatcgcgcacccagtcaccagcgttcgggagcctgtcgcagcgggaccgacggaatccggagcaggcgacagggcgcagaagcgggatgtacttctgttggggcgccgactccagggagctgcagcgccggaggacggcgggcagccccggggctgagctactgcaggcggccagcggggagcgccactctctgctgctgctgaccaaccacagggtcctctcgtgcggagacaacagcaggggtcagctgggccgcaggggcgcgcagcgcggggagctgccaggtgagcggggggccccaggtgcagggtgtgaggaccccagtacatgggcgcgggggcttgggtaccgggcgcagggaaccgggtgcggagcgctgggacccgggtgaggggcgcgggggcccaggtgcagggagcggctcagatgctgggcgccgcgggccaggcagggaggggtgctgggagccttggattcctcggggcccgaagagccacaggaaccaggaaaatggtgccctgtgctaccgaagagcaacttcctcagtttcgttttcccaacgcccctcggatttgtttcggtttccaattcaagttcaaagcgaaactgagagccgaaactaacctggtcagcgctgctctggaaagagatgtggtccctccggcttgccttgcagataaatcctcgcctgcgcggttctacctggagaaggcagcctgaccttacaaacgtggtttgtgggtcagacacctgtatctcccttagaaatacactggggcattaaaaaatatatatatataaaaaatatatatataaaatatataaaatatatataatatataaatatatataatatatccatatatataatatataaatatatatataatatataaatatatataatatataaatatatatataatatataaatatatataatatataaatatatataaatatatatataatatataaatatatataatatataaatatatatataatatataaatatatataatatataaatatatataatatataaatatatataatatataaatatataatatataaatatatataatatataaatatataatatataaatatatataatatataaatatatatataatataaatatatatataatatataaatatatatatataatatataaatatatatatatacacataataggccggacgcggtggcttacgcctgtgatcccagcactttgggaggccgaggcgggcggagcacgaggtcaggaaatcgagaccatcctggccaatatgatgaaaccccatctctactaaaatacaaaaaataaactgggcgtggtggcgggcgcctgtagtcccagctacttgggaggctgaggcaggggaatcgcttgaacccgggaggcagaggttgcagtgagccgaaatcgcgacactgcactccagcctggcaacagagcaagactctgtctcaaaaaacataataataataaatatatatattatatatgtgagataatacaataatcgttatggattattgtagaaatacgagaaagcaatcaccgtagctccaacacccaaagataactcctaacattttgatgcattttctccttgtctacttttttctatgtacatatttaatctttataaaaatcatgtcattatagatttgtatatgcagtatttatgcaactctgtacattgtgttttcatcaagcataatcttatgaacatattaccctttcattttgtatgttttgaaaatatgttttaaattgctgcataacattctaaactctgagagtaccataattattctctttttgtggaaattagattgtttcccactaggggcttttataaataatactgattgatattctcgtaagcaaatatttgactacatttttgatgacctgctgagaatagtttcaaaaggtgtgtggaggaggaaaatttttcctctaccctcttaggttcagcggctgggtcctgcaaacttaactgacaaaagacagattgacaggagaaaaagcatacaattttattaatcttttacatataggggaatttacatgcgtgggaatttacagaatagaagtgaaactcaagtgcttcgacttaggagcttgtgtaccatgtttaacaaagaaaagggggtttggactttaaaggatgatgaactcagggaaagtgactagaaaatatatgggaaaatctaatggaagataagggttattttaattgacttgtttatgcaggctcacctcagtgccaagtcttcatcttaggtgacccttctcttcttttttttttttttttttttttgagatggggttttgccctgtcaccaggctgtagtgcaatggcactatctcggctcactgcaacctccgcctccccagttcaaacggttcttctgcctcagcctcccaagtagcagggattacaggcactcaccaccatgcccagctaatttttatatttttagtagagacggggtttcactatgttggtcaggctggtctcaaactcctgacctcgtgatccacccgcctcggcctcccaaagtgctgggattacagttatgagccactgcgcccggctgacccttttcttggtgccagagatgggagcttctcacaaaaggatatttatgacctacttttaggtagataagaagagagcagagacctcttcctgcatctgttgattctcaattgccttcagctcaaattcttaaagtagcatgttttcaggtcttatcaccctcatttggaaatgaagggcaacatgatacttaaccccaaattgttctctagaaaaatggtaccaatttctatctttgtgagtgcatgaatctttgggaaattttaaccttgcataaattgacagtaaatagttgaaaaagataagattacaaagataaaaggaaaaacaaaatcttaaatgttgcaaaaactttactggtatgatgttctcaactccaaacctctaataattcagagacagacaccttgggaaagcagtttaggttggcttgtagggaaatgtgatccggttttcatttgtgggcatatttagggcctccataggggcatatttttcacttttcattgtaagaggatccagcatctgcctctcacactcatgaggtaggctcccttccaatttccttctgagcaagggattcactgctttcagtgtttagggtgggaagacagaatagcaaaatggaggagatcccaacttttttctgggtctctttattttgctaggttttgctagagaaacatttggtcatgtgtcatagtccctagaagttaccccctccgtgatgcctactcctttaaataacagccattaaaagatagacttgggtaattgaatgtttttaagagtcaatttgaacattcagcagttcatgaattgagcagcaccagacctcaagcagttgggctccactaagggaggtgcaaggagatgccagggggaacctttgataacgtgttccaggaagcaagacaaagaaaatacttgattggttaaagtggaaagtcccttgtttgaagtagtcagcagtttctggttggtaaagtctctagttagatgttagttggtggtttctgattggttaaccttaagtttcattttcctaggctatgatcaatcactctgagttgggttttggtttgcttaggtaggaacccaaggtgctggagccatctcaacctgatagtctccctgttgattattttaacagagctgtatcctataaagacagggtaacatacattgaatttacttccttcagacatttagaatggacttaaggtcttgattcaaaagaccattggaggagacaagaaatctggatgatccttctttttgaagaaaagtgctgtcttaaacttgtgttaaattaataatctgcagtggtggttggggggtgttttgttttgtttcccaaagaaccaattcaggcattggaaaccctaattgttgatctcgtgagctgcgggaaggagcactccctggctgtgtgccacaaaggaagggtcttcgcatggggagctggttctgaagggcagctggggattggagaattcaaggaaataagtttcacacctaagtaagtgtttcaacccactccttcatttattcaatatatatagtaccatgtgccaggcactgtgcaagatgccaggatacaaagacgactatgacaggccagctgcagtggttcatgtctgtaatcccaacactttggaaggctaaggtgggcagatcacttgaggtcaggaatttgagaccagcctggtcaacatggcgaaagcccctctctacaaaaaagacacaagaaaattagccaggcatggtgtcaggcacccgcaatcccaactactcaggaggctgaagcgggagaatcgcttgaacctgggaggcagaggttgcagtggtgctgggacagcgccactgcactccagcctgggcaacagagggagactcagtctcaaaaaaaaaaaaaaaaaaaaaaaaaaaaaagactatgacaaacacagttcctaacctgaaggactacagtgtagtgagggaagaagggaggaaaaaacctacaacaccaattattatttaattagagcagagtgaaatgagatgtgaccctttgatcttaatcttatctcttggaatataactgtgggggccaacttagacctccagagtgggtataaagaccactgtaaagtagaaacatttgagctgcaaaagatacagatataaatcttacctgaacttcctttatcatactaaaacagagcctcctgaaaatgcagttcccagtaacttccttgagtgagagtttcctgggaattcagttgtcattaagatagaccacccattactattaccatcaaaaagcccaatagaaccttctatactttcccactgaagtcccaaaaccccgccttttattaaggtgacatatataaaactttactttgggatattctgcaatagcgagcatgcttgtaaataacctttgtcttttctcttgttaatctattgtcagttaatttgcaagcccccaaatattggaccaaaggtggaagagaagtttttttctcaacacaaccttttggcttgtcataaaccactgggccctaacattttacttagtaaagtggagggaaatatcacatttcctcacaaacaacttcccaggacagatatgacaagtagttggctctggattatgtgtttatgaattacatacttaggggattttcaaacgcatgctttttaatattaggaaatcacctcttgttacctcttctggtcattaaattctagaagagatcaatttgacttggggaaatgagcattgaacttggaatgaaaagaccagaatttgagtctggttctacagcatcataactatttgacctctttgagttccattagattcaccttatgaaattgctcatagtggccaggtgcagtggctcacacctgtaatcccagcactttggcaggccaaggtgggcggatcacctgagatcaggatttcgagaccagcctggccaacatggtgaaacctcgtctatactaaaaatacaaaaaaaaatagccggacgttgtggtgcatgcctgtaatcccagctacttgggaggctgaggcagtagaattacttgaacccgggaggaggaggttatagtgagccaagatcgcaccactgccctccagcctgggtgacagagcaagactccgtctgtgaaaaaaaaaaaggaaattgctgatagttatctggttttgatccacaaaaatggcaattttgtatgatttaacctaatgatttcttcattaaattagggcttaaattagatgatgaagttgttggtgttctataaattctaaggccctatactatatatgcagaaaaaatttatttctcttttaggctattaagtgtagaataaaattagtatattagatattgcattaaagtccaatagcaatggcttttgcatttatatactgttttggattctgtcctataacttggtacatgttaatgtcatgttaaaaacagtttgagggctttggaataaaggtactatagaaatacaagaaaataaaatagttttcctggaccagatgtattatttgagatacttttaaatatctgtagtccaccggacaactcgctctaaataaggattaatcaattttgtattatttgtattataggaaaataatgactctgaatgatataaaaataatacaagtttcctgtggacactaccactccctggcattatcaaaaggtaagaaacactttttggatctgagtgtgagtaggaagtaattttttgaataggaattatagctgctgatttttaatgcactggggttcatttagaagtttttcattccccaggtttcataagatatattgttttcctatttttttctcaaatttcttggtcctaattatactctaaacagtgcctaattcatagtgccataaggggctgtctctggttatttgacctaactggccaactctctcagagcttagtagtggctttatttccagccctttgctctttatgctgaatggcctgtccacactggcagacttatttgtctatttcacttagatcaaagaaagagaagtcaaggtgtcaaaatcatgactctatattttttctttttaaaaatttttacttatttatttttattgacacataacaattgtacatctacactttttctaccaacctccaccctcctttgtccaccctcaatccaaatttctcaatggagagtctgaaggaggaaaaatttttcctctaccctcttatgcgtagtctttgggaacctgcaaattaaattaacagaagacagattaaaagagaaaaggcacccaatttatcttttttcttttctttttttttttttttttcttttttgagatggagtcttgttctgtcacccaggctggagtgtggtggcacgatctcagctcactgcaacctccacctcctgggttcaggcgattctcctgcctcagcctcccaagtagctgggatcacaggtgtgcgccaccatgcccggctaatttttgtatttttagtatagacgaggtttcactatgttggccaggctggtctcgaactcctgacctcaagtgatccacctgccttggtctcccaaagtgctagggttacaggcgtgagccactgtgcccggtccccaatttatattaatatttttgtgcacaagagttcacagaaaataagtgaaactaaaagtagtggttagactcaggaacttacatactgttttaacaaaaaaagggagtttgggcttcaagggataataaattgtgggaaagtgactaggaaatatatagggaaaccaatggaagatacgggatattttagtaagattcgtttctgcagattcatctcagtgctgcttcattgtcttcagtgataaaagttactcttctctccctggtacagtagagtggagataactccacaaagggaaacttatgccttgcttttaggcaggtaagagaggggcagaaacctcttcctgcatctcttaattctcaattgccttcaactcaaaacaatccttatgccaaagtagcatattttggtgtggcatatcctgacccccttcaaaggactataacatttgtatgttcctcaggtaatgtcttatgtgtcattgcaactgtgccatggtctatggacagctaacatttattggtcagcttctatgtgccagctgccatgttaaatgttttatgtgtgttttttcacataattaccttacaaacacatgaactgggctgggcatagtggctcacacctgtatttccagcacttagggaggctgaagcaggaggatcacttgaggccaggagtttgagaccagcctggccaacatagtgagatcctgtctctacaaaaatttgaaaaattagctgggcatggtggtatgcacctgtagttccaactaatcagggggctgaagttggaggagtgctcgagctcaggagtttgaagctgcagtgagctatgattgtgccactgcattccaggctgggcgacagagtaagactgtttctgaaaaagaaaaacaaacgaaaacaggagcagggtatgatttatatcctcatttcagaaatggaaaaaattgagttcagggattttaaattatttacccaaagttacacactaagaaacagaatagtcaggatttgaacctatagtgtttaggtctcaaccctaagtgcttaactactacgctgcactgactacaaatccagggcatatcccgtggccattgtgtgattccttctacctgtcatttctagctgtttgatcatgggcaagttatttaacttggctgagtctcaattttctcatctgtgggaatattgatacctaacttgaaggttatttagaagattgagtgagagaagataccctgtataccttgtacagtccttagcatatagcagaggcaccataaataggaacgtcttttcctttctcacactccttcttaattatggacatggtgtgaattctttccttggggcactgacttgcctttgcattggtctggactgtaaagtctgggcagagcccaggcattcaatgcatttgctatggtgaaaggtgagttctcatagaccttcgtgagagtttaacgttttgcattttgccctcaaaattatttttagtgttagaaattaactttagaagagttaaaaaataaaagatgtaataacttattaaaaaatctctgagatatgttagcatttcactgggtatatacttaggcattagataagcttagattagattttttttttctggctgggtgcggtggctcacgcctgtaatcccagcactctggaaggggatcacttgaggccaggagttcgagaccagcctagccaacatggtgaaaccctgtctctactaaaaatataggctgggcacggtggctcatgcctgtaatcccaggactttaggaagccgaggtgggtggatcacctgaggtcagcagttcaagaccagcctggccaacatgaggaaaccccgtctctactaaaaatacaaaaattaaccgggcatggtggcaggtacctgcaatcctagctacttgggagactgaggcaggagaatcacttgatcctgggaggcagaggttgcagtgagctgggattgtgccattgcactcaagcctgggtgacagagcaagactcgtctcaaaaaaaaaaaaaaaaagacagattaataggagaaaagacatattaatttattaatatgcataggggagaaccatagagcaattaccccaatgctccaatggggtagagaagcttatataccatcttgaggcagaggtggtcctgttgtgtagatgaaggcttacaggtagcagccctcaaagagaatagatggtgaatgtttcttccagacctttagaggtgtgggactctcagttaatctttcctagatcagacacgggagggcctcagagaaagcctgcctgcatcaatgcagattttctgtacaggtgcaaatctcccacacaaaagacagctttttagctatgcttgcacttccagccctactgaatagccatcttgaaatatgttaaagaagtgggatgagatatattggtttggtaccccttcaagagtaaggggacagagagtgagtacctgggtggaggaaaggagtctttctagtttatgaggcggtcagggaagatatctctcaaaaggtgacatatgagcagaaaccaaatgaaaagggagggagagataggatgctaaccatgaaagaattacccagacacaaaggccatggggttggggcatgctcagaagtgtactccaggaatagcaaagggtcttgagaggagtgagcagggggagatgaagtccgggaagtgggggtgggccagactggtgatgtggggtctgtgatgggagttggtccgtcattgagtgagacagcaagctcctgaagtattcagttggacttagatttttaaaaggatcactctggctattctttggagaacaaactgatgggggcaaaggttgcctcagggagatcagtgaggtgctattgtcattttttaggagagaaaagttggtgacttggctaaggtggtagcagtggagaggtgagaaatggttggattctggatagattttgagggtagaagttttgaattttctgggtcaaagggtgtaaaagagaagagttaaggatatctgtaagatttttggcctgagcagctgaaagaacacagctgcccttaactggagggagaagagtggacattgtttgaagggacttttgaaggtgacctggaccgccccgcttgcctttagttgggatactttaatctcatttttttcttcatctctgttttaccttttaaagatttgtaaaattaaatagaagtagaatagaaatagaaggaaatcctaccatttgcaacttggaagacatcatgctaagtgaaataagccagacacagaaagacaaatacctcatggtctcacttagctgtagtatctgagaaagtcaaactcagccaggcacggtagctcatgcctgtaatcccaacactttgggaggctgaggcaggtggatcacctgaggtcaggagttcgacatcaacctggccaacatggtgaaaccccatctctactaaaaaagcacaaaaattagccgggcgtggtggcacgcatttgtaatcccagctactcaggagcctgaggcaggagaatcgcttgaaaccaggaggtggagtttgcagtgagccaagatcgcaccctgcactccagtctggatgacagaatgaaactctgtatcaaaaaaaaaaaaaaaaaaaaaaaagaaagtcaaactcaataaaaacagagagtagaaaggtagttgccaggggctgggggttggggggaaatcagaagatgtgggtcaaagggtataaactttcagttataaggtgagtaatttctaatgtacagccatgtgactatatagttaataatagtacattgtatacttgaagtttgctaagagggtagatcttaagtattctcaccacacacacacacaaaggtaactatgtgaggtgatggatatgttaattagctgattgcgacaatcatttaacaatgtatatgtatttcagctcatcatattgtataccttaaatagatgaaatttttatttgtcaattatccctcattaaagccacaaaaaagatttgtagaattagtagtttctatttgaatttggtattctaatatgtgtacaattcttaatttctcgtctttgttgtagatagccaagtgttttcgtggggaaagaacagccatgggcagctgggcttggggaaggagttcccctcccaagccagcccgcagagggtgaggtccctggaggggatcccactggctcaggtggctgccggaggggctcacagctttgccctgtctctctgtgggacttcgtttggctggggaagtaacagtgccgggcagctggccctcagtgggcgtaatgtcccaggtaaggagatagtcttgtttgtgcagtaaatcattctttctttccaggtggaagaccaacttggcaaagggcagtcttaacgcttaaaacagtggttcccaaacttgtgacacattcgaatagcctagggagctatattagtttcttgttgtagcggtaacaaatcatctcaaacctagcagcttaaaacaacacaaatgtactatcatgtagttctggaggtcaggattctgacacacgtctcactgtgctaaagtcaaggtgttagcaggttaccttcttccctacaggctctgagggagaatccattttcgtgccttccccagcttctaaaggccacctgcattaattgactcatagacctctttcttcttcaaagctagcagtggctgatcaagtctttctcaagtcacattactttcacatagactcttctgcctccctcttcctcagttaaaagacccttgattacagtgtgctcacctggataatccaggcgcatctcccttgttttaaggtcaactgattaacaactttagttccatcggtttccgtaacttcactctgccatgtaacttaacatatttacaggctccaggattaggaagtgggagaccattattctttgggaggccattattcagcctaccataggatcctttaaaaatcccgatgcccaggtcagaccccatacctattaaatcagaatgtctgggggtgaaacccagaagcatccatcgtcattagagacctcacagttgatgccaatttgcagcaaagtttagaaactgctggactaggagactgctaacattaggtcaaacaaccagttcctctaggcaaaagaaaacttctctaaacaaccagttcctctgaacacaaaactcgtcaagatgtactccccacaaactccatcctcctctattcaattccttacagtcagctaacatacagttaacacctaacctgtgccagtcccatgctgagcacttataccttgtttcatttcaccatttcagcattagctaagtttttctttcctttcctttccttttcctttcccttttcctcccctccccactcctttcccctccctttccgttccctcccctccgcttctcaatcccctccccttcgctgcgtcccctgcccttctctccctccgtggcctcaaccttcgtccccaccccttgggccctcccctgggcatgccactctgcccatgcgcgnnnnnnnnnnnnnnnnnnnntggggggggggggggggtgcggtgtgcggagaggggtgggtgttgtgtggctcgagacgcccgcgtggtcgtgttagattggggggggaggggcggggggtggggggggcgcgggcgtggggggtgcggccgtgtggaggggtgtggtggggtggcgctgggcggcttcgtgccggtgttgggtgcggttggcggcgcttgccccctgggggctcactgccgtgggccgcctatggcattagtggatctgtgtattttttgttgtgtcgggggggggtgggggggtgggcggttctctttcgcgtcccttttcgtttcctctcccttccgtttttatcccccgtccttttgtcccttgcctctcgcgtctctccctccctcccctcccccttcctcccctccccttctcccctccactcccccctccccttctccccttccgttccccctctcccctcccttcccctctcctcccctgtcttcccttctgtcctcttcccttctcttctttcttttttcttttcttttcttcagacaaggtctcactctgttgcccaggctggagtgcagtggtgtgatctcagctcactggaatctcagctcccgagtagctgggctcacaggcacacaccaccacacccagctaatttttgtattttttgtagtatcaggcatgagggtcttgaagcttagctttctaggtcaatagccttggggtttcaccatgttgcccaggctggttttgaactcctgcgctcaagtgatccacccgcctcaacctcccaaagcactgggattacaggtgtgagacaccatgcctgaccagtttttcttatcatctcaatttttataatacatttgcagagcatctattgtgtgacagaaatatgtgaaaattgtcagaatcaatatggagtcacttatttcaaaccctaataaaatggagttgggtggcctgggggcatgaagggaggatcctcacacagagctgcctgataataactaccccagaggactctaccaaaaccacaaccttgcagttaaggccacctctatgaggacgtctttccagtagcagtgtttcctaactgcagccttgcaagtaaccttactaaatggcagccttgcagtcagggtggcttatttgaagacgctcttctagcaatggccagtacacatgtcactgcctgcaataattccttgtaaccaatgaacttgtttcgaaataacctatgtgtacttctcctttttgcctttagaagttcccccttgcctcaacctccccagatatgcccatggcctgctatggcatgcatatcctggattgtaatcccatcattcattcccaaataaacttgttctttgagagcctctctgttgttattttaggttgacaaatgaatacaacagatggcagtagtatcaggcatgagggtcttgaagcttagctttctaggtcaatagcctcgggcattccggaagattagatagcttccagaaataaatgttgaaggagcacttctttttttctctcccaaggtagggtttttcctctgtcttatacttcggattgtttacttttaaaattatgttaatgaattataaaaataagaaaagatataaaagataccccttacataaaaaaaaaagatattaaaaatataaatactcatgaaatctgaaaactatgttagtgaattataagaataataaaatatatctcttacacaaaaaaagaaatataaaaagatattaaaatgtaaatagtcatgaaatctgagtctgtttcttatactctagagattctgctttctttcaacagtgcaaagcaacaagcctctctcagtcggtgcactgaagaatctaggtgtggtttatatcagctgtggtgatgcacacactgcggtgcttacccaggtaatccaaaacgtgttgctatttttttgagttccagagaaatggtaacaagatacatatgtactaattattgttgaaagacagagacattagcccatttgggccactataacaaaataccataaaaagagtggcttatgaacaatagagatctatttcccatagttctggaggctgggaagtccaaaatcaaggtgccagcagatttgatgtctgatgagggccaaacttctcattcacagataccatattttcactgtgtcctcacatagtgaagggagtgaggggtccttcctgggcctcttttgtgagggcactaatcccattgatgagggttctgccttcatgacctaatcatttatcaaaggccccatctcctaatatcatggcattgaggtttaggacttcaacatatgaattctggggggatgcaaacattcagactgtagcataagatatatataccaatatctagacagagccattcagtgtacacatatctaaagaggagatgtgaaccaaacataaatcataaggttttcaagatacataacaaaagctaatttcagctttaggaagtatctttagatacctactaaattaggttaatagctgggtgtggtggctcatgcctataatcccagcactttgggaggccaaggcgggcagatcacgaggtcaggagttcaagaccagcctggccaacatagtgaaatcccatctctactaaaaatacaaaaattagctgggcatggttacgggcacctgtagtcccagctacttgggaggctgaggcaggagaatcaattgaacccaggagtcagaggttgcagtgagccaagatcgtgccactgcactccagcctggttgacacagcaagactctcctgtccaaaaaaaaaaaaaaaaaaaaattaggttaatacaggaactaatcccttttagcaattattattattattattattattattattttttgagacagaatctcgctcagtcgcccaggctggagtgcagtggtgcaatctcggctcactgcaaccttcgcctcccaggttcaagcaattctcctgcctcagcctcccaagtggctgggattacaggcgtgtgccaccacgcctggctaatttttgtatttttagtagagacagggtttcaccatgttggccaggctggtatcaaactcctgacctcaaatgatccacccacctcagcctcccaaagtgttgagattacaggcatgagccactgcgcccggcccctttagcaattattcattgacaatgtgattctacagataaaaattattatagaagcaacaaagtaatttttacagttttcaataatccactttacagcctagaacattatttcatttcatttcttgcttggcataggtatgacacagcttcctgaatgttttcttcccattcttgtcctcaccatacaatatattccaaagggatggattctttctggagccataaggaatagacttgaaaactacttgtgtagttgaaatgtttgtttaaaaactatatgcccccaattatttttgtttgttttaaatgcatatcttaaattagaaaaccctcaattgtttggattatattattctcaatataaagaataaatagaaataaatagaataaatagaaataaagagaaagctagagttgtttgtaatcatagaatgttttgggaagacagtatttttaggaaaatgctcaaataaattcaacctcatacttaaatgttggttttactcttgaaccagttaatttatctattcattcaataaagacttattaagtacctaattctttctttttccagctttattatggtataattgacaaaaattgtatatgtttatgctatacaatattatgttttaatacctgtgtacattgtgaaatgattaccacaatcaagctagttaacatatgtatcacctcacatacatatctttttttgtgattagaatctttaagatctactctcttagtaattttcatatatgaaacacattattaactatagtcaccatgctgtacaatacatcaccaaggtgcccagtttttaaggaaatgctaatgattttttttttttaaatttgtgtagagattgggtcttgctatattggccaggctggtctcaaactcctggcctcaagtaattctcctgccacagccttccaaagtgctgttattacaggtgtgagctactgtgcctgaccccagtgatttttcatgtttaatgtgttaactcaacatacactattagaaaaaataaaggatctctcctatttatgtagagcttgtgtttcacagagtgctcccgtattaactcttgtatgacacttaatcagtaagcttttagttaccttgttaaacctgaaattaatttgattcttcctttgctaagcaggacgggaaagtgttcacatttggagacaatcgctctggacagctgggatacagccccactcctgagaagagaggtccacaacttgtggaaagaattgatggcctagtttcgcagatagattgtggaaggtaataggcttcttcttcttctttttcttagcatgtgtagaaagtgttatattttattacttagaaatgactcatatggaatgttatcaaaccttaaaattcctgcctgaaaatttacttatttcaaatatagtttaatttttcagtttttaatctttattctggatattttatttatttaataagaaataattggaagtctactgtgtatagaacactgtaccaggtgctggagaatgggaagtagattgataaaaatagcagagctttcctgcttaagttgataagacaaaattaaagtaaattaatctcatgcatgcagaagatgatgtatatttacatatatattttcggagttctgcgtaacctaattatgaggacactttgagtgtttaaatatctacccaatgcattaaaaaagaaaaaaaatagaaatgcctgcatttagaacacaaatgatagaaaccatagtaaagacctatcaataacattctgtttttaagattagtagtaagttaatattgactgaccgtctgtttagccacatcctttgatgccctctaacactgacattgtgataagggagctgcgtacttagtaaaagtaaattgggctttttgtgtttgttattttgtcttaagggacatcatctttctcaaaagccatgagtgccttagtcttcattatggtgtattctctttcctgtagttatcacaccctggcatatgtgcacaccactggtcaggtggtatcttttggtcatggaccaagtgacacaagcaagccaactcatccggaggccctgacagagaactttgacattagctgcctgatttctgctgaaggtgtgaatcccactaattcatgattttgtgttcatcaatgccactggaagagaactagtattcagcttcctttcaaaggatcctacagaactgtagttcccctagtacttttatttttatttttatttatttatttttttttgagatggagtttcgctcttgttgcccaggctggagtgcaatgacgtgatcttggctcaccataacctccgcctcctgggttcaagcgattctcctgcctcagcctcctgagtagctgggattacaggcatgcgccaccatgcctggctaattttgtatttttagtagagatggggtttctccgtgttggtcagactggtcttgaactcctgacctcaggggatccaccagcctcggcctcctaaagtgctgggattacaggcatgagccaccgcgcctggctgtacatatatatatggtgcatttttttcttatgcagtgactcttagggtatttggtaatcatttctaaagattaaggtaagttcaagaccagcctggccaacagggtgaaacccgtctctagtaaaaatataaaaattagccgggcgtggtggtgcaagcctgtaatcccagctacctaggaggctgaggcaggagaaccccttgaaccaaggaggtggaggttgcagtgagccgagatcgtccagcctgggcaacagggtgagactccatctcaaaaaaataaaataaaataataaaataaaaaagattaaggtaatacagaagactatcctaacttgattacttaaacatcagaacaatacactttttttccataaagtgaaagcaagtttattaagaaagtaaagaagcaaccagaacaatccactttcatatatttaatcaaatctcttctaaagcatggccacctggctgcattatgcaagtgcatgaaaaactaaattttagactaagtgaatatatgacatgtaatctgatcaaaactgatcttttatttcaatatgatgggagggaaaaaaagaaaaaaattaatcttttatgcatttgtagtcaaaatccatttaggagaatataaattgccagtaagtaaataaatttttggcttgataatacatcagatttatttttacttctagaaactctaagcatggatttatgactttcttttagacttcgtggatgttcaagtcaaacacatttttgctggaacatatgccaactttgtgacaactcatcaggtatctattatactttttgttcctcttaaaaattattttttctcaagatttcagaccggtatttgaaatactgtattattcatacatattcaggtcttttactaaaacaataaggtcctatattagaatgcttatgaaaaaaatattacataattctcacttccttatttgtcaactttcctaacagattagacccccccaccaccaccatttcagatttattttttctttatgggtaagtgtgtttgttgaatttgcatcatgtaaatgcacatacacatgtaacttgtgtcaacagcagctgtttccatcttcaggagggaactgaattttccctgtccaggactgtgaaggaagggtttctgacatgtcctggagggaatttcccagtggcacctccttcagtaggaggattgccatgtgtgtgagtgtgcaggggtgtgtgtagcaggggtggcatgtagcgtctcagctgtcctgtgttgcaagggtcacatcaccgagtccccaactcaagtttattgcttaataaaattaatgatgatagataacagtcatgactaattttaactgcagtcaccaagtgtcaggcagcaatcgaagttcttcaaatggatcaagatgtttaatgctcatatcaactctcgttgattttatttttcacattgacagatgaaaaaacggagtctcagagaggtgaatttatgcaaagttgcactgttagtaagtggtagagctggattcaaatccaggcagtccaacccagtagcttacaccattatccaccatgctatagtgccttcctaattgttaacaggagggattttattattacatttctgggtgagttctgaaatatgtttatggaaacaaaggccttcatagttatttttctaatttgtactttttcctattatgaggaatgttttaaaattgatgtttaaacttgatgtttaaaacattcctgacgacaggaaaaagtacaaattagaaacataatagactctgtctgtagtccctggcacagaatgtggtcagaggcaaaggtttctgtgctgttgggatagttaggagactatactttggttgctctatcatagccattcaatcagccactcaacaaaaattgagaccctttttatatatcaggctctgctcttggtgcctgggacaaaagtgaatagtacagacaaagttaccctcattcatagcatttggactccacaggcagggccggaccataaatatgtaaatgcaaaataaataagattgtattagaggcccggcatggtggctcacgcctgtaatcccagcgctttgggtggccgaggcaggcggatcacttgaggtcaggagttcgagaccagcctggccaatgtggtcaaaccccatctctagtaaaaacacaaaaactagctgggagtggtggtacgagcctgtaatcccagctacttgggaggctgaggcaggagaattgtttgaacccaggagtggaggttgcagtgggctgagatcgtgccatgcactccagcctggcgcacagggcaacactttgtctccaaaaaaaaaaaaaaaaattgtattagatagtgacaagtactctgaagaaaacacattgattgtttgagattggtgaggtggccttctttagaaatgtctgtcagaaaaggccttgtagaggctgtgacagttgagcagagattttagccatgcttaggtccagagaaagaatgctcagagcagagggaactgcacacagaaagcctgtgaggcaagaatgagtttggtgtgtgtgacagaaggccagtgaggcagaaccataggaagaaaggacaaagagctcgacaagatggagccagttctgtatgctggggtcagctatgtgaggggggacccatctgaaatgtgcttggaaaggagacctagagactggccaaacaagccaagagaagaaagcacctgtatggaggtcctctcttttgtttttgtttgtttgtttgtttgcttgtttttttgttgttttgagacagggtctcactctgttacccaggctggagtcttggctcactgcagcctcaaattcctaggcttaagccatcctctcgcctcagcctcccgagtagccagggctacaggcgcacaccacaatgcccagctggtttttttttgtagagacggcgtttcgccatgttgctcaggctggtcttgaactcttgagctcaagtgatctgcccaccttggcctggcaaagtgctgggattacaggtgtataccaccgtgcctggctcccagtagtacctcttatctacagttttgcttttcacagtttcagttatccacattcaactgtggtctaaaaatattaaatgggaaattcagaaataaacaactcataaattttaaatgacatgttctgggtggcatgatgaaatctcacaccattccacttcatcccttcatcacaagaagtagggtgaatacagtataataaactattctgagagaaagacaggggcaccacgtttacatatgttttattacagtaaattgttataattgtttcattttgttattagttattggtattaatctcttactgtgcttaatttatacattaaacttgatcatatgtatggatgaacaggaaaaaacagtcaatatggagtttggtattatttatggtttcaggcatccactgggggtcttggtggaacacatcccccatggataaggggggactgctgtatttccagaaggagaaagtggctaattctgtcaaatacagccgagtggtcaagtaagaccagtgcatagtttatttttgctttggtaagattgtgttattgcagaggagagagaaggaaacctgacccgagtgggctggacagagaataaaaggggaacaagtgcaaacaatgcctgtgacaactctgagaaattttgatgtgaagagaatagagaactgcgagagggtttctcatgctgcataagaaagagtgaataggccaggcatggtggctcacgcctgtaatcccagcactttgggaggccgaggcgggtggatcacaaggtcaggagttcaagaccagcctggccaatatggtgaaaccccatctctactaaaaatacaaaaattagccgggtgtggtggagggcacctgtaatcccagctactcgggaggctgaggcagagaattgcttgaacctgggaggcgaaggttgcagtgagctgagatgcgccactgcactccagcctgggcgacagaacgagactccatctcaaaaaaaaaaaaaaaaagaaaagaaaaaagagaaacagtgaataattgcagaagcaatgtctgagattaggagagaggaagcagaatctaacgcgtgattgaggggtttgaacagatgtgtttattctgctgtaataagaaacggtacaggtgaaggtaggttgatggtgggaaggtgattagttcttgcttaattgcttcaattttcagtgatgcataagacaaggtccccatctgagcatgactaagcagaggagtatgaaaggtttaggaagaaaaggaagggttgtgatagttgtcttggggaaaaagcaggtagccttggaatccattagacaatatcaggtgcccatttgaaatctgtggtcatagacttaaagtgaaatcagtctgcacagttgtgcagctttctcccgtgatgttaggctgcttcagttggattttggagtaattcagagtcaagtttaattacagatggaactttgctaggtaagtacaataggaaatggacaaaagagttataggtgtgattatagtgatgaaccatggaatctaagctgggtaaggaggatgaaagagggtgatgaatcatggacaaacaacagggctaattgattggagatccaggcggacaaaagaatcttggactgcaggttttactctaaaggaggtgaatctgtaagatggtgtatgatggtcagagaagagaacatttccaatagaaatttagaagatggaacaattgataattataacatccagcttctcacctgtatctagggcagtggttttcaactaggggtgatttcatgctccgggaaatatttggcaatgtctggagacattgtagtttgtcataactaggggagagcatggtgttgggagtggctgctactggcatctggtagacagaggccagtgataccactaaacatcctatggtacacaggacagctgctcacaacaaacagttatctgacccaaaatatcagtagtgtcagtttaaaaaccctgatccagggcatgtgtggctggggtggagcagaggaaaatagtggagatgattaagaattgagagatgaaggtgggagatagatcaggttcatcagttctgaagtaaccaagagtgagggcaggaagggtgaccatgggaatcgtggtatgaagaagacagcaaggtgccgaagctttcaatgaatgaaggggagtgaccaggacagtgggagaagattacaaaacaagaagaggcagatgacatagtctcatgctgtgcatttgggaggagctagggattttgaagcagaaaatgaagaaatggtatgtaactgccaagagggagcacctcattgtcccaagtttcctgggatgtggggggaaaaactcttcctcttgatcaaactacagggaaaacccaggactcagatcaagaagctgaagggaactttaagagccgtggttacctgtcttcttcaagaggtcttttatttcagcattaaaccaaaatgatgcaggatttcctggctcataacaagtgcagtggaggcataggtataagttatagcagagcactaatgcctttggaggactgtattgaaaatggatttttctttccagacagtgatttttgaaacccctgtttgggctatttggtctcaagtattatatagagcaatggttctcaaagtgtgatctccaaaccaacagcatcagcatcactggagtattttttagatgcaaattctcaccctctaccctgacccactgaagcagaaactatggggtggagcccagcaatctactttaacaagctcaccagaatcacccaccaggtgatttggatgcacattacaatttgagagttactgacataaaagtaaacacttgtgggtgattaaagggaacaagaaaactaattattgagtgcctattataatcccaaagctttttatacttactataattgaatcttaagaacccagataggccgggcgaggtggctcaagcctgtaatcccaggactttgggaggccgaggcgggtggatcacgaggtcaggagatggagaccatcctggctaacgcggtgaaaccccgtctctactaaaaatacaaaaaattagctgggcacagtggcaggtgcctgtagtcccagctactcgggaggctgaggcaggagaatggtgtgaacctgggagacagagcttgcagtgagccaagatcatgccactgcactccagcctgggtgacagagcaagactctgtctcaaaaataataataataaaataaaaataaaaaaaatttaaaaaaggaacccagagaggtaggtattattatctttttatttattgtggtaaaatatatataaatacaatttgccatttttatcattttaagtatacaatttagtgacagtgacattaattactttcacaatattgttcaactgtcaccattatccatctccaaggctttttcattaccccaaacagaaattctgtaactattaaataataactccccattccctctctccgcccccagctttaggtaatgttgaatctaccttctgtctctatgaatttgcctgttctagatacttcatataagtggaatcatacaatatttgtcattttgcatctggcttatttcattcgcttgtcttcaaaattcatccatgttgtagcatgtgtcagaatttcatttcttttttttttttttttgagatggagtttcgctcttgttgcccaggctggagtgcaatggtatgatcttgtctcactgcaacctccacctcccaggctcaagcccctgcctcagcctcccgagtagctgggattacaggtgaccaccaccatgcccggctaattttttgtatttttagtagagacaaggtttcaccatgttgaccaggctggtttcaaactcctgacctcaggtgatccgcttgcctcagcctcccaaagtgctgggattgcaggcatgagccactgtgccagccagaatttcattcctttaaggctgaataatatttcattttatgtatatttaaaaaatctattcatctgtttatggacatgggttgtttccatcttttggctattgtaaataatgctgcagtgaataatgatctacaagtatctgtttgaagccctgcattcacttttttttttcttttttaatgatgaaactaaggctcagaccaagcaaagtggcccaggctaggaggtggaatagccctaccggtctgacgccaaagctcctcccaccaaatgctaccacccaagagggcagggcctatttaccacccatgccaggtgatttactgtataatttactactgaacgtgtgtgtgttcctgatcattcttgtttcttccttccctgaaggatactagttccacacgtgctcccgggaaaaccctgccagaaataagccgaattagccagtccatggcagaaaaatggatagcagtgaaaagaagaagtactgaacatgaaatggctaaaaggtggctctgtctgataaattataagccacttttatctggttctggggctttggtcattttatcctaagatagaggttttggttttgttgtgaaggtatttgcattttgaccatgattctcttctacagcctcttagtgtgactaggtcatcagtgtactcatttacagatatatggaggacatgtgatatcccaggtgacttactaggtgagggagttgcaggagtgaatcaaaaaagctcacaaagcctttaataaggtggactgttttcatatcttcatagtttacccctttggagttttatgagttttggtcttcacagggataggttttatttaaacctacgtgacttgaacaaatcaactataaagggttttggtgagatttagaaataatatgaacaaagtatacccaggatttgggagactcttaagagagtagttattttcattaataattattccacgtcatcatttacttattcagacataataagattttcaaaaggcatgctttattatatgttgtgacttaccccttgttattacttttacagtgaaattagaatgatattttcatctcctgcttgtctgactgcaagttttttaaagaaaaggtaatacttacataagatttaccttcatttaaaacactggaaaatatttaaaatgaaatgtttcaagtaagtttaatttgtgaattttgttattcttgcccacaaagtccaacacagagaactctgtaggttgttatagaattctttcattttatgaagtaattttctattagactaccataagttataattcctaattaatattgtttacttccttcataccactttactctgttgtctgattagaaggaatggtgttttttcaggatctttgtatatacaaaggatcggctaaatctcacattgctttagtacttagaagccaagagtacactttacaatttttactgtgtatgatcaattaaaaaatagatcttatttatgttgtctttaactcactgctacagaagaaaatctgattttactcctatttggtttaacatttggtctgatccaatagttgaaacagttcctgtaatgctcaatatttgggtcttctatttctgctctttcctccaagctctccaatatggcacctgtgtgtaaaagggaagagaaggagaaatagcagtgtagagggtcttaggctgccctctgcctctttggaggttgatgccttgctgatctgtctgcagctagtgtaactcatatgggttctcctttgcctgtccctcccttgttaacttggtgttaagtttgctcactggttcaaaatatggtgatacacatcttgtacccactgctggtcactaggtggtactcacttaacccttgttgctattacttgccgttgtacaaccctcttggcagtcccattagttcttaacccagctgcattctcagtcagcttgtgggattagaggaactgttggatgccaataacttcacctaaggctaattcttactgcatgtgggaaaatcttttctatgtgaagattgttttcttcctaatgtgaaaaagtatccatgctcacttcccaggagtgaggaactcctaagatgtcaaagattgcgaaagagaatatattttaagggggaaatttataatactttgttttagtacttgcataaatattttagccctaatgttactataaatcagttaatctagcaaggagaaaatctttctttgtttttttattatttatttatttatttatttagaggtgaagtctcactctgtcacccaggccggagtgcagtagtgcagctcggctcactgcaacctccacccccaagttcaagctattctcctgcctcagcctcctgaatagctgggattacaggtgtgcaccaccacacccagctaattttttatgttttttggtagagatggggtttcaccatgttgaccaggctggtctcaaactcctgacctcaagtgatccacccaccttggcctcccaaagtgctgggattactggcatgagccaccgcgcccagcctcttttttaaatttttattatttttatttatatttttgagacagggtctcactctgtcacccaggcttgagcgctgtggcgtgatctctgctcactgcagcctccgcctcgtgggttcatgtgattcttccacctcagcctcctgagtagctgggattacaggcatgcgccaccatgcccagctaatttttttgtatttttagtagagacagggtttcaccacgttgggccaggctggtctcgagctactgacctcaagtgatccgcccacctcagcctcccaaagtgctgggattacaggcgtgagccactatgctcggcattttgtttgtttgtttgtttggttttgtttaatgtttagagatggggtcttgtgctgttgcccacgctgtaatgcagtagtttgatcatagctccctgtagccttgaactcctggcttgagctatccttccacctcagcctcacaagtagctgggactacaggtgtgcaccaccatgcctggctaatttttttttttttaatttttttgtagagacaaggtcttctctatgttgcccaggctagtctcttgaactcctggcttcaagcaatgctcccactttggtctcccaaagtgttggaattacaggcatgacccactgccgctggcatacaatatttgataatgcattatttaaaaatggttaggcttattgaatgctggcctctcaaatatcactaaaacaacttgttgataagacaggccagagagaacagcacacctggacaaagcgttggtactgtttctgagaggaaagaccagttcggaatttatttacaattgggagtctggcttaaggaggtctttcaatatgagagggaaggctggaggtttgacttggactgggtaaatgtacaacaatccaggatgggtgcaaactgtaaggtaaggattttgagataagggattcaaagaatctatgggcacaaactgttgatgctctccattgaagagttaaatgggtctttcaagaagttcccatgatgaacaatttacatttgcctgggcaaaagtttcctggaaaagtaaagtcatgctaataaaaacagtggaattgcaaagttctgtaaatatgaatggtaaggagggtggggggtaggtagttctagttcttagtgtgcaaactgagtgcgggggcagatggtttctgttgtcagattcagcacgtaaaattttgttaatatggcagtccaaacttgatgtagccactacagagataataaattgttatctactgtcttttaacaaggagaacataaactgtacattttttatgtcaagtaagttgattattttgaaaggaggtaagctttaagaaaaaggtttgtatcttatatgtaataaagcaacaaatgacatacaaactttagaaatatccctttccttatgtttatgtggtttcttgcatttcttgtatccaaagaggaactggagaaacgacttccattgatgtggacttagaaatggcaagagataccttcaagaagttaacaaaaaaggaatggatttcttccatggtaatagccaatacttactttagatatagaacaaatacgattgcagtttatttttgttggaagctgggtgagatgggaactatgattgtaattgcccgatgagttcttcctgcccactgcagaaacaaaaatcgacccactgagactatgacattgtagtaaagaaagagtttaattgacatgaggctggccatgccatgtaggagacagaattattactcaaatcaatctcatgaaggctcaggctcacagcttaggggcttttcaaagacagtttggtgggcagggggctagggtagggggcatgctgactggctgagtgagagatgaaatcatagggaatagaaactgtcctcttgtgctgagtcagttcctgggtgggggccacaggactggctgatgggtccaggtgggaccatccagttgtcagaaatgcaaaaacctgaaaagacatctcaaaaggccaatcttaagttctaaaataatgatgttatttgcaagagtaattggggaagttgcaaatcttatgacctccagaataatggctgataattatttagaattcaagcccctttcatcctcctaacttgttggactttcattagttttacaagaacaattcagttttggggacagactattatcatttaaactataaactaaatttctcccaaagttagcttggctcatgcccaagaatgagaaaagacagccaacctgtgaggctggaagcaagatagagtcaaccatgtcagatttctcttactgtcatacttttgcaaaggtggttttatgattggggccgaaagagggggctagtgttcattatgaaattactatattccaggtactattaggtgctgacatttattttcttattgaatccttaaatgtacaatagatacaatatttttattttcaatataatcagagcaatgctcgagaggtggataatctctagcatgatataggaaaagagcattggtttgggaagcaggataaccttatcctggactgatcaactgaaaagccacttctgtattctgagatgaaacttacatctatttgagatgaatctctgttactacttcatcctttctctttggatcacattttctttacctgttgaattcatctttaaaatctattccagtttaatattgtgtgattctgggttgtattgggaagaaaattttcttttcctgtcctgactcaggtttgagctggtggatggggtcactgaaaattaataattaacagaatctcttagtgctcaggatgctgtagactgggtagcttaaacaacagacatttatttctcacagttctggaggctgggaagtccaagaccaaggcaccatcaggtttggtgtctggtgagggcccacttcttggttaatagatgaccatattttcagtgtcctcacatggcagtgtgaaccccaaatatctaagacaggtctcagttaatttagaaagtatattttgccaagattgaggacacacgcctgtgacacagcctcaggaggtcctgatgacatgtgcccaaggtagtgggagcacagtttggttttatacattttcaggagacacgacacatcaatccacatatataagatgaacactggtttggtctggaaaggcgggacaactcaaagcagggaggggccttccaggtcttaggtagatgagagaaaaatggttgcatgcttttgagtttctgattagcctctccaaaagaggcatcagatatgcatctatctcagtgaacagaagggtgactttgaacagaatgggaggcaggtttgcactaagcagttcccagcttgactttcccctttagcttagtgattttgaggcccgaagatttattttcctttcacagcaaaaagggcaagaaatctctctggggtctcttttgtaagggcactaatccattcatgagagctccaatcttgtgacctaattacctaccaaaggccccacctcttaatactatcatattgggggttaggattttaacatatgaattttggggaacacatttagcctatagcacaggaggaaaaaaacaagttttgtacgcttgcatgtggggcattcagatgaagaggctccctgaacagctagggataagaatttataaaccaacttaatggaggaaagggagaagggagaaagggctcctatgggaagaacaaatgggattttatggagacaaatggaaggtatgacagtttgtgagaatgtttgtttatgcaatttctcatccacatgcaagttgtctgaatgattggtctcctttttagcagtgtagctcctcaatgggggatgtacaagagcttcatactagaagagctctgcattagttagataaaagaagctccaaaaaggcatctcaaatgtcttcagttagtaaaataatctttataccattttgatgggtctgagtgggtccttatacttggaagggacaggcggaaagtgttccttaatgtgtagtagatacaatattttcattttcaagatgaagtgataatagcaaatattatgaagtatatttcttaaatgaatttaggtgatatgggagataatttggggtgctgttcccggtgtaagttccaagggacattagttttataaaaaaccccataaaaaagggttcttaatgagaaaactttgggaacactccctactattatggagtcatgatatgcgcattaggaaatcaaagattctatgatgtcatacactaaaagaaatctcttttgaccctatttttcttggagttatttgacattgtgatgctattttctggcataacacctactggcattccacagaaatcatattctgctagacatgtgaaaaagcaaattttaagaattttaatgtaataaaaacaatatatagtacatcacagtttattgttgcatatatcacttatttacccttaggacatgaaaggcaaacactgtaattacagaacatagatctatcaggtagagtaaatatggctagctgctatgacaaacaactttgaaatcccagtagcttaacacagtattttccaacatcctagtccaacaagggttggaggtcagaggcacctttgcacaggttcattcagggctgaatcaggcttctttccagcatctctaggccctggggctgtaaaatcctccactcaatcttttgggttggctagcagatgagggaagtgagtatggaagttcccatgagaggtttcagtggcctggccttaatgtgtcacacatcactttctcccacattggtgagctaagactcagtcacatggccctgcctgattgcaggggagccaggggctgccatcttcctataaacccaggaggaaaaagaaaaacgactggcaaggtgaacatatggcattttctctgccatggtagattttactactatggtagtgccacagtcactttctaatcgagtaacgctgacttcctctgagtctctccttgctcatctgtaaaaacaaggtaaaacacaaataaagcaaaaattaccttacaggattatcagtaagattaaataaaatgatttacacgagatcacctgacacattgtaagtactcaatgaatgttcaaacaaatataaagaataccatacaagtttattcccactagtatgtttttatatacgtcctattttaaaagtttacttctgggccaggtacactggctcatgcctgtaatcctagcactttgggaggccaaggtgggagtatcacctgagcccaagagtttgagactggcctgggcaacatagtgagactccatctctacaaataattttctaaaatgggctggctgtggcagtgcactccacttaggagtcttgaggtgggaggattgcctcaaccaaggagcttgaggctgcagtgagctatgattgagccactgcactccagctgtaattgagccactacacgctgaagtaaaactttacctctggatgaaataaataatataaaaatttagagctatttttctctgcaaatttttctactgatacatgagaaaacagaaagaaagaaatggatattgtgtgaggggaaggggacagctcttccttctagaaggaggaatactaatgtgacctgcatacaacattgcttttgaagggctttgtattcgttttgaatccataattcactcagtatatccatgctcatgggatttcactttattttcttcagggaacctgatataaaatgaggaggatggctctcatgtactatatcaggggtatttgggatggaaggagtgatggagtctcatcaataggtttcagaatggctaagtgattattctaattggaacatggtggagtgaaacccttaatttcacagcttgcttctcacaatcctctgtatctaatatatcctgggtctgttccctgatcctatttttaccacagataactacgtgtctcgaggatgatctgctcagagctcttccatgccattctccacaccaagaagctttatcagttttcctcctgctcccagaatgtcctgtgatgcatgattctaagaactggaagaacctggtggttccatttgcaaaggctgtgtgtgaaatgagtaaacaatctttgcaagtcctaagtaagttttatgtcactttatctgtactctcaatatagagtcactctctgaagtagacgttgtagcaaattttgaatagaagatttcaaaatagacaagtatttgagaacatggcatgtaaattattgaaaagattaataatctaaagctattataattattagttctatcatacaaagcaggtgtagtttttagacttggatgtggctttgacatcagagtttggtagctataaggtattcattttagacttggatgtggctttgacatcagagtttggtagctataaagtattcaatcaagatcaatccatactttaaaattttttgctcatgttattttgaaacttttgacattttgaccagatgatgaaaaacaaatgttaaactttgtattattattatttactttattcagtactgtattatgtccttttatagcttttagcgtatattgaaagttcagtgattacccaataacccaatggggtccagatgtttatatacccttctacatagaggagaggggaggtagggaatgtagacaattcttttgaggagtagtaaatgactattagggagaatgagtgacccaggaaacagaaattaacttgtaaatgattctccttggaattggaatgagcctgagaggcaggcattatcttttgaaaaaatacatctaggtgtggttacattcctcagtcgtcttgtctgtgacagataatgtaatttcagagatggcatgaaaggcaattctgttctctgtagtgggtccagtcttaaggtagataagggagtgtcagagaaaagccttttccagcatctgctgaccttcaagggcctttaacttaaaataatcagcataccagggtgccatattttggggcaaatttccctggactccttcacttaagaggtacagagggccaggcattgtggcttacaccttaatcctagcattttgggagactaaggtgagagaatcttttgagcccaggaggttgagggcagcctgggcaacatagtgagaccccgactctaccaatttttttttttttaaatcagccatgcatggtggcacacacctgtggtcccagctacttggaagctgaggcaggaggatcacttgagcccaggagtttaagtctgtattactggaaaggggtcccaatccagatcccaaacaagggttcttagatctcacacaagaaataattcagggagcgtctataaagtgaaagtaagtttactaagaaagtagaagaataaaaaatggctactccacaggcagagcagctccttggggctgctggttgcccatttttatggttatttcttgattatgtgctgaagaaggggtgggttattcatacctcccctttttagatcatatagggtaacttcctggcattgccatggcatttgtaaactgtcacggtgctggtgaaagtacagcagtgaggacgaccagaggtcactctcattgccatcttggttttggtggattctagccggcttctttactgcaagctgttttatcatcaaggtctttatgacctgtatcttgtgctgacctccgatctcattctgtcatctagaacgcctaactgtctgggatggtagcccagtaggtctcagccttattttacccagctcctattcaagatggagttgctctggttcaaatgcctctgacagcagcagtaagctatcagcataccactgcactccagcctgggtgacagagcaataccctatctcaaagaaaaacaaaaaggtacagaggatatgtacaatgaaatgtaagccacccagttcccctcccagaagtggctacaggttctagtttcttgtgtaacgtttgaaagatattctatatatagaaacatacaaatgtattatttctgtttttaatggtagcaaactattaaagttcctcttccacaacttgctttctcccactaaacaggatatcatggagatcattccaatagagaatctatagaactgcctcattctatttaatggctgaagaatgttctattgtgaagcatttcattgtacatatataaattcacacatgcaggaaacattccagaaagcaaaatcactgagtcaaattgtatgtacatttttattttgagatattttgccaaatgaccctccacagagtcaaggtcatcatatcacccaatttgaagtggttgtcattcacactgtagtctgtataaatttcacccctagagttgggaaacctgtccgtactgacaaaggatgtatcaatttacacttcatcaatgaatatgagaatatcggtctgcatactttccaaccatgttatcaaactttgatctttgccattctgaggaaaaaaaacttttaattttaagttgaatttttcttattaagagtgagattgtgccggtttttgtatatcacagatcactttgtatatcatattctgtgaactcttactataggaccaccaggtctgatttcctgttgcacagtaacagaccaatacactgaaaaagtaggagttgcagcagagaaagaatttaataattgtagggaaaccaaatgaggagatgagaggaaacctcaaatatgcctcttcaagaggtttgcagatggggtttttaaggggtctggacacaggtgatggcctaaagtgtggtgatcactgattggttgagaagtgaggggtgaagtcagggatagggagatgaagaaactgcattcctgcactgagtcagttccttggtgagggtcttcagaccagttggtgtcagccattctgctggaattcaggatctgcaaaatgccttaaataattattgggtaaaaaggtccagtgtcagagattttatccataggaacaatgggagagcaggtgctcagtgtgctgtgtgactcagggttagttatcagctcagggaagtgggttgaagtgcaccagcacaccctagtcaattgacctcgtcaatgaccataattctgcataaagcctggcttataattcccattaaccctgtgagagcggttttgctattcttccttctttgctcttttcctattggttgttagtatttttctgttttattttaggagctttttaattatgaaggcaattaatcctttatcaataatatgaattgcaagtatttaggctattaaaaatttttttttactttgtggtatttttgctatgcagaattattttaaaaaattttaatgtagcctactatattaatattttattctatggtttctggatttggggtcatacttcaaaaataatttataactaaaataattcccatcctcctgctgtaattgttattattttatttttatatttaaatatttgatccatatgaagtttatcttggttaaacactattttttctagatcagtttccagttttccccacatatttattaaatctttttcattcccactaatatgcaatgccgcatttattatgtattaaagtttcgtgtgtatttgagtctacttatggaatctctatgtgtttgcttttcatatatctaggtaatactgttttaattacatttgcttgataatgtattttaacatcaaatttatttgttttctgagagttattctgagaatttaaaggttccacattccaaatccatgttgcaatccagtaatattaaaatataattattggctattttaaaaagtacatggccatgtaccagatgttcataaaatccaaacacatatataatattttttcattttttacagattaaaaacgtccttgatgccattgtatgtgtttgtgtattcacctgtgtgtgttttcagacttcatagataccctatacaattgtcagtttgaaaatcatgaagtcaatcaattaagcataaatgtgagccattaaccaatttcttcaaatcctgaatttgagcttttcaaaattctaatgatacttaataagggaaaaaaatttccacatctgtgagcagtaactgttgtgcaggatatacttaaaaaagatattcataaattatgccatcagaaatgtaaaatattatctatttcttacattaaagaacccactagaaacagagatttggggggtggtaggaaaaacatatttatcatggctaattttacacccccagagaagtgttgggcatttttgcaagaatcttctctgaatccgctgatccagatgcttaaagcagccatcatctctcagctgcttcatcagactaaaaccgaacaggatcactgtaatgttaaagctcttttaggaatgatgaaagaactgcataaggtaagggttactctaaaggaatgcatgtactattttatgtaatcaaaatcccttaagtctcaaccagttggacttctaagaagtcaaataaaaatcatgaggagtcaaatgttttttaaaggagtatagaaaagggaaatgtttggcataaaataattagggatttaaaagttgagaaactttaggaggacttaagatgttttgtaatggacttctttcattaagaaaaagtacactgtgcttgtaattctagctactctggaagctgaggtgggaggatggcttgagcccaggaatttgaggctgcagtgagctatgattgtgccactgtaccccagcctgggtgacagagcaaaaccacatttcttaaaaaaaaaaaaaagtaaagtacactgaagatactgctacatgtaacaacatacaacaacatggatgaatctcatcaacacagtgataagcaaaaaacacaccaaaaattacactctatgtcatcttttataagaattttaaaaacaagcagagctaatctataatgacagaaagcagaatggtgttacctcttgggaagggcaattggtttggaaggagcataggagaacatcctggggcctgctagaaatgttccatgtcttcacctggacagtacttacccaagtgagtatgtgtgtaaaaactcaccaagctgcacatttaagatgtatgcacttagtcaatgtatgttgtaagaaaaaaaacccagaatcacatagaaaaaccctccctcaaagtaggagcgagccaaaagaccaaaaaatgacttaggacaagcccagcttgatgagtagatgttgtctattaggacttacatacagggcactcctggacggcaataggacagctctagtgatctgtgctgcctcccatctctaaactgcttttaagcgaattttctggctcaaagagctacagtgtttgagccatgagaatgtttttcttggtaggttctcagatactctccaggatgtttgggttctcagggacacctgctcctcagctgggcaccgtggccttggctcattgcctggccttcagggttaaggcactggataaaaacccttaagtaacttggtgagagacccatcacactacacatgtgtgatttttttgtttgtttgtttgtttgcttgagacagagtctagccctgttgcccaggctggagtgcagtggtgtgatcttggctcactgcaacctctgcctcctgggttcaagtgattcacctgcctcagcctccggaatagctgggattacaggcacctgccaccacacccagataatttttgtatgtttaatagagatggggtttcaccatgttggccaggctggtctcgaactcctgacctcaagtgatccgcctgcctcgcctcccaaaatgctgggattataggcgtgagtcactgtgcccagcccagatatgtgatttataaatgaaacatatatgttttatttgtaacttagtaaaaattaaatagaaaggaagaaaagttcaccgaggactatggccagaacaaagaaagggcccaatggatactgttagatcaactcagtctgtctatatcagaatatttgctaaatcccactgtagaaatatcaaatgaggccattaggatttggtgtccacgttctctatggctgtgtcaacattagggtcaccaagaatgcaaagtctgttttagtagagttacctagagtcagtggtatccagaagtcactgggcgtggttacatcatcctcattctgctttgggtggtagtcccaataaagagaaatcagactggactcttgactagatctaaagattgacacaaccatgttacagatgagtgtctgaattcacagtgatcagtgattcacagaagagctcttaaattccagagaagtagaccagagtaatgagcactaatgtctaaggcacctagggcagcacttcttaaactttaatatgcatgcaagttacctgagatcttgttaaaaaattcagattctgatccggtaggcctggggtggtgccaaagattctgagaaattcttaagtgatgtcattgctgatacctgaaggatttatgctttgatgttcttgtgcctaggaagaaaagctattaaactaattaataatgaattagtaattaagaccattacactgtaatttactgtcttaagctgcaattaataaacataatatttggtctcggttctggaatggtctctagtattgtggacaattggaagactatatttgttttactaatgttgtgatagagaaagcacaatattaggtcatgctaacttcagacgtacatcctaggacccaaacattgtcataaatcctctctcttcccctctccctctccctctccctcaaacattgtcatcaatcctctgtcttctcctctccctctccctctgctctctctctctctcggcttttttctttttgggtttcattctctcttactatatatagggtgtcagagcagggcactgtttctcacactaactttcgttttctttctaggttaaatttacttcttaataaaatacacctctttccctggcgctttgtagtactccttgtgttgaaaatcaagtattcatttggctgttaatctatccttgtacctgtataacaccgtacaagttactgtatctttataataaatattgatatgtgataaagtttcaacttttatcttctccttcagtgttattgttaaacttaaatattaactttagaattacctttttgttccaattccacaaattccatttgtcgggcttttgattgtgtctttgacctggtagtgaaatgaatctatagaacaattggagagagaatgacaactttactgagtcttctaagtctgatcatgacatagctctctgtttatttagttctgcagtttcttacaataatatgttatagtgttctatgtagaagtcttgcagtcttttattagataaatcatgagtacttgatattttatgtggttatatatctttttaaaacagctttattgagatataattctctcatttaaaatatacaatgtcatgcctgtaatcccagcactttgggaagctagggtggaaagattgcttgagctcaggagtttgagaccagcctgggcaacatagtgagaccttgtctctatttttttaaaaataaaaataaataaataaaatgtgcaatgtaatactttttagcatattcatggagttgtataacctttacccaaatcaactttacaacatttttatcacccaaaaagaagccctatacccattagcagtcactccccattccccattccccctcaactcccatccccttattctcactccagccctaggcaatcactaatctactttctgtctctacagatttgcctattctggacattttatgtaaatggaatcacacattatgtagtcttttgtaactagcttttttcacttagcataatgttttcaaggttcatctatgttggagtatgtatgagtacttcattcttttttattgatgaataatataatgcattgtatgaaataccacattttatatatcccttcctcaattgatggatatttgggttatttccactctttggctattatgaataatgccgctatttaaatgtctgtacaaatttttgtgtagacatgttttcatttcccgtatatacccaagagtgggatatctgggtcatatggcaactctagtttaatcttgtgaggaaccagcagactgttttccaaagcagctacaccattttgtattaccactagcaatgtatgacagttctagtttttccacgttcttttttcttttcttttcttttttttttttttgagacggattcttgctctgttgcccaggctggaatgcagtggcaggatctcggctcactgccacctccacctcccaggttcaagcgattctcctgccttagcttcacaagtagctggcattacaggtgtacaccccatgcctggctaatttttgtatttttgtagagactgggttttaccatgttggccagactggtcccgaactcctgacctcaagtaatccacccacctcagtctttcaaagtgctaggattacaggcataagccaccgcacccgaccacttttccacattcttgccaacacttgttattatctgtcatttggattatagttatcctagtgagtgggaaatgatatttccttgtgattttgacttgtatttccttgatggctaatgatgttgagcagttcatatgcttattgcccatttctgtatcttattttgagaaatgtttatttaggtcttttgtccattttaaaattagtttattagtctttttattattgagtcataagagttctttacatacagttacaagtcccttatcggatatacgatttgctagtattttcccatgtgttgttttttcactttcaccatggtgtctttatgcacaaatgttttttattttgatgataaattcatctactttttcctcttaaaagttaaatttttaactgtctttgatgtatagaaatgcagtaatttttatacattaagcttgttttttaacaatcttgttaaatttacctactaaaactaatctcttgacttctttggattttctctgtatagaatcatataacttgaaataataacagttttgttcctatttatttttctttacttatttcattggctaggacaaccagtataatgttttataaccttattctgatctcaaagggaaaaccttaacatccagttttatgttttgctgtgggatttttgtagatacgtttttaaaaggttaaggaaacttcattctatttctagtttgctgagggctttgttcttttagatcatgaatggatactgaattttattaaatgctttttctgcatacgatggcaaaatacacagatgggttttcagctgttttaactttatctacttgaagtaacacagcctgctcatgtgttatagatttcaaagattccatttgctgatattttgcttatcatatttgcatctatattcatgagtgagactggtttgttattttactttctcataatgcccctgtgaggtttctggaccaggtaatgctaatctcatgaaattatttggggaatattctttctctattttatgtaaaagattgtataatactagcattttccttaaatgataggtagaactaatctataaaccttttgggtctggaaatttctttgtcggaagttttttaaattatgggtttaatttatttaacagccacaggattattgagattttctatttttttcttgtattgctgggtatttccccaggatttgtctctttatctaagttttcaaatgtcctatttttatctttttaatctcatcacaatctgtagttttgccccatttttcattcttgatactggtttttttttttgttttttttaaagtcttaccaggaaattgttttttcttttttaaagacgcagtcttttcatttgttgatcttgctcctgtatatttgtttttcatttccttaatttatgttcttaagtttcttatttcccaccttctatcatttggattcatttttgtgatggaggcatttagatcatttagatcactgatgcttcctctaggaagccttcttgaacctcttaagtctttccccaatcagaaactgtatcctaaattcctggtaacttgttgtttttacctactagaccacagattgtcaatctacacccaagggcagtctcctgtttttgcaaatacagttttatgggaatagatccacattcatttgtgtaagacaggacattttaatctaaagatttgtcctgtgcttgacaaaaatagtgtgtgccaagttagtatttattaattaaggagcaaagtgctgaatttgttaaaagtaccttggatttttatggtgcttttattctcaaaatctagaaactatttccagtaaatctatgccctaaaaattagtttactaatccacactgtcagcgtcttatctttgacatttcttcatgaaaattaaggaaattatagctcagaaaatggaaactttatagaactctatttcatcactgacaaatgttttcagtttagagagctttcttcttcttatctgtataacagccatacatatatatctatatatcatagattaaatcacttattgatagaaaatgaaattcacaggtcatattctctttaaggtaaacaaagctaactgtcgactaccagaaaatactttcaacataaatgaactctccaacttattaaacttttatatagatagaggaagacagctctttcgggataaccacctggtaagaataacatttttacttctgaaaatgttcatattttaaaggaagacacattactgtagtatctgtaaaggtactctttgataaatcaggatttgaaaattttttaattgcaatgataaatttgctaaatttgatgatcactgaaaacttaaatatattttaatcataaaacaaatgcagtttttgaaattttgtttctaagtaattcggattcttacagatttctgaggccaggtgcagtggctcacacctgtaatcccagcactttgggaggccaaggtgagcagattgcttgagccccggagtttgagaccagcttgggcaacatggtgaaacgctgtctctatcgaaaaaatacaaatacgtggtagcacgtatctgtactcccagctactcaagaggctgaggtgggaggatcacttgagcccagagaaggaggttttagtgagccaagtttatgcccctgcactccagcctgggcaatagaacaagactctgccttaaaaaaacaaagaaccacaaaaaccagattccaaaaaaaaggcgataaggtaaaggaagtaagttttttttcattgtttttaattatcaaaactattatctctgtttattttttagatacctgcagaaacccccagtcctgttattttcagtgattttccatttatctttaattcgctatccaaaattaaattattgcaagctgattcacatataaagatgcaggtatgtatgtcctattttttagtatgaaaaatttcaaacatatataaaatagagatagtggtataatgaatcccatcaccaagattcagcaattgtcaacattttgccacacttttatctatcactttttttctttgttgttgttactgtttttgctgaagtattttacagcaaatttcagttccaatgtctcttcacctgcccatacttcaatgcattatttctggttgtcctactcgtgttcactgtgagattcatgagtggttcaagtggcaaccacatgattctttcattgtttctcattaaccttttatttaataatttcatccattattttcattaaggtttgtggtatggcaatacttctaatcttattccttccaaagtcatttcctggaattaggtaaaaaagagcttttccttatcagtcagggcacttggttcctccaaaatggttaaagaccattcacataggaaggtagaataattaattcctatccctttaattatcaaatgttgccaaattaccctctatagagtttgtaaatgcctcttccacatgctgttctcagcaatgcagagtattatcaagctttgtgatcttttccattttgatgagttaatcatgatatttcacgttgattttaatttatatttctccttgttatttaatgttctagtcctcactttctttatataatatgtatctattgttttcctgccatgaacaacactgacgctatccagtaatctgttctttccttctctcttccctctcctcctctatccaattttaattgctgtgttcttaagtgctaatctttggattaaaaatacctccttaagcttcttggagcttgatttataagctccgactgatattcttttattcttaaataatgtctatgagtcaatcaatgagtttattttgttttccacttactttcacccttctgcttcttttctggtagttgtattagtcccacataagatttacatactattttgtttcttttatcaccatcagccttagttctcagttaagtatatataatgccatccccttattatgctaaaacaaattttccaaactttttttttattgctgaggcttgttttctaggtcattcctcatgaaaagtttatatctatttttctatgatatttatattttaaagactcataggaatcagaacttatacccattattgacttttattactaattcaaaggatgcatctgggtgaaacataagaagtctgagatagaacatgcacaagagaagccatttcagttattcattccctttttataccccgctaattacatggcttacatgacattttccaatgtgccatgccccataaatccacgaattccaggtttatttataataagcaacctagacagacaaggtatatcctgctagtagcattccacaggtaagggctgtccctctagttcctattattattattattttgagacagagttttgctcttgttgcccaggctggagtacaatggtgcaatctcagctcaccacaacctctgcctcccgggttcaagcgattcttctgcctcagcctcccaagtaggtgggattacaggcatgcgccaccatgcctggctaattttgtatttttagtagagacagggtttctccatgttggtcaggctggtctcgaactcccaacctcaagtgatctgcctgccttggcctcccaaagtgctgggattacaggcgtgagccaccgcacccggcttattattattattatcatcatcatcatcttaagacagagtctagctctgttgcccaggctggagtgcgatggtgcgatttctgctcactgtaaccttcacctcccagtttcaactgattctcctgcctcagtctcccaagtagctgggattacaggcacccaccacacccagctaatttttgtattttagtagagacggggtttcaccatgttggtcaggctggtctcgaactcctgacctcaggtgatcggcccgcctcagcctcccaaagtgctgggattacaggcgtgagccaccacgcccggactagttactattattagtgcctattaccagcatgtttacaaatatatttgaccaggtcatctcttcttttatttctgagccatctgtttttatttttgtaacatccctggtaaagggagaaaatagattgtctttcctttccaaacctaactttcccatcaatttcccttaaacaagaccttccctttatggtattttctcctatagtcatgtttctctctgggtcatttgtctattctgctagtgagtagtcgagggttgagtgaataatggactcgggcagattgcacattatgaaagactaggaaaagtctgaggacaagaaaactcttacttttagttgttatgagtgaagctggaaagctgactttacaatcctgctctccaaaggagagataatggatatagttaaaactgcaagctccaaagtggatcaccaattcaaatgtgtaaatgtgaaaaggtaaaaccaatatacagagaaccggagtagagaagctagaaattaagctaagaggcaggtttcccatctagctcttggttatgtaaaagaaggtacagacacctctccctgctgtagtcagtggaggacattgctggccacaaacccatggaactcagacccatggaacatgttgctcagtagtcagtattgctggatgtcccagacctgcagacttctgcagggccacaggaggtgatgacccaccaccagaaaggaacagagatggaacttgttccttttccctacaaatctggtgcctaaaaaaaaaaatcttaaagaaaaaccagaagaatctagtaataacagacaaatttcttagtatataatggtggcagatacccagggcagggatttcccaaccccagggccatatgcacacttctctgaagtgcttgtagagagtgaatgtgggcaaacacacccagcctaggaacctggggtaggatagctattatcctctggtcttgctgtcacgatttcaggacaggccctatgagggctacattggtttgagttctaaatcctcatttattgtccttgtgatgtaactgaagcccttgaggagtgctgaaggtcaaagcaaggatagcaagtccaacactagatttctaatctaaagaagttcaacagaaacaagatcagagattaaaatagtgagacaatgttgagaattcagaaaagctaaagagaagtacttagggtgatcagaaaagctaaaagaagtactatttagtgtgaccaggagtaatgttagatataaaatgaggccacctgtggcatattcttaaagagttcccatggatggatcatagttattggaaagagaagagtggatcttctctgaggaagtctgtcttctgtctttttcctacagctcacattatccctgagctcttatactgtctttatattcctgaggattacaatgctaatgctctgtgtcttaagactgatggtggatgaatgtctcagcatgttgaataccagtatggcctttaaggatgatgtttactataataaataatctgagatagcttttaataacttagctgttcatccatgctaactaatctcctgtacacaattcctaggtaaccatagtttctttggtcctacaatcactccaccttccataaggcagatatgttgtctgttttcttaaataattacaatgtgaatgtttatagcaatggcaggattaagtatatactacacaaaatgtttattggaagtattaaacaatccttgggattcctatgaggtcaaaaggagaagccaactaaaaaatttatttttccagatgtcagaaaagaaagcatacatgcttatgcatgaaacaattctgcaaaaaaaggatgaatttcctccatcacccagatttatacttagagtcagacgaagtcgcctggttaaagatgctctgcgtcaattaagtcaagctgaagctactgacttctgcaaagtattagtggtacagtaaaaagtctcattgaacatttttacttctgtgggagggatgcattcatatgatgtaacaaatgctctctgaaaagagcctgcatttgcctctatggttatcaatcttttggtttccagaattcccctcttacccttcagagaatagcaataggatgcttaactgcacagtgggctatgagttaactattagttactgatgactacaaaaatgctgcataatgaaacatcccaaaacgtaaaggctcaaaatgacaataatttattttacagatctgcagttcagtggaggacctgctgatctaggctgaactcatctgggtggctttgcaaattttatctgagtttgtgtacatgtctgggagttggctagggactggctgacctaggcctggctggagcaatttagctctgcttcctatgtctttcattctcctcctggggcgagcaagcatgttcttcccacagtagtgccagaggtgcaagatagcaagaccaaacattgctttagtcaaagcagtcataaagctgaacctaagtcaaaggctagggaaatatacacagcctcttcagtgggaggaactgcaaagtcatatgcaaaagacatggatcacagaggggtgaagaattggggctataatgcaatcaaactgctagaggaagggatacttttcctacatgttggctctagtttcatcacttaagaccttccactaaagaccttccactatatgagtttcaatgctagccatccttccttttatcctttgtgggtgcttacagggtttttattgtgtagtaactcaggttatttgccctcttgaggctacagaataatgactaactctgtaggtaagagctggagtctgtccagaagggagtggattttctcgatgtcagccatgagaggaagagttgggctgttagagaagaaatcagaacctgggaagtgggattcagataaaaaagggattttcccagcatgtgactccaatggaaaacaaaaactactttataaaccaggctttctagttgtatgtctcccttcatgcctatttttctttaaatcttaactgtaaaggaatcagtagaaaagtattccccttatgagagatgaccaaggggtaaaaaaaagtaaacttcaagccagatcaaataaaaatacagactctgaacaagggcaaggttgtcagggcccatcatgagtgagtcttgacacggacagacttgctagtataaatgagcagaaataggaaaatcagaagtaggcttaatttgttattgagatattcagaagggaaagtggggcaggcccttaaacatgatggtctattgatcgaagcagcagtagataagattacccaggcaaagagagtagagagagaacaaaaatctaagcaacaaaaattagaggtgcttatcattaaaagataaaagtaaattacccaaaaaaggatgtagaaaagaaatagttaagagacatgggggaaaaccaagatagtacatagccataaagtccaaaggtagagaaagcttttaaaaagagggactggggccaggtgcggtggctcacacctgtaatcccagcactttgtgggggccaaggtgggcggattaccagctgaggtcaggagtttgaaaccagactgcccaaaaatacaaaaactagctgggtgcggtggtgggtgcctgtaatctcagctactcgggaggctgaggcaggagaatggcttgaacccaggaggtggagattgcagtaagctgagatcgtgccattgcactccagcctgggcagcagagtgagactccatctcaaataaataaataaataaataaataaataaataaataaataaaaagagggactggttaatgctgatttctcatttgagagctatgggcaatctgctctgctggttcctgcaaaggtctcatgcccaggcagactgggagggctgttttgcagaagcccaaataagagtagagacaggagaaaccaaatacttgttgactggagccagccaaggttgtgaagtctgaatgatgagatggacaacaagatagaataatcagggaatttaggggcccacgggtttgaagaacatcaaaatttggtttgagatactggtcaatgtaactggtgaatgctaagtcttgctagagtcccccttcacttggtccatgtagcagtgtaaaggatgcacacaacaatctgagaataaatagattcatggccttcactgctcagcagcaaactgagggaagacagattgcaaggaggtaagggctatgtgattctaataattctagagactgcaagaatggtcgttagaggtttaaaacttccataaagctcaaaacattgtattttaagtcaggatctgggactatgttctctttccttaggttgaatttattaatgaaatttgtcctgagtctggaggggttagttcagagttcttccactgtatgtttgaagagatgaccaagccagaatatggaatgttcatgtatcctgaaatgggttcctgcatgtggtttcctgccaaggtaagtcttttcttttttttttttcccccagaacagaaaaggcaccccatatactgcaacattaacaccatagatagtggtgtaaaattaggtcatatagagctttgctactcatattttgagtagtactcgtatggttcacagagcagcagctatggcgtcacttggggagctgttagaaaagcagaatctgaggccctactctacacctactgaatcagagcatgtattttataagatccttaggtgattcacatgcacgttacatttttaatggttttaataaattatacttgagaaataataaactgcatatatttaaggtgtccagcttggctcagcctggtggttcacacctgtaattccaggattttgagacactgaggtgggaggattgcttgagtagctgagactacaggcgtatgtcacaccaggctaatttttgtatttttagtagagacggcattttgccatgttggccaggctggtctcaaactcctgacctcaagtgatccacctgccttggcctcccagagtgttgggattacaggtgtgagccaccacgctcagctgaatcaccttttaagaatgaaaaattatctctaggattctatcagtcatttctgtcctaatttaaaacactttagattactgcttctcaaaatttaggaaataacctacatatccatcagtaggagagcaggtaaacaaattgtagtacatgctgagcatcctgtaatctgaaaatccaaaatctgaaatgctctaaaattggaaactttttgagtgccaacatgatgccacaagtgggaaattccactcataagtatttaatacgaactttgtttcatgcacaaaattatttaaaatattgtttgaaattaccttcaggctatgtgtataaggtgtatacgaactattaatataaatgaattttgtgtttagacttcggtcctatccccaagatatctcactgtgtttatgcaaatgttccaagtctgaaaaactctgagatctgaaacactgctggtcccaagcctttcacatagggatactgagcagaatctcagtatcccttttttgagactccggctcaaaaaaaaaaaaagaaaaacaaaaacaggtgattcatggccaggtgcggtggctcacacctgtaataccagcactttgggaggccgaggtggggggattacttgaggtcaggaattcgagaccagcctggccagcctggccaacctggcgaaacactgtctctactaaaaatacaaaaattagccaggtgtggtggtgcgtgcctgtaatcccagctacttgggaggctgaggcaggagaatcacttgaacctaagaggcagaggttgcagtgagctgagattgcgccatagcaccccagcctgggcgacagagtgatactctgtttcaaaaataaaaggtgcttaaaaaggaaaaaagaaaaataaaaaaggtgattcatgtctgtaattattatatttttgtaaaggtccttaaagtataaacattttctttcttaaagtaacaaaaaaattgaggcaggcggatcaccaggtcaggaaatcgagaccatcctggctagcatggtgaaaccctatctctactaaaaatacaaaaaattagccgggtgtggtggcacgagcctgtagtcccagctactcgggaggctgaggcaggagaactgcttgaacctgggaggcagaggttgcagtgagccaagatcgcaccactgccctccagcctgggtgacagagcgagactccatctcaaaaaagaaaagtaacaaaaaaatttgtcttcatttctgtattagtaacacagatcatttaatctgtgtatgaaattgtaatttcatacaatattttaaataattttgtgcatgaaacaaagttcgtattaaatacttatgagtggaacttcccacttgtggcatcatgttggcactcaaaaagtttccgattttagagcatttcagattttggattttcagattacagttctaaaaagaatcacatgttgagcttctattgtgttatggtttgaatgccccaccctccccgaaattcatgttaaaacttaatccccaatgtggtagccttgaaaaggtgtcctttagaggtacttgggtcatgagagttctgccctcatgaatagattaatccactcatggattaatgagtaatggattaatgggttatcatgggagtggaactggtggctttgtaagaaggggaagagaaacctgagctaggacactcagccccctcaccatgtgatgccctgtgcagcctcaggactctgcagagttctcatcagcaagaaggccctcaccagatacaactgctcagtcttggacttcccagcctccagaactctaagaaatacattccttttctttataaattacccggtttcagatattctgttataagcaacagaaaatgaactaaggcatatttattagtcccctttcccataaacttccaaattgttcttccaaatggcagaaaggacaggcaggaggaggagaaagatgaatacatgtgaaaaaatactgaaaggtgttttgtatcttttcgagaacaaatggaccctctaaaatataggaatggctaaggtgtgccaatggtatgattttttgttggtcaatcagcaagcatttatttaatgtttcttgaggttcctacattgtattaaatattgtgggatattcaaattattacatgacataatccctttcctcctgaaactctatagatgtagttgtagcaataggatcaacacaccagaaactttaccaattggctctaagttatagattgctgacttaatatgtaatagtttttgagaagcatgacaggatggggaaggaagcactgatgtgggatcagaagcctagagttctaatcttcagtgatggtgagtgtgtcatttagcctctctgagatttcggtttcctcacctagaaaatggacgtcataatttctgctctgcctgctttgcagggctattgtgaaaacaaaacaaagtaaggtatctgaaagtaccatgaaggctttagggcactatacaaacttaagggattcttggttaggagagaaagaaatcaagaggggactgaagtgattgcatttgaaagtataatggagaggcgaaggcctgaggttgaaggttaaggaatgggatgaaatgaactaaagagacacaggttggggatggagaggagatgggatgaaatgaactaaagagacacaggttggggatggagaggaggtaccaaccttatgaggtacagatgaagaaactgaggtttagagagattaaataaatcagccaatgacagaaaactagtaagtgatcaagccaggatatgagttcaggattgtctaatcccagagctcttactcttaagcattatgctatactgctggataaaaaacagagacaaaaaaaaaaaaaaaccaaaacaaaacaccctgatttgtgtatggctcagtgaagagatgaaatcagctataaccaagggacatattacaaattatgggaaagaagactgattaggtttcaggggacccctttgtcgattacttgtattgtacttagaacttactttcaaaatttaaatgcaattttagaatttattttcacaattaaataaataaatatggcaactagactgtaccatagaatattacgtgagtggcccaaagtcatgcacccactaacagtaaggttggcattggaattgaatcccaaaattttcaggctgttgatctactgtgctgcaatcatggcctggatagatggagccagtgttttctctcaccaaggactacaagtgcagacaagacatgccaacttcaccaggcctctttccttcttccccttctttcttctacctaccttcttggtccctagcgtcagtcaccctccctgacccatatgctcatccctctaagcacacccaagttgtggggctgcattgccaaaggggctgccactcatgcgaggctcatctaatatgcctggtgaccaataaatgtataaagtgcacccttcctttctcagtgtcattattctacatgaatctgaagggaaagactataaaattaaattgtgaaaacctgaatatataaagctgtctgagcatattttttaacgttccagataaaatgaattcatttatttaatgttctgaactatcaatttgtattcaaaattatggaagaaatttaatgtattataatctgtagaagaacttcacatttttattttccggaagcccattttgtttttaatttttgactttcagaaaagggaaccacatttttttttactaatctaattatccctttgtattactaattatttataataccttagggatttttttcttcttttctagcctaaacctgagaagaaaagatatttcctctttggaatgctgtgtggactctccttattcaatttaaatgttgctaaccttcctttcccactggctctgtataaaaaacttctggaccaaaagccatcattggaagatttaaaagaactcagtcctcggttggggaagtaagtaaatataacgttttttcaggaccgtatctagtaagtctcagttgtttaggcataaataatcttacacacagagagacagatatggtcttcaatttcaataatgtatgctcttgagaggaatttgaattttagcatgatttataattgagtaaaccttcaaaatggaggaaagctgagtgttcctctaattattaacaagtggaagaaacaggagttctggcctggtctcttgactttatccaggtggaaacagttgcttcagagagcacaatatatatgtgcatcatcacacatataaatatttatgactatacaagggtgtgtgtgtttgtgtgcatgtaagtctaataaaaaaactgaaaatatgctcaccctaactagtaattgagggaataaataaaaatgagatatcatttttctacttacagattgacacttgttaaaaagtttttcttacagtgttggcaaaaaattgggggaaaggactctcttctcgtgtactgttagtgtgagaatatattggctagatgtgtgctggagcaggggttctcagccttggcaatactgaccttttggcctgtttaattctttgttgtgggagactgtcctgggcattgtgggatgtttagcagcatttggggtcacacccactggatgccagtagcaaccttccctccaagtgtgacaaccaaagatgtctccagactttgctgaatgacccctaggggacaaagtcatccctgattcagaatcactgtctagaggaaacagctcatttttgtaatttccatgaagatgtagcagtgtctatgtagtaacaatggtccaacaaatcaaactgtaaatagaggcaaactctagggaaagggaatgagaagatggaggataggaaatttatattatattttatacatttctatattgttcacaactttttccattgaaaattacttgtgaaactttataagatcaataaatataatttttaaaaccaaaatcttcattaggagtttgcaagaagttctagatgatgctgctgatgacattggagatgcgctctgcatacgcttttctgtgagtactaatgaaagccaaattatagtttagctttaatctgtttctaaaaaataatttttattatagtatcttaaatttgggatccctttttttttttattgaggcagagtctcactctgtcacccaggttggagtacaatggcgcgatctcggttcactgcagcctccgcctcctgggttcaagtgattctcctacctcagcctcctgagtagctgggattatgggcatgcgacaccatgcctggctaatttttgtattctttgtagagatgggtttttgctatcttggccaggctggtctctaactcctggcctcaagtgatccacctgtctcagcctcccaaagtgctaggattacagggataagccattgtgcctggcccctgggatcccttttttaaaagacattttatttctgtaccgcaagactttccccttatcttcttctcatgtctatatactctcaaataaagtgaagctatggtgattattcaactagtgtaaataatttaacaactaaacgataatttaggcatgaaagtaatgtacaacatgtactagggtaggcttttttgctttcacatgtatttaaaaggctgaactacataaaaaattatttagctccaagttattttcagttacataggggaaaatgtattggcaataaagatattatgggtggttgattattcaaacttactttgatatttggtacctgaatacattttggttacagatacactgggaccaaaatgatgttgacttaattccaaatgggatctccatacctgtggaccaaaccaacaagtaagttttgacagctagaatatctgttttgaatatactgtacataaaatgttgtatcactattcttttaaaatgtatttttaaatatggttcacacctgtaatcccagcaatttgggaggctgaggtgggtggatcacttgaggtcaggagttcaaggccaacctggccaacatggcgaaaccccgtctctactacaaaaattagccaggtgtggtggcacatgcctgtagtctcagctactaaggaggctgaggattgcttgaacccaggaagtggaggttgcagtgagccgggattgcgcaactgcactcaagcctgggcaacagagtgagactgtgtctcaaaaaaaaaaaaaaaaaaaaaaagcattttagcttctcaggtgattgttttagctcctaatcttttagaaaaaagaagcttttaagataaaagaaaaggagaaagaattcagggttcaatatttcctttgtagctctttttactatttattcatttagcaaatatttttgagcccctattctgtaccagactctattctaggtgctggagatacagtagtcaaaaagacagacaaaatttggagcttaaattccagtggggcagaaagacaatacacaaatgaatcattattatttttaatagagatggagtcttgccatgctgcccaggctggtctcgaattcctgagctcaggcagtcctcacacctcagcctcccaaagtactgggattacaagggtgagccaccgcacctggccacaaatgaattattatgtaatataatgtcagataaggatgagcactctgaagaaaattaaaactgattaagaaactagggagttccaggtggtggtatgctggagctcactagtaccagcttgtgagagctgattgttaaattttcaaaaatgttaagagtttattatcaaagtattagtagctgaaaatcagccacagtgggaatattaacaccacagaaattcgccaatgctgcaaatgtgtgtcccctcccctcccactccttttcagagagctggttgttagatatttaccagcacaccaatggttacaggggaaggcagacaagagttgatttagataggctagtccacaaaggctgcccaaagtgtgggagacaatcatgtctctgatggaaatgcctccagtagcaaccctgccatcaggaaattaatcatttagtagaaattacatcctgtagtataagacagaccttgcaggaataattttcacaaagtgacatgtgttgtgagaggggacaagcaaaggaacaaaaggatcaaccctgagaaagtcttacttatattgaaatctaatggatggtagaagttatcaggtaaagaagaaatgctgcattctgtggcctaactacaaaagagagacaagacctatgaacggggccagaagtgaaaatggaagtgggagctgggcaccatggtgcatacttgcagtctcacctactcaggaggctgtggcgggaggttcgcttgaggccaggagtccaagtccagcctgggcaacacagggagaccccatctcttaaaaaaaagaaagaaaaagaaaggaaagagaaagaaagaagaaagaaagaaaagggaagggaaagggaaagggaagggaagggaaaggaaagaaagaaagaaagaaaatggaagtgggaagaggccccttgctgagactggcaaggtcagataattgagggaggagctaggcttgggaaggcctgttgatccctgctaaggaggtttggaatttaccccaagggcaatgggaagcctttgaaagactttaagcaagagaatgacatattcagattcatgttttaaaaaaatcctcctgactgcagtgaggaaagtgagccaaatagttttaaaccttctgattatattttctaaatttctttcttctagctgaccaggttttggtcacaatacaacattcttgtgctatatagaagtaatttacttttccttctcaatagaaatagtaaaaagaacaaagtataaaatcttttaatcattggccttttccttcctttctttttttttttttttttttgcttccctcaaggagagactatgtttctaagtatattgattacattttcaacgtctctgtaaaagcagtttatgaggaatttcagagaggattttatagagtctgtgagaaggagatacttagacatttctaccctgaagaactaatgacagcaatcattggaaatactgattatgactggaaacagtttgaacaggtaggtgatacctaaagtgccccaatttttccgaacaacttctatatattccaccccactcaaatcatttttctccctctttctctcaagaattcaaagtatgagcaaggataccaaaaatcacatcctactatacagttgttttggaaggctttccacaaactaaccttggatgaaaagaaaaaattcctctgtaagtactgtggtactagatggacacataattatgtatcttttaaaaaggtacagtcttgtttagaatgaagccattgaagtggcctcattgtctggggtgacacccaaggttctttgtctcacagccatggagatcaaggacatggacacacacaaagggtgaggtatagagcagaaacttaataggcgaaaagagaatagctctctgctacagagaggggtcccagaaaaatgagttgctgatctgtggtgaaatgcagggttttttatagatgagctagtgaggaggtggtgtctgatctacatagggcatgaaaaacgagttaggaccaggtgtaccatccgcatagggcacgaatctctggcagcccctaccccaatctttgattatacaggtgggtagctactccatggtgcttctttcttactgtgcatgtgctaaaaaaggggggaggtggaacccccatggtggacatgcctggtcccaggttgccctttctattggtggagctgctggcattcccccgtgctagcttccagccttcttatctatgtttgcagcccgatattccaggctgctctttgttagaaaagaagtgatttcttggactgctttttgttagaagggaagttctgctgaggactcttttgccctcactatctgcctaaaataattttctatctctgtatcaccattcttgcaggtgggtcacatgtgttagtggcagagcaaggatgagaacccaggctccctaccttctagaccagcattctttctcttactcaagcctgtttctttttttttttaagtagagatttgctaatttactactttttctacactgactttttctgcaccctctttcctcacttcagctggctcctaagccttttatctcatgttcctatcttcatctaattatctaagtcctatgatgttcgaatgatgccaactatctgttttatagtaatatatcatttagaaataataatggcaacaacaactgatgataataatagcagcagcagcatttactgtgtgcttattctgtgccatgcactatgctgactgctttgtatctattacctacctttttcctaacagcaaccctacgaggtaggtactattcttttttccccgtttcagacatgaggaaaaagaggcttggagcatttagtagcttgcccatgttcagacagctggtaagtatgggaaccagaatagaatccatcaggctgactccaaagcccaggctcttgagcactaagctctgtagcctcatggtataagaacttctcttggtgggaaccctaaggtttctctagggcagacttaatgacttctctcaccatctcatcccatttgtcagctcttcctgagttacacatctttcttcttgatatttttgttgctactaaggatgctggaggacaattccaacttgtccacagatccaacctatttctctataagcccaagctgcctttctaatcttctctcttaatgggaaacttttgattcagcccagtggttcagctgtctgtacaccccatgagttcacttcttcccacctgtggctttttcctgagctttgtcccctgccttgaaagctcagccaaatcctgtcttgagaaatagcctggtgtgacctctgtgaagtctctctgaccactcagcctggtgtttctctccctgctgaatcctttaagctcctaacctcattcttcctagatgagctaaataaacttccttcttgctactatcttttcatgcatataattttcccccaactacaccatgaactcattgaggacaaagaccaaatgtcatgatttttatacattcaacatggtctaggacagttctctctgcctaaggacattcaataaatacttactgaatgaagtgattaatttcttccttttcattatgttttactctttctatgaaatatcttaaccaaattttattcctttctagttttccttacaggacgtgataggctgcatgcaagaggcatacagaaaatggaaatagtatttcgctgtcctgaaactttcagtgaaagagatcacccaacatcaataacttgtcataatattctctccctccctaagtattctacaatggaaagaatggaggaagcacttcaagtagccatcaacaacaacagaggatttgtctcacccatgctcacacagtcataatcacctctgagagactcagggtgggctttctcacacttggatccttctgttcttccttacacctaaataatacaagagattaatgaatagtggttagaagtagttgagggagagattgggggaatggggagatgatgatgatggtcaaagggtgcaaaatctcacacaagactgaggcaggagaatagggtacagagatagggatctaaggatgacttggacacactccctggcactgaagagtctgaacactggcctgtgattggtccattccaggaccttcatttgcataaggtatcaaaccacatcagcctctgattggccatgggccagacctgcactctggccaatgattggttcattccaggacattcatttgcataaggagtcaaaccacaccagtcttggattggctgtgagccaattcacctcagtctctaattggctgtgagtcagtctttcatttacatagggtgtaaccatcaagaaacctctacagggtacttaagccccagaagattttgctaccagggctcttgagccacttgctctagcccactcccaccctgtggaatgtactttcacttttgctgcttcactgccttgtgctccaataaatccactccttcaccacccattcatgcatgtcgctcaattctttgttcaacacaccaagaacctgcacacctcattatcagaacccttaacctagtaacatattttggcaagccagtcaggaggtaagcctaaatttggggatttattttcttttattctattgagattccatttgtggccatgggctggaactaaactccacatgggactctctctgtctctccccttctctttctttcccttttccaacttgggacccttggcaggcagcattctaagcacagagacaactgcaggtctcttgctagggccactgtctggtgagactgaaaggtttccgtgtgtaagcacctaaccatcatcgcctgcttcaggtggggtcctgagtccttttctttttagtccttcagcagccatttcccagtagctcgttggtaattgagggcaactggcccaggccactctccagtgttgcctgaaagccaaagagtgagtggggttagctgcccggcctggaagtgggattcttttctatctttcctggttatagttcctgagccctacatgtgatgcaactggcagtggcggcttgtccagggtgaatacataaacatttcaggtgcctttaaccctccttttcttatgctaaaattccctcgtagagtcagcctgtcagggaatgcaacaaataggggcacaagataaatccctaccgccatgaggtgcatgtttttgtgactataatattatatttatttgctgcttgtgttgggataacatgtttagaccaattagagatgtaccccaaacccaaagggccagggcaataggtaactgactatggaggctccaacagcaaacattagcctaaaggttagggaccaaccacttggatagggaaagtgctgtgcttcttttgtaagggaccacttctagatcatttgagtttagtagatctggtactaagagaagaatcctggtggagactcttggatcactgtataaattgcacagtggatccatggggtaatctctgctcctggtttatctggtacagtcagagagcaccatgctcccttattgagaggccagtctccaacaagtttaaattaggcagtctgccatcccttgcccttcaaactgtacttacaacaatggttaaggaaaccatttgggaagaaactattgtggccagctacaaggatgccaaaagccaagaaccatatccaagaacgaagggaatcatactaggccattgtctatgaagggaaagcattcaaagcagcactggtgcccacctaaggtcagagatgtctgacactctaagattggaccccaaagggggactccttgggagatccaatcctaggccacaacctctctgaaggggaagaccctagatggaggttctgaggtctagtattaaaccctcctcagaactttttctctcttacaaacaacaataggaaatactccatccataccacctgactccccactcagctgcatcctcaataattggaaccaatttaaccctgacaatatagtagggaaacatttgttttttttactgtaatactgtttggccccagtatcctctagatagccaggagcaatggctagtcaataggagtctcagtcatgacactatcctgcaattagacttattttgtaaaaggcagggtaaatggtcagaaataccatgtttaagcctttatggccctgcaccaaaacccttcaatttgtaaggcttccaaattttgccctcaaagagaaaaaattcctaaagtagaaccagatgttatagatgacccctttctgcaagggccactgtttcttagggggaactgtaaccacctccatacaaccccttgccaagtgctcctgaggatcaaacccaggaacaggagccggaaactccactaagttcccccacacacttccaggggaacaccttattcaattccctgtccagctctatttcccccaagggaagtagcaggagttgaggggctaatctaagtggaggcccccttctccataactgatatacagcaatgaaaggataagttaggaatttattctgagaaccccaggagatttgcagacggcttccaaactttaaccttagccttcgatctctcacagaaagatgttcaatgtatcctggcaacttgttgcactcctctggagaaagaatgtatttctgaggccgcccaacgtgaagcaaacaagctgtttgccggaaactccgagggcaattgcctgggcccagatacagtccccatcactgactgtaactggaactataacacccctatgggaatgaacaacccagccaaattccttgaagctcacctgggaggaatgagaaaggaaatgactaaggcagtaaattaagggaaattacacaggttaaggaggaaagctatattttatagtggattggaaaaggcttttaaaaaatacaccaacctggaccctccccctcctgaaggcaaagtactaatggcacaggatttcattagccaagctgccctggacattaggcataaaatccagaagctacacatgggaccacaaactaatcaaaatcagcttattgataccacctgcatggtatataacaaacgtgatctggaggaagtggaaagggaatacactaaagaaaaacagccaaaattatggcaactgtcactggtgatgccctaaatgcccaaaagtcatccaaggaaaacccaaagggtcccaaggacaatgccggcaaaagctctggttacaagtgcaagaaaagtgggcactaggcaaagtactgcactaagcccacgcagggcctgtgctgccaatgtgagggcaccagtcgtgacctctggcactggataattgactgcccctgctcccaccaaggggctccatcagtcaaaactctagcagcacataaggagggatcagatgaagactcatgggacccagggacatcatcactaccacttaggatccctgggtaactctggatgtcatgggcaccaaaattaattcacaggccaagcagcagcttcacttggaatggctgaattctataggatacaaatcccaaatttcgggcacatagcaaagcccctttacaaggcaacaaggggaccttaagatgagccaatggaatgaaccctagaaatgagggagactttcaccaagttaaaacgggctctcagccaggctcgtgcactcagcattccaaacctcaccaagcccttcctgtatgtagcagaaaagaaaggcatagctgtgggagtgcttactcagaagttgagaacagagcctaggcccattgcatacttttcttttttttgagatggagtcttgttctgtctcccaggctggagtacactggcacaatcttggttcactgcaacctccagctcctggattcaagtcattctcctgcctcagactcccaactagctgggattacaggtgcctgtcaccaccatgccccagcagatttttgtattttaatagagaccgggtttcaccatgttggccagggtggtcttgaattcctgatctcaagcaatccacccaccttggcctcccaaaatgttggaattacaggcgtgcgttactgtgcccagttgttgcatacttttcaaagaaataagacagtagccaccaggtggcccagctgcctgcaggcaatagcagccactgctattttggttgaagaagctattaaaattactataggctggccaggtgtggtggctcatgcctgtaatcccaccactttgggaggccaaggtgggcggatcacctgaggtcgggagttggagaccagcctgaccaacatggagaaaccctgtctctactaaaaatacaaaattagccgggggtgctggcacatgcctgtaataccagctacttgggaggatgaggcaggagaattgcttgaacccgggaggcggaggttatggtgagcccagatcgcaccattgcactccagcctgggcaacaagagcaaaactccgcctcaaaaataaacaaataaataaataaacaaaaattactctagaccagccacaactccccaccagtcctagaaataaaaggacatatctggatgacaggagaaagattaaatacgaggtggcactcctagataatccagagatcacaattaagacctgtaacaccttaaacccagctctattagtctgttctcatgctgctagtaaagacatacctgagactgggtaatttataaaggaaagaggtttaactgactcacagttccacatgactggggaggcctcacaatcatggctagtggaaggcaaaggagaagcaaagtaatgtcttacatggcagcaggcaagacagtgtgtgctggggaactctcctttataaaaccatcagatctagtgagactgattcactatcatgagaacagcacgggaaagacccacccccatgattcaattacctcccactgggttgtggcaggccaattctccctgacaatcacacagacaggcctgtatagcactccagttacactgacagatttccacagcactgccttaacatttagcaaatagttaagcctagggaaactggtgcccagacatcaaagctagaaatgaaacatatgtcatatggtcagtaggtttctccctaacccggagcaagtcaaaataatagagacagtcttacattcctagtgctaggacccatctcgggttgacggaatctgagacagttcaaggtaatggtggcagctgtgtgaatagattcattagagagtctaaggcagctctctggaccaagctgcaaaggagataagatagaaataatcactctggtaccacagtagacaggccttgaaggttctggggcccttttaatcaaacttagcaagcattttttgcttctgtccttctagttgaaacaaaattagctacaaatagacttaggtgaatgctatactgcacgtaggcacataaccccaacctatacatgcactaagaaaattgtaacactttgggttggtctggtggaattatctctggccttctccctgtatccagttatatcaataaattccattctttcctagtttgtctgcttctccttattgggccttgagaaaacgcagccagacccagcttggttctgggaacagggtccctcccatgacacatggaaattatgggagctacagttcaagatgagatatgggtggggacacagccaaaccatatcatcagctgcactgctacctatgggcaccataaccaatcattcctgtgagcaaatcattgtacacagatatgggagccagcctcttttatcttttagaacagcctcttccagaccctgtggataactggtttatagacggcagcagctttgtgctaaacagggagcaccaagctggatatgcaatagtgaattacaccatttttgaagtccagctactgcccccaggcacattgacacaaaggctgagatcattgttcttactcaagcattaaggttgggacaagaggctggcgcagtggctcacgcctgcaatcccagcactttgggaggccgaggcaagtggatcacctgaggtcaggagttcaagaccagcctgaccaatatggtgaaaccccgtctctactagaaatacaaaaattagccgggcatggtggtgtgtgcctgtagtcccagctacttgggaggctgaggcaggagaattgcttgaacctgggaggtggaggtttcagtgagctgagatcgtaccaccactgcactccagcctgggcgacagagcaaaactctgtctcaaaataaataaataaataaataaaggttgggacaaggaaagaaagctaacatctatgcagattctaaatatgcatttcttgtggttcatgctaatgctgcaatttggaaaggagactacttactagcaagcactcccccataaaacatgggattcttcagctattgcagacaacatttgccagaggccatagccattattcattgcaaagggcaacaaaagaatctaactcctatagcacaagggaacaaaaaggaatccaaggcagcagccctcaaggtacagtctcaacaagttttagcactactccttttttatgaccccccaatagaacctgagtacacctcacaggaagaacatctaataagacaacaaggaggaatgaaacagggatcttggtggtataagggatcaaaaataaatcttccccaagcagcccaatggaaaatcataaaagccctgcataactctttccatgtgggaagagacacaactttggccatggcaaacaagctcttcactggatccaacctagcttccatggccaaacaggtctgtcaagcctgctcactgtgtgcattaaacaacccaggaaacaaagtgcctcctttaacagagccaatccaaagagggagaacttacccagggtaagactggcaattggactttacccatatgccagcctgtaaaggattcaagtttttactagtactgatagaaacctttattagctgggttgaagcttacccttccagaacagaaaaggccaatgaagtagtgaaaattctcttaaaagaaataatctggctagggacgatgtctcacacctgtaatcccaataccttggaaagctgaggcaggcagatcactgagccagaagttcaagcccagcctgggcaacatggcgaaaccctgtctctacgaaaaaaaaaaaaaaaaattatctgggcacgatggtgcatgcctgtaatcccagctactcaggaggctgcggcacaggaatcatttgaaacaaggaggtggggctgcagtgagccaagcacactgcactccagcctgggcaacagagtgaggctctgcctcaaaaaaaaaaaaaaaagaaagaaagaaagaaagagaaataatcccttggtttgggctaccccagagccttcaaaataacagcttatcttttgtctcccaaataactcaaggggttgctaaggccctcaggatcaaatttacattcagcatggaggcctccatcctccaggaaagtagaaaaggctaatcaaactctaaaatgggcattagttaaactgtgccaggagatgtcagagacttgggttgacttgctccccacatccctcttaaggatccgtaattcccctcaagcaaaaattaatctaagcccatatgaaatattatatgcaaggccatctttaactaatgatctaatcactgatccagaaacaaccagtttagtaaaatacctaattaacctgggacaatttcagcaggatttacaaaagtttggaacccagtggttccctgtactgggaactaaccagcaacccaaaattaggccaggaggtaaggtaccggtgaaaacatggaaagaggaatcatctgctcaacagctacaacccaaatggaaggaaccattttcagtggtgctggccacaccttccatggtcaaggtactagggttagataattggatacatctttccagcatcaagcctgccataccagaagttcccggaccccgaacgtggaactcccaccagccactatacctgtgaacctgtggaagacctgaaatacctgtttaaaagaatggctaaaagataagtaaaggcctactaactttccttggtgtcttttctgtgtgttcgtggtagttggggtaatactagtttttcttacattattaaactgccttttcccaagcaggtaggatcatttcctctgccctagtagaatcctatcctgtaggacttaaaggaagcaaaataacaaaaaggtacattcatacccacaatgatttgctataggccacacacactgggatcatgcatattgggaattggcttaattctacagcagggccttgatttaccctctgaccattaggtgaccctcagtatttactaagaaccttgaatctaacacaaagactgttaaacaccaccagccaagccttgtttttttgtttttgttttttgggtattttttagtagagacaggctttcaccatgttggccaggctggtcttgaactcctgacctcaagtgatctgctcgcctaggcctcccaaagtgctgggattagaggcatgagccactgtgcctggctgccagcctagccttagtaaaaacattgttggctttgcttatccccatactcctccaggtacactgctatcccagtcccagcacgatattgggcccttgaaaaaatgacttatcaccctgcctacaaaggaggaactctcttcaaactaataaacttagatgacttatacaaccaaattacagacatgacaaaggttacaatgacaggacgagcagtaaacctcctgcagtcctatcagagcaacctctctagggttacatcctcagaaaagcccatctagggcccaatatcaacacacacagagctagaattccaggtacactctgtgtcaaaaggagccaaaagtccagtcaggtcctggggaccttgaagagtaatcagtgcaactacactctggagattaatccctcacacaatcatgtaaattacacaactacccaaactacatgatttagaaaacctgtatggttttcacggaaaccattcctagttaagggcatcttaaaacatattcggtctaagtactgttaagggaagccccctagctgtgtccacacttttccttgggaagactgcattagccctgaaattcacctctagctgtcttttggttctccattatgaaaatactcccaggtggttgttggtggacgccaagagcagctacctccactgggaaaataaaaccactggggcaacccaactttgcaaggccccttcccgtcgtcaacaggggccaccttagcagggaccttaactacttgggaaagcaaaaataacaaactaacccatatgttcaccatagaaaacaatttctgtcttgaaaaacggggagcatttttcctgtgcaggaccagctcctacttacgtttacctgccaattggactggaacttgtatacttgtttatttagcccctgaaattaatatagctcccgataaccaatctctcactgtatctttgactgcaaccaccagacacaagcaagccatccaactcataccccttttagtagagctgggagtaacagcaggaataggaacaggagttaacgggctggcaacttccctatcctactaccagggcttgtccattgatttcatggaaatcttggatgacattgctcaaagtattgtcatcagacaaaatcaaataggctccctggcagtggtcactttgcaaaatagaaggggactagacctcataaccactgagaagggaggcttatgtcttttcctagaggaagaatgctgtttctatgtcaaccaatcaggaatagtaagggatgccacctgaaaactagctgaccaggccgctaagatacaacagctgtcggaatcatggggctcctggtcaaggtgctgggctgggtgtcatggttccatcccctagccagaccgttgctaatggttatactggccctggtctttggcccatgtttgctaaaccttttaaccaagttcattttctcttgcctagaaaccatttagcttcagatgattgtgcgacaaggtttccagccagtgccaggtaaaggcaccacctctggccgtcaaaaggttactctgtctccacaagacaaagcagggcgagagttctgtggtccccagcaggtaaggccagcgtgctaaatcagcaggaagcagttacaaaagaaaagaccatcagtccctctgcctcccataaagatttctagggatcatgtctctcagggggaaaatgaggcaggagaataggatccagagatagggaatctaaggataacttggacagactccctggagctgaagagtctgcacactgacctatgattggtccattccaggaccttcatttgcataaggtgccaaaccac

SEQ ID NO: 838 - DNA, 3796 bp, Homo sapiens
tcaccagcgttcgggagcctgtcgcagcgggaccgacggaatccggagcaggcgacagggcgcagaagcgggatgtacttctgttggggcgccgactccagggagctgcagcgccggaggacggcgggcagccccggggctgagctactgcaggcggccagcggggagcgccactctctgctgctgctgaccaaccacagggtcctctcgtgcggagacaacagcaggggtcagctgggccgcaggggcgcgcagcgcggggagctgccagaaccaattcaggcattggaaaccctaattgttgatctcgtgagctgcgggaaggagcactccctggctgtgtgccacaaaggaagggtcttcgcatggggagctggttctgaagggcagctggggattggagaattcaaggaaataagtttcacacctaagaaaataatgactctgaatgatataaaaataatacaagtttcctgtggacactaccactccctggcattatcaaaagatagccaagtgttttcgtggggaaagaacagccatgggcagctgggcttggggaaggagttcccctcccaagccagcccgcagagggtgaggtccctggaggggatcccactggctcaggtggctgccggaggggctcacagctttgccctgtctctctgtgggacttcgtttggctggggaagtaacagtgccgggcagctggccctcagtgggcgtaatgtcccagtgcaaagcaacaagcctctctcagtcggtgcactgaagaatctaggtgtggtttatatcagctgtggtgatgcacacactgcggtgcttacccaggacgggaaagtgttcacatttggagacaatcgctctggacagctgggatacagccccactcctgagaagagaggtccacaacttgtggaaagaattgatggcctagtttcgcagatagattgtggaagttatcacaccctggcatatgtgcacaccactggtcaggtggtatcttttggtcatggaccaagtgacacaagcaagccaactcatccggaggccctgacagagaactttgacattagctgcctgatttctgctgaagacttcgtggatgttcaagtcaaacacatttttgctggaacatatgccaactttgtgacaactcatcaggtatctattatactttttgttcctcttaaaaattattttttctcaagatttcagaccgaaataagccgaattagccagtccatggcagaaaaatggatagcagtgaaaagaagaagtactgaacatgaaatggctaaaagtgaaattagaatgatattttcatctcctgcttgtctgactgcaagttttttaaagaaaagaggaactggagaaacgacttccattgatgtggacttagaaatggcaagagataccttcaagaagttaacaaaaaaggaatggatttcttccatgataactacgtgtctcgaggatgatctgctcagagctcttccatgccattctccacaccaagaagctttatcagttttcctcctgctcccagaatgtcctgtgatgcatgattctaagaactggaagaacctggtggttccatttgcaaaggctgtgtgtgaaatgagtaaacaatctttgcaagtcctaaagaagtgttgggcatttttgcaagaatcttctctgaatccgctgatccagatgcttaaagcagccatcatctctcagctgcttcatcagactaaaaccgaacaggatcactgtaatgttaaagctcttttaggaatgatgaaagaactgcataaggtaaacaaagctaactgtcgactaccagaaaatactttcaacataaatgaactctccaacttattaaacttttatatagatagaggaagacagctctttcgggataaccacctgatacctgcagaaacccccagtcctgttattttcagtgattttccatttatctttaattcgctatccaaaattaaattattgcaagctgattcacatataaagatgcagatgtcagaaaagaaagcatacatgcttatgcatgaaacaattctgcaaaaaaaggatgaatttcctccatcacccagatttatacttagagtcagacgaagtcgcctggttaaagatgctctgcgtcaattaagtcaagctgaagctactgacttctgcaaagtattagtggttgaatttattaatgaaatttgtcctgagtctggaggggttagttcagagttcttccactgtatgtttgaagagatgaccaagccagaatatggaatgttcatgtatcctgaaatgggttcctgcatgtggtttcctgccaagcctaaacctgagaagaaaagatatttcctctttggaatgctgtgtggactctccttattcaatttaaatgttgctaaccttcctttcccactggctctgtataaaaaacttctggaccaaaagccatcattggaagatttaaaagaactcagtcctcggttggggaagagtttgcaagaagttctagatgatgctgctgatgacattggagatgcgctctgcatacgcttttctatacactgggaccaaaatgatgttgacttaattccaaatgggatctccatacctgtggaccaaaccaacaagagagactatgtttctaagtatattgattacattttcaacgtctctgtaaaagcagtttatgaggaatttcagagaggattttatagagtctgtgagaaggagatacttagacatttctaccctgaagaactaatgacagcaatcattggaaatactgattatgactggaaacagtttgaacagaattcaaagtatgagcaaggataccaaaaatcacatcctactatacagttgttttggaaggctttccacaaactaaccttggatgaaaagaaaaaattcctctttttccttacaggacgtgataggctgcatgcaagaggcatacagaaaatggaaatagtatttcgctgtcctgaaactttcagtgaaagagatcacccaacatcaataacttgtcataatattctctccctccctaagtattctacaatggaaagaatggaggaagcacttcaagtagccatcaacaacaacagaggatttgtctcacccatgctcacacagtcataatcacctctgagagactcagggtgggctttctcacacttggatccttctgttcttccttacacctaaataatacaagagattaatgaatagtggttagaagtagttgagggagagattgggggaatggggagatgatgatgatggtcaaagggtgcaaaatctcacacaagactgaggcaggagaatagggtacagagatagggatctaaggatgacttggacacactccctggcactgaagagtctgaacactggcctgtgattggtccattccaggaccttcatttgcataaggtatcaaaccacatcagcctctgattggccatgggccagacctgcactctggccaatgattggttcattccaggacattcatttgcataaggagtcaaaccacaccagtcttggattggctgtgagccaattcacctcagtctctaattggctgtgagtcagtctttcatttacatagggtgtaaccatcaagaaacctctacagggtacttaagccccagaagattttgctaccagggctcttgagccacttgctctagcccactcccaccctgtggaatgtactttcacttttgctgcttcactgccttgtgctccaataaatccactccttcaccaccca

SEQ ID NO: 839 - protein, 1022 aa, Homo sapiens
MYFCWGADSRELQRRRTAGSPGAELLQAASGERHSLLLLTNHRVLSCGDNSRGQLGRRGAQRGELPEPIQALETLIVDLVSCGKEHSLAVCHKGRVFAWGAGSEGQLGIGEFKEISFTPKKIMTLNDIKIIQVSCGHYHSLALSKDSQVFSWGKNSHGQLGLGKEFPSQDQRVRSLEGIPLAQVAAGGAHSFALSLCGTSFGWGSNSAGQLALSGRNVPVQSNKPLSVGALKNLGVVYISCGDAHTAVLTQDGKVFTFGDNRSGQLGYSPTPEKRGPQLVERIDGLVSQIDCGSYHTLAYVHTTGQVVSFGHGPSDTSKPTHPEALTENFDISCLISAEDFVDVQVKHIFAGTYANFVTTHQVSIILFVPLKNYFFSRFQTEISRISQSMAEKWIAVKRRSTEHEMAKSEIRMIFSSPACLTASFLKKRGTGETTSIDVDLEMARDTFKKLTKKEWISSMITTCLEDDLLRALPCHSPHQEALSVFLLLPECPVMHDSKNWKNLVVPFAKAVCEMSKQSLQVLKKCWAFLQESSLNPLIQMLKAAIISQLLHQTKTEQDHCNVKALLGMMKELHKVNKANCRLPENTFNINELSNLLNFYIDRGRQLFRDNHLIPAETPSPVIFSDFPFIFNSLSKIKLLQADSHIKMQMSEKKAYMLMHETILQKKDEFPPSPRFILRVRRSRLVKDALRQLSQAEATDFCKVLVVEFINEICPESGGVSSEFFHCMFEEMTKPEYGMFMYPEMGSCMWFPAKPKPEKKRYFLFGMLCGLSLFNLNVANLPFPLALYKKLLDQKPSLEDLKELSPRLGKSLQEVLDDAADDIGDALCIRFSIHWDQNDVDLIPNGISIPVDQTNKRDYVSKYIDYIFNVSVKAVYEEFQRGFYRVCEKEILRHFYPEELMTAIIGNTDYDWKQFEQNSKYEQGYQKSHPTIQLFWKAFHKLTLDEKKKFLFFLTGRDRLHRIQKMEIVFRCPETFSDHPTSITCHNILSLPKYSTMERMEEALQVAINNNRGFVSPMLTQS

SEQ ID NO: 840 - DNA, 1230 bp, Homo sapiens
tcaccagcgttcgggagcctgtcgcagcgggaccgacggaatccggagcaggcgacagggcgcagaagcgggatgtacttctgttggggcgccgactccagggagctgcagcgccggaggacggcgggcagccccggggctgagctactgcaggcggccagcggggagcgccactctctgctgctgctgaccaaccacagggtcctctcgtgcggagacaacagcaggggtcagctgggccgcaggggcgcgcagcgcggggagctgccagaaccaattcaggcattggaaaccctaattgttgatctcgtgagctgcgggaaggagcactccctggctgtgtgccacaaaggaagggtcttcgcatggggagctggttctgaagggcagctggggattggagaattcaaggaaataagtttcacacctaagaaaataatgactctgaatgatataaaaataatacaagtttcctgtggacactaccactccctggcattatcaaaagatagccaagtgttttcgtggggaaagaacagccatgggcagctgggcttggggaaggagttcccctcccaagccagcccgcagagggtgaggtccctggaggggatcccactggctcaggtggctgccggaggggctcacagctttgccctgtctctctgtgggacttcgtttggctggggaagtaacagtgccgggcagctggccctcagtgggcgtaatgtcccagtgcaaagcaacaagcctctctcagtcggtgcactgaagaatctaggtgtggtttatatcagctgtggtgatgcacacactgcggtgcttacccaggacgggaaagtgttcacatttggagacaatcgctctggacagctgggatacagccccactcctgagaagagaggtccacaacttgtggaaagaattgatggcctagtttcgcagatagattgtggaagttatcacaccctggcatatgtgcacaccactggtcaggtggtatcttttggtcatggaccaagtgacacaagcaagccaactcatccggaggccctgacagagaactttgacattagctgcctgatttctgctgaagacttcgtggatgttcaagtcaaacacatttttgctggaacatatgccaactttgtgacaactcatcaggtatctattatactttttgttcctcttaaaaattattttttctcaagatttcagaccggtatttga

SEQ ID NO: 841 - protein, 383 aa, Homo sapiens
MYFCWGADSRELQRRRTAGSPGAELLQAASGERHSLLLLTNHRVLSCGDNSRGQLGRRGAQRGELPEPIQALETLIVDLVSCGKEHSLAVCHKGRVFAWGAGSEGQLGIGEFKEISFTPKKIMTLNDIKIIQVSCGHYHSLALSKDSQVFSWGKNSHGQLGLGKEFPSQDQRVRSLEGIPLAQVAAGGAHSFALSLCGTSFGWGSNSAGQLALSGRNVPVQSNKPLSVGALKNLGVVYISCGDAHTAVLTQDGKVFTFGDNRSGQLGYSPTPEKRGPQLVERIDGLVSQIDCGSYHTLAYVHTTGQVVSFGHGPSDTSKPTHPEALTENFDISCLISAEDFVDVQVKHIFAGTYANFVTTHQVSIILFVPLKNYFFSRFQTGI

SEQ ID NO: 842 - DNA, 2392 bp, Homo sapiens
atggcaagagataccttcaagaagttaacaaaaaaggaatggatttcttccatgataactacgtgtctcgaggatgatctgctcagagctcttccatgccattctccacaccaagaagctttatcagttttcctcctgctcccagaatgtcctgtgatgcatgattctaagaactggaagaacctggtggttccatttgcaaaggctgtgtgtgaaatgagtaaacaatctttgcaagtcctaaagaagtgttgggcatttttgcaagaatcttctctgaatccgctgatccagatgcttaaagcagccatcatctctcagctgcttcatcagactaaaaccgaacaggatcactgtaatgttaaagctcttttaggaatgatgaaagaactgcataaggtaaacaaagctaactgtcgactaccagaaaatactttcaacataaatgaactctccaacttattaaacttttatatagatagaggaagacagctctttcgggataaccacctgatacctgcagaaacccccagtcctgttattttcagtgattttccatttatctttaattcgctatccaaaattaaattattgcaagctgattcacatataaagatgcagatgtcagaaaagaaagcatacatgcttatgcatgaaacaattctgcaaaaaaaggatgaatttcctccatcacccagatttatacttagagtcagacgaagtcgcctggttaaagatgctctgcgtcaattaagtcaagctgaagctactgacttctgcaaagtattagtggttgaatttattaatgaaatttgtcctgagtctggaggggttagttcagagttcttccactgtatgtttgaagagatgaccaagccagaatatggaatgttcatgtatcctgaaatgggttcctgcatgtggtttcctgccaagcctaaacctgagaagaaaagatatttcctctttggaatgctgtgtggactctccttattcaatttaaatgttgctaaccttcctttcccactggctctgtataaaaaacttctggaccaaaagccatcattggaagatttaaaagaactcagtcctcggttggggaagagtttgcaagaagttctagatgatgctgctgatgacattggagatgcgctctgcatacgcttttctatacactgggaccaaaatgatgttgacttaattccaaatgggatctccatacctgtggaccaaaccaacaagagagactatgtttctaagtatattgattacattttcaacgtctctgtaaaagcagtttatgaggaatttcagagaggattttatagagtctgtgagaaggagatacttagacatttctaccctgaagaactaatgacagcaatcattggaaatactgattatgactggaaacagtttgaacagaattcaaagtatgagcaaggataccaaaaatcacatcctactatacagttgttttggaaggctttccacaaactaaccttggatgaaaagaaaaaattcctctttttccttacaggacgtgataggctgcatgcaagaggcatacagaaaatggaaatagtatttcgctgtcctgaaactttcagtgaaagagatcacccaacatcaataacttgtcataatattctctccctccctaagtattctacaatggaaagaatggaggaagcacttcaagtagccatcaacaacaacagaggatttgtctcacccatgctcacacagtcataatcacctctgagagactcagggtgggctttctcacacttggatccttctgttcttccttacacctaaataatacaagagattaatgaatagtggttagaagtagttgagggagagattgggggaatggggagatgatgatgatggtcaaagggtgcaaaatctcacacaagactgaggcaggagaatagggtacagagatagggatctaaggatgacttggacacactccctggcactgaagagtctgaacactggcctgtgattggtccattccaggaccttcatttgcataaggtatcaaaccacatcagcctctgattggccatgggccagacctgcactctggccaatgattggttcattccaggacattcatttgcataaggagtcaaaccacaccagtcttggattggctgtgagccaattcacctcagtctctaattggctgtgagtcagtctttcatttacatagggtgtaaccatcaagaaacctctacagggtacttaagccccagaagattttgctaccagggctcttgagccacttgctctagcccactcccaccctgtggaatgtactttcacttttgctgcttcactgccttgtgctccaataaatccactccttcaccaccca

SEQ ID NO: 843 - protein, 580 aa, Homo sapiens
MARDTFKKLTKKEWISSMITTCLEDDLLRALPCHSPHQEALSVFLLLPECPVMHDSKNWKNLVVPFAKAVCEMSKQSLQVLKKCWAFLQESSLNPLIQMLKAAIISQLLHQTKTEQDHCNVKALLGMMKELHKVNKANCRLPENTFNINELSNLLNFYIDRGRQLFRDNHLIPAETPSPVIFSDFPFIFNSLSKIKLLQADSHIKMQMSEKKAYMLMHETILQKKDEFPPSPRFILRVRRSRLVKDALRQLSQAEATDFCKVLVVEFINEICPESGGVSSEFFHCMFEEMTKPEYGMFMYPEMGSCMWFPAKPKPEKKRYFLFGMLCGLSLFNLNVANLPFPLALYKKLLDQKPSLEDLKELSPRLGKSLQEVLDDAADDIGDALCIRFSIHWDQNDVDLIPNGISIPVDQTNKRDYVSKYIDYIFNVSVKAVYEEFQRGFYRVCEKEILRHFYPEELMTAIIGNTDYDWKQFEQNSKYEQGYQKSHPTIQLFWKAFHKLTLDEKKKFLFFLTGRDRLHRIQKMEIVFRCPETFSDHPTSITCHNILSLPKYSTMERMEEALQVAINNNRGFVSPMLTQS

SEQ ID NO: 844 - DNA, 1222 bp, Homo sapiens
tcaccagcgttcgggagcctgtcgcagcgggaccgacggaatccggagcaggcgacagggcgcagaagcgggatgtacttctgttggggcgccgactccagggagctgcagcgccggaggacggcgggcagccccggggctgagctactgcaggcggccagcggggagcgccactctctgctgctgctgaccaaccacagggtcctctcgtgcggagacaacagcaggggtcagctgggccgcaggggcgcgcagcgcggggagctgccagaaccaattcaggcattggaaaccctaattgttgatctcgtgagctgcgggaaggagcactccctggctgtgtgccacaaaggaagggtcttcgcatggggagctggttctgaagggcagctggggattggagaattcaaggaaataagtttcacacctaagaaaataatgactctgaatgatataaaaataatacaagtttcctgtggacactaccactccctggcattatcaaaagatagccaagtgttttcgtggggaaagaacagccatgggcagctgggcttggggaaggagttcccctcccaagccagcccgcagagggtgaggtccctggaggggatcccactggctcaggtggctgccggaggggctcacagctttgccctgtctctctgtgggacttcgtttggctggggaagtaacagtgccgggcagctggccctcagtgggcgtaatgtcccagtgcaaagcaacaagcctctctcagtcggtgcactgaagaatctaggtgtggtttatatcagctgtggtgatgcacacactgcggtgcttacccaggacgggaaagtgttcacatttggagacaatcgctctggacagctgggatacagccccactcctgagaagagaggtccacaacttgtggaaagaattgatggcctagtttcgcagatagattgtggaagttatcacaccctggcatatgtgcacaccactggtcaggtggtatcttttggtcatggaccaagtgacacaagcaagccaactcatccggaggccctgacagagaactttgacattagctgcctgatttctgctgaagacttcgtggatgttcaagtcaaacacatttttgctggaacatatgccaactttgtgacaactcatcaggtatctattatactttttgttcctcttaaaaattattttttctcaagatttcagaccg

SEQ ID NO: 845 - protein, 382 aa, Homo sapiens
  VARIANT (1)...(382): Xaa = Any Amino Acid
MYFCWGADSRELQRRRTAGSPGAELLQAASGERHSLLLLTNHRVLSCGDNSRGQLGRRGAQRGELPEPIQALETLIVDLVSCGKEHSLAVCHKGRVFAWGAGSEGQLGIGEFKEISFTPKKIMTLNDIKIIQVSCGHYHSLALSKDSQVFSWGKNSHGQLGLGKEFPSQDQRVRSLEGIPLAQVAAGGAHSFALSLCGTSFGWGSNSAGQLALSGRNVPVQSNKPLSVGALKNLGVVYISCGDAHTAVLTQDGKVFTFGDNRSGQLGYSPTPEKRGPQLVERIDGLVSQIDCGSYHTLAYVHTTGQVVSFGHGPSDTSKPTHPEALTENFDISCLISAEDFVDVQVKHIFAGTYANFVTTHQVSIILFVPLKNYFFSRFQTX

SEQ ID NO: 846 - DNA, 1993 bp, Homo sapiens
gtaaacaaagctaactgtcgactaccagaaaatactttcaacataaatgaactctccaacttattaaacttttatatagatagaggaagacagctctttcgggataaccacctgatacctgcagaaacccccagtcctgttattttcagtgattttccatttatctttaattcgctatccaaaattaaattattgcaagctgattcacatataaagatgcagatgtcagaaaagaaagcatacatgcttatgcatgaaacaattctgcaaaaaaaggatgaatttcctccatcacccagatttatacttagagtcagacgaagtcgcctggttaaagatgctctgcgtcaattaagtcaagctgaagctactgacttctgcaaagtattagtggttgaatttattaatgaaatttgtcctgagtctggaggggttagttcagagttcttccactgtatgtttgaagagatgaccaagccagaatatggaatgttcatgtatcctgaaatgggttcctgcatgtggtttcctgccaagcctaaacctgagaagaaaagatatttcctctttggaatgctgtgtggactctccttattcaatttaaatgttgctaaccttcctttcccactggctctgtataaaaaacttctggaccaaaagccatcattggaagatttaaaagaactcagtcctcggttggggaagagtttgcaagaagttctagatgatgctgctgatgacattggagatgcgctctgcatacgcttttctatacactgggaccaaaatgatgttgacttaattccaaatgggatctccatacctgtggaccaaaccaacaagagagactatgtttctaagtatattgattacattttcaacgtctctgtaaaagcagtttatgaggaatttcagagaggattttatagagtctgtgagaaggagatacttagacatttctaccctgaagaactaatgacagcaatcattggaaatactgattatgactggaaacagtttgaacagaattcaaagtatgagcaaggataccaaaaatcacatcctactatacagttgttttggaaggctttccacaaactaaccttggatgaaaagaaaaaattcctctttttccttacaggacgtgataggctgcatgcaagaggcatacagaaaatggaaatagtatttcgctgtcctgaaactttcagtgaaagagatcacccaacatcaataacttgtcataatattctctccctccctaagtattctacaatggaaagaatggaggaagcacttcaagtagccatcaacaacaacagaggatttgtctcacccatgctcacacagtcataatcacctctgagagactcagggtgggctttctcacacttggatccttctgttcttccttacacctaaataatacaagagattaatgaatagtggttagaagtagttgagggagagattgggggaatggggagatgatgatgatggtcaaagggtgcaaaatctcacacaagactgaggcaggagaatagggtacagagatagggatctaaggatgacttggacacactccctggcactgaagagtctgaacactggcctgtgattggtccattccaggaccttcatttgcataaggtatcaaaccacatcagcctctgattggccatgggccagacctgcactctggccaatgattggttcattccaggacattcatttgcataaggagtcaaaccacaccagtcttggattggctgtgagccaattcacctcagtctctaattggctgtgagtcagtctttcatttacatagggtgtaaccatcaagaaacctctacagggtacttaagccccagaagattttgctaccagggctcttgagccacttgctctagcccactcccaccctgtggaatgtactttcacttttgctgcttcactgccttgtgctccaataaatccactccttcaccaccca

SEQ ID NO: 847 - protein, 375 aa, Homo sapiens
MQMSEKKAYMLMHETILQKKDEFPPSPRFILRVRRSRLVKDALRQLSQAEATDFCKVLVVEFINEICPESGGVSSEFFHCMFEEMTKPEYGMFMYPEMGSCMWFPAKPKPEKKRYFLFGMLCGLSLFNLNVANLPFPLALYKKLLDQKPSLEDLKELSPRLGKSLQEVLDDAADDIGDALCIRFSIHWDQNDVDLIPNGISIPVDQTNKRDYVSKYIDYIFNVSVKAVYEEFQRGFYRVCEKEILRHFYPEELMTAIIGNTDYDWKQFEQNSKYEQGYQKSHPTIQLFWKAFHKLTLDEKKKFLFFLTGRDRLHRIQKMEIVFRCPETFSDHPTSITCHNILSLPKYSTMERMEEALQVAINNNRGFVSPMLTQS

SEQ ID NO: 848 - DNA, 61571 bp, Mus musculus
  misc_feature (1)...(61571): n = A,T,C or G
cttgtgatgctacaacctcagctactccagctacatccctctggcatgcactatgaagctggcagttctacttactaaagtagtttgaggctcacagcaaaactgagtagaaaatgcttcccaccccgtccctgatgccatgtcttacaccagagtgcatcctctgagataactgctgcagcagcatcgtcacacgacaccttatacttggctcttgattttggcagatatgtaatgacacatgcccaccattgtggtactatagagaatatcttcactgccctagaagtccccatgttctacttgtccatctctctcttccttccgtgagcccactgatctttgtctccatcgttttctttccagaatgttgtgggtttggattcctacagtatgtggccttttagattggtttacctcaactaataaagtggttaccctgtgtgttttaatggtttaataacaggcacacttctctttaatagtactattctattgtcaactcacctgctaaaggccaccttggtttcacctgaattatggcagtcatgagtatagctgctgtaaacatttgtctatgtgtttgtacctcataaagaactggggtgctattgcttggtcttgtaggatgaggagtccttgctttttagggtgctgatgggttctatcaaagtgcctgtaccatttagcatccccagcaatgagtgtgaggccccactgctccatattcgtgccagcatttgtttgaggctttagccattctagtgagttatgtcactgttgttttaaatttcctgatgataaagaatgttgaacatatttccttatgctatttgctgcctctatgtcttcggtgagatttcaagatctgttttattctttttctagtcaagtcattcattttcttgttgagtttaaagtgttctttatatatgttggagctattcccatttttaaaaaatatgtatttattttatgtatatgagtacacttgtcactgtcttcagacacaccagaagagtgcattggatccctattacagatggctgtgagccaccatgtggttgctgggaattggactcctctggaagagcagtcagtgctcttaaccactgagccatctctccagcctgctgtttctatttttgtatttattactggtcttagtgcctaaataagggatttgtagagacctcagcatagctagggacataaaaacaaaacttaaaaaattgcttcctgccaggcatggtggcacacgcctttaatcccagcacttgggaggcagaggcaggcgaatttctgagttcaaggccagcctggtctacaaagtgagttccaggacagccagggctatacagaaaaaccctgtcttgaaagaaacaaaacaaaaacaaaacccaaaaaaaacaaaaacaaaaaaaaaattccttccttttttgtgagagaggtggagaaaatattttctacctggaaaagggaaagaatggttgcttttctaggtagtttgatccagaaagatctttatctcttatcaacagcctggcctccatgtttctcagctgttgataaagagtggaagctgccactcagctctgtgtccccaccccctctatggttccactaggaatccaagtcgaacatcaaacttgtcagcaactcacctcaacttccagacagctactctggcatggaatattctattcaatccagttgctaatgctattgaagaaaggcatgccctgcagtgggtaaggaggctgtatattatactgcctggcccccctgctctcccaacctttcacagtgcatcgataggttcatgttacaggactcattttcattttatgtctttttatttacacaccaattcttttgcaagtaattttaattctccgttttatgagagaggggctctgtgtctgagcattcctacataaaagaaagaaaatgattgtttttaatgcagatttgaaagaaatataatggatttcagctacaacaatttctccccatttagaagagatgaacacctagttagatgaacaatgtcattcctcctataatcggaatacatcctgtttccatgacaacctgtacttaccagattgcctggtaaaagaagtattttgattctgtctttgataaaggacttgaccacactcttcatttcgacaattcagttctattcagggctttttttccccctcctttaacatggggcgcttttgagaggtagggcctgaagcccattttagaggtaaatttccttcagaatgaaaggaaaggcctccctagccaaatgctgatgaacatagaaaacgaggccactgccatgggtcgggtcatagtcattttctggtatcttcctattaaattaagtcaacagccacgatgctccaacttattaaggcgctgtttgatctgcagaggaacgattccactgttcatttccatccggactttctaaacaggaggggcctctctccactgctcatttatatcttgcctttatggatggcctgtgtcctcttacagctaaatcctgtttcttgcaaggagagtactgcaatgattttctctcaaaatgaaaaatagggaattatttgcatcattaactatgctttttcaaaatttgaaaaataatggcactacattttattgacaagattatgtttaatgtaacataaaatatttaagttcaatatgttaagaaaacatgacccttagacattttaggaatggtaggaaatagagcaaaaatgtgggagaattcagtctagttttgagggttcaagtgagtttgggaagaacaaagtgattctttggtatcccggaatcattgtcaatgatagcaactatttatagtctgaaacaatacaaagtcaccagagggccaccaggtatctcattattctacctcatgttttgtaacaggcccctgtgtcaataggtacatagtattagcctctgagagtgagttattgaccaaaactactaagaaactttgagagtaatgctacagcatacaatgtaacagtatgtatatgctgtgtaacaaatgaaagtaaaagcaaatgagacatcatcaggccctctgtttctatcattcctactgatatttgtcctagttcaggggacttaataactatagagattcctcctgatgagggtctgacagcatcttcaatgttcctaattaacatttagccatttagcaaggaagttactgtcctgaaaatgctacacaaatctttctttctcactccccccccccccttctgtgtgacttcattttaaatcctactttatttttctttacttcttgactgcctatcagttgggtaatgaattcccaacttttagtgtacttaactctttagaaataaatgactggtctggggagatggcccattaggttaagttcttaacacagaagtataagtttcaaatcctcagcacctgtataaaaatctggccacagaggtgtgatcctacttctgaggaggctgagatgggtccctggatctcactggcctcccagcctagctgaataagtaagaccaggttcagtgagagaccctatctcaaagttaagtggactggactgagaaaggcacctgttgacctgtagcctgttctttcacacatacttttaaaatatgcacacaagacacaatacatacacacacatcacattgccactgaaaggggaaaaaagagatatatgagatatgttatttaacagaatagttctacaggtgcttttgtgaaggcatctttctcctgcagggggtcactcttcaggcatttgccaagtttacattccataaacattactttagtatttttttttctttagctcttaagaggcaagctctcacctcaggggcttcagctaactgaggctttgagaaacatgaattagctggtcatttactgatatgttcctgatatgtacgcagtcacagcaaaggccctttccttacttggagttcccaaggctaggcatgtgaccattatttttgaaattgtcagggctctgattttcaaacaacaacaaatgcagagttaattcccagcatccctttcgcctgagcaagtgtccgagggttctttgcgcccctggttggcagtgctccacatctctttgtatctcacacagtggaacttttgcctaccctcaggggacagttagagattgttaatggtggaaaggaaaagtctcaggcagttctgaggagatgtaagcaccacagtgtgagtaggccaatgggttaggaaatctgattctcccatgagccagacagatgctgagaactggactgtgggagtggggagggaccagacctgtccccaggtctaagctgttaagtctaagcttagctacatggagggaataggagcaggcttgcttggatcacatatattttcaaatatattcaatataaatttacatatttccaagaatatgtaaatagaggtatgtttacgtgcctctatttatatacacacacacgtgtatatattcacatatatttggaaatagacttccaactgcatttgggaaggcaggaggaggtgtggaagattcagccactagactggagaattcagacttcatcctatgagaggcagccactggagccttgaacaaagaaggagtaaatcaaaggacacagtagggccgacatgcggtccatggacaagaggaggagtggacacaggaagcaaggcagtccacaggactcgggtacccttgtcagttccttaccaaatcttgctccttaccaatccagcaggtggcagacctctgaagggtgctgcaacagagacatgggaccagatattccagtgtgtatgatggagtgcagggggtgtactgtagattcacaaagcttgtgacatagactctgaaagaaataatcaggaggggtcatttgacattcaagtggaagcttggagcaagagacagagccagctatgaggagcagagggactcatttctttattggcccgtcaataaagaaacagctacacggttgccctgtggccctggagaagttatgaggacaggaaaagaggcagctctgggatggacaggcacaaggaacttaggtcctgttggctgccagaaagagtgtagcttgtcctgagagtaacaagaagtctgaagggccgtagagcatggtagagtcagtgcttggctactgtgtcagctgtttagaagataggtttgaagaaagggagactggctaagagagtgtgttcccatggtgtcctttgctgagactcaagcaatgaggagcaggggtaggtggtattctcatgaaagaaggaagaccaactcagaaggtatggggaagacaggacaaggcccacgtgggcaagtgggtggctatggagttcaggagccgttagatcctgggtcagtaacactggttgaacttttactatgtgcaacgtataaaagagggtagtcctaccaaaggcagattatctcaccatctccttgtcttgggtgaggaatttggggctcaacaaatttattgtccgtggattgcagttaaagcttagttcagactcaggcaaagcaactgctgttaaaacacacactgcagtctcctctcaccctactggagtcccagactagtttcatgttccccctccaagccatggctttaggactgagaaactgtaaacacttgctttgctggaggctctatgcaggtctgtgccccaggcttgtgtctgaggtctgaggtctgccacctagtggccacagacatccttttttttctttgtaattcctagggcttatttgtagcaccacaaactgtaaacaggaaactgtaagtctcagagaaggagcccagcaatgtaaacagcatattgcccgtgagggcctgcacccatctgacaattgcacaagtgagtacagatctagccatatacttacatgcaccctggtcactgcgacacaggtgtctcctgtctgtatagttcagtggtgatctcaagagcctggggtggtggcatttgcatagcagatctgcaaccattcactggatggaatgttggcagcatctttgtgattgcccagtcatgtgcgcattttctggattaatgatggccagcgggatccggactggcccgtttctcacctatggaaccttggcacatgtgacgcagactttctggccttagagactcaaagtctaactgctaagatctactctgtgctgttttgtatgtagtattgccactatatggacacatggtagaactgtctcctttaaaacaaaacaaaacaaaataaaaacaaacaagcaaacaaaaaacaagccaccaccatcaccaaaacacaagaaaccaccagacaattacacccatgttctggctttaaagtataaggtttgctcccctttgctgtgggagtgcataaataaagggaatgtccctagctttccctgagctgtgtatatgcacaatctttccacacatccttcattgtttaaaggaggaaactgagttagcatccttgtcttctctaccaaatccaacattctactgtttctgtgcctcccagggagccggatatgagtggaagagagaggaccacttgttactaggcaaccagcacccacctcacccatgttaccatggtgatgatgaaagttgggctgatgggattaccagctcctgctaattgcacatgagcactcaaggtctctgtctctttcttgcttgctcactggctttgactctcatgttcctctaggcacgagagagagagagagagagagagagagagagagagagagagcgcttctctctcatctatggttctcctggggcatccctggtacactaatggaaagcaactggaaatggagcctggctgtgcctctgagtagctgtgtgaccctgggcaagttacccagcttctctgggcctccatttcctcatttgggaaatgaaggggttggaatgctgatccccttcgaaggttctttccagctctcaaatcctttgatgcctagggagcatgtcaggggaacagaccacactgttaccaggcaaccagcaggcaccctgcccaagttgccttggtgactggatactggcggggaggggagtcattgctgcagctaattgcttaattatttatgagtgcctcaagtcctttctgttgtttttgttgcaaggggctgtggggtcaccttttcctctctcctgccaccccaaggcatctgcattgtgtgttatgcaatgagagagcaccttggcctggacctcaagagacccacggtctagttctgcctttgccatgtcctagagcagtgtcctcaggtaagtcacctcacctctctgggcctccagcttcctttctcatagccttgtgtttgtttcgggaacacaaagtgccctgtctacctggaggctctggctcctgccatctacttgcaaagtggggaatacaagtgaaataatgttcctaatgtgtttttactgaagtataattttgaagcataatgaggaccaacatgtgtttggtgggaaggggacagaagtgctcagcgtcttctcccttctcccagcgtccttaaccatgtcacctgaactcttggttagcctgaggttatttatatgttactcactgtgtgtcaccaacttcccaaatggacctcaggccttcacagtataagatgcagacatgcagtcaggccatcgaaatagaaacagaaatgtgagaatacaagagccccttcttcactgatgaatatccgtgtcacaatccggcagcacatgtaattttgagggccttagaagccaaagcgaatgggtggtatgtaatgcagaaaaaactgtcaggctccttctggtcctaagtcctagaaggagtttattatgtgactttgtattttatagaaactgctgatagaagtgtaaagctagccctttctggctgagtgattattacagggtatgaggaagagtcagactcttgacagtttgactagtcgtgatcattaggaagcagccatcctctttacggatgctttagaatttcatacagataaatgtcactgagtcctcagagtcaggcgctatttatagatcacatacaaggatatgtgcttatcttgtacaacttggcaacgtggaccagagtcttaaacgcaggcagctgttctcatccaccaaactcactctgaagtgagcctgaacggatgaggatgtaattatgaagatgcccagggcgggtttactcagagaagagaatagctaggaagagcagatgttgggggccattgctttacatagtgagtcctgttgacaccctgggtgaggtaggtctgtgtgtcttgatatggaagatgttcagagacaataatgccaaagaaggaaacaaagtgcagcattgatgttaaattcgtctgtttcttctataaaaagatttggagatacagtttataagttgagatgtatgtttgtatgcacacatgtggcaacagtttcctctgggaggtagattgattgtcttgggagaaggtgagaccatttatgacttatttctactctctggacctttattttttgttcagatgtgcacaacagtctagcggtggaaatcctcaactcaagagtcttaacacaccacttcaaatcccagctttgccgtgtactaatcatgtgaacttggggttaacctacctattctgtcccttatctataagataggtggataatatcttccacatcatattatttaaggggtatacaagctaatagggtaaagctctctgaaaggctttagcgatgtcataggtgtgcttttttttgaaaaggtaaagaaagattaagcaacaaatgcatatgaccaggtggaccctggtatctcagggatggaagacttgctcagaacctggttacattccaagaaggggtcacaaagcacgcagactgttttgttgctattttatcttgcctgggctagcttgggaggacacctgccctgggttcaggacaagctatcaagaagccataaaacccctatcctccagctattctctctcaagcagaaagcaaaataaacactggtcagctagaaaatggacgagttgaccaacagcacgtccccagctgctggaggccgggaacatacagcatgcctccagtcctttgcctttctcctgaagacagagttaactgaggcctgggaggaggcttgcctgagggttccccttactgtgaacgcagcggtctctggttacattgacttcctggattttcacaagtgtaggctatgagtgcagaattgcagctccctcttgcttcctctgctgggcttggaggcagagctggacaactttggccgactctgatgattctcttgaaagctgggcattctgtgggcacatcgtggctccagagatagaaggaaagtaacttcgttcccttatgctacactgttaggtaactttatcctctcctctaggcgtgcacagcttcagtacaactccatggcctctgttagtgtggcctttagtaccttggttctacagtctcagacattggagtctctttatctgttcggccattggtcctctctccatctatctgtcacatccaactgtgcttccatctgcccttccatccctctgtccctcctccagccatctgccagccttcccatccagccttctgattgctggtatgtcaatccacctctccttcctctctcgccctgttggactttgagactccatccgcactgatccattggccggaccttccatctgtccttggccccagctgcaggggcttgccgggtgactgttcctctgcccttctccctcgggtcctctgctcccggcgcgggcccggcctttgttggactggggcagggcggaggccggtcggggtggggcgcggggcggggcggggcggggcggggctggcgccgggagactactaggcgctccggtccgcttgtccgcggcctggccggcggagaacatggcgctgcccccggctgccgcaccccccggggctaacgagcctctcgacaaggctctgtccgcgttgccgccggagccgggcggtgtcccgctgcactcgccctggaccttctggctggacaggtgagggccgcgccccgccgctttgtctcggccgcgtcctcgccccacgcgcgccgctgcccggggggggggggagctcgcgcggacgcagcagagttccgcgcgtccccgatagcgcccagcccgctgggcagggagtcccggctggtctgggaaggctgccccgcgtatccctggggtgctaggcttgctcgggacgtgacctttgcggtgacagcagtcagaaaaatcggccggcggcagggaagctctgggacctagctgcgggcatctgcacacccagccccggcaaggggtctggagtaagctggggcttctgtgataccggacaactttgtggggacagcttcggtgccctagcctctgtgaggtctcagatccctctccaaaatagaaacttctcacaggatcctgtatctctatcctgccttgtttttcatcacaatgctcaatgctaccgcgtgcttgcagtgtgaacttatttccagtttgctatcagttcctccatcgcttgccctgagcgagattcaccgagtaggggctggctttggctacatgcagagtcccagaacctagaactgtgcctttgtggtagtagaacgactagttttgttgtgtggatagatgtgtggatatccagccctttcttaacgactgtcatctgtgccggtagtgataaatcaagttgtttccacaagtgtgtgggaatcttgatgaaactgtctagcatggtttaagagttaggaggaaatgtatgtgacagtttccggagagacttagttttatactccacacggatgttttgttttgtttttagctttgcacccatgcctgcagatttgtttgttttttaaaactgatattcatgttttaagcgaagacagttcttttccggacagattagcccttacctctaagaatttacacccggagccagtttgtttcctggagacacagagaagttggggatgggagagatttgcaaaaacattttcactttcattctgagtttccagaatttggctgtcatagcaggagtggctttgggttttggcagtcactagcacagtgaagtcatgactttgttttcaaaggtatcctctaactgtgaagttggtacctggaatatgttttcaaggtatacaaccgggcttgtggttcaatctgtgggtgtgctgtccagaaaagactggatggagagagctccactttcagtggattaaactgtagtagatttagaacagcatattttagaactactctaaggtgtatgtccatgtatcctgtatgttcacgagtgctttacgaaaacatgtaatgtcttctaacgtaagatatgtaggctggcagtgtagttcagtggtagagcacatgtgttttaggaaacagaccctgggttcaattctcagccccgggcagagggaggacagccttaagaataggtcactttagtaaaagtacaaatgatgtcttttttacattgatttgcattctttcccccctgctaagacatcaataaatgaaatgtgttacttctgtagtgtctaaacctttaatagaaatgctggatccatttagaaattataactagtttcaacattgtgcctgatccatcatctcgtaatttttattgaactctatgtttcttctctgagagtctacagtatttatttatagaggctctacccaccctcaggcacacttgggaagaacacctcaggttctgcaagttaacttggaatttcccccagagaaggaacactgcagagagtagtggtgttcttatgagacctgcagggcgtccttccctcaggctggaagtccacggcttccttccagctcctgtctcaggcagtcctaccttacagccgactggatgctgatgctgctgctgctgctgctgctgctgctgctgctgctgctgctgctgctgctgctgggggggggaggaagaggaggaggaggaagaggaggaggagcagcagcaacagcatcagcaccaccaccaccaccactaccttgcccagcctcacccagctgcactccagtgttaagtgaacacaactgtggtatttgctgcccagggctattttgagtgatggatgtaaagcgggaacctggtgtgaagtaagagcttaatgcatttcaactgatggggcagaggagcaagctgggttggtaaactgctgtgcacacatgaggatctgcattcctccagccttttcccagggcccaagtaaaaggccaggcctagtgatgtagcaagtactcacgccgtacttatgatctcagtactgggaaggcagagacaggtggctcgctcacacccaccggctacccagcctatccttatttggcctatgctgcagcctggtaagagaggaccaaagcagatgggtgtggggggcattcctgaggaaaagatacctgaggttgacccctaggcctctactacatcactgatctgaattcaagtagtaggaagccagcatcctaagttcatttccctatcaaacagattggagaatcctccagaaagcatttgcattttaagtagtcaactggaaagccaaaccttacttgcctgaagtcagtgggctactgaagtcagtgggttaagtcaatgggaagtacgtgggtcactgcacaggacgaaggaacttcttcctcttagcttggcatctaaactctgtttggttcttgccttccattcccacgagtgtctctgcatgtttccaggtcattgtgtggtgacctccggccctctgcttctcccaggacctagcccttggggcctgtcccacacaggactgccaccctgacacaggaaggcttgtagctccagctgaagcaggaggtgacagaacccacaggcagatagatcctgccgcctctgcctgccctgcatgcaccatgccaccttttcggctgccctcacagcttccttagtgtcttctgagcttagatacgagtagttaacagttaatctctctctgtcctagtttctcagcgacccccccccccccgaaatccttgagcagtctgtagctacccttgcccagagcaacctgaagaataactggagactatactctgcagctgttactggtggtctttatctagaacgtgagctctgaccatggttactcacttctcagctcctagatctggtgtggcgctcatggtggagtctaagtcttcccctagcaaccgcactctcctgtggtgactcacttcactcttgtacacatctgtcagtctcccttctctgccctctcaagtctaggcacgtatagccaagagccaggaggtcggcagtttgggtgcttttctgattactccaaaatggaaccgatttctctccagggtcttccttttctgctgacccatgttgttccccaccagatcaccagcatctcaaagtaatatttctctctgatccttgcatcatctttcctaagtaccctgctttgtctatttctatacttttgcaggtttagtgacgcttagcaaactcactaaaatctaagacatcaccacctctacatgtgcctctcccggctctttctgctggccctgggcagctctagcaccaggatcatcgaagattgcctaggtatctgcctggtacccagactcctccctctccaaagcataccctgtctgggaggaaatcttctgcacacagtgcacatatacccaatctgcccgtcatggcctctctcttaccatgcagctgtttacttaatgcctctgctgagctgggtgtgcgaagattaagtcatgttctagatctctacctgaacttctaccaaagaggccatcagtggtgaggggtgaggggtgtggggtgtgtgtgtgtatgtgtgtgtgtgtgtgtgtgtttagatatcaatcatagcgggttttgtttcattttgtttttcaagacaaggtcttatgtactccaggctagccttgaactcactatcttcctgcctaaccctctggagcgctggagtttcaggcatgcgccaccacagctggctttagagccatgtttcaaaactaacaagcaaacaaaagtgcttcagtttttgtttgctttgtttttaaggaaacccttatgctcacaggttatagtaacaatgtatatttgctgtgtcaagtttgagactttccttttgacttggcaaaccattgccaattccaagtttctcttccctagtagcagcaaacttgtaatgcctgtcttgggtggattagggactgcactggtagtgaactttgtctcctgagctcatgcttttcgggatgcgggatgactcatagtctaccctgaggacctggctaactcattcttccttgggcatgaagcttacagcctgttactctttggtttctctacagcatttctttgtaagcaagagttctattacagatagttgattttattttattttatttatttatttatttatttatttatttatttattagcttactcttgatgctgagatgctaaagtcttcaggtctgtgacctaagggtgtgcctgtcacatagcaagcattttgtatttatgtgtatgagtgtttgacttacatgtatgtctgtagaccacatgcatgtctgatgcctacagggaccagaagaggttatcagatcacctcatattggagttacagacagttataagctgcaatgtggatgctgggaatcgaacttcggtcctctgcaagagcaaccaggactcttaactaccgagctcctaacttctgttttgggccacaaaaattgaccattacctatatctgccaccaattccaacttgtctagcttagccgcaccaagtttgtgtgtctgaaagtatagttctctgactcttacatcagaatcaccagcctgtgctataccagcttgcaccttgcccaggacctgttcagtaagacctctgggtacagaggatgaatgcgcctcgtcacgatgtgccttgtatccgaactggaatgttactatgcatgcattgatcctatgagctgaacacgtcagagctcagttacttagaatcagagaatagagagcctggccatgaccacagtgggcttctctccagcaggccacctcgcacaccgcgtgctttgggagcatgggtgagaatcccaaggcaaggagttctgaggaatccaccttacaggtgtgatgcatcctgatgcagtctctcggtgtggtccgtacccgtacatctggtacacagaggtggttccggccttgcgaaaggagaccccacagcatctttcttcattgagtggcttgagtagatgaggtcagcagaagacactggaagaggcatagtctgatgttgagactcctcctctcccagtcttcctttatatttctgcaaactctcttgagtggctgatggttttatttctgtaaaaggttcagtattgatctgtttgcagttagtacccttccctgaggggatggttgcacagcctgtccacatgtgaccagtgcttcttgtagagtggcccagggccttcagtatgtgtattctgaaaagttactaatccttagttggtagtacgaactcaacaacaacaacaacaaacaacaaaacaagacttttttgtttgtttatttgtttgtttgtttatttgagatagctgaatagccctgtctgtctgtctgtcctggagctcactcaggctgccctcaaacactgtctttctctgcctcctgagtgcttggaaacccaaggcagcagatagtgtggtgtgaggatacttcaggagccagtctgccttagtgggatctgtgaacttgtgttgttcctctccaccccacttctggccctaaagagattaattgtaagacaagatgaaaagagccccacagctactgaagaacaggaagggcaatgttgggaagcagggagaaaccagagccagataaacatgtagagtgctcggtaatgaggccagcttctgcagatgtattgctgactgtcagcaccaagctcagcccccttttgtatgcgactctcaaacaggaaactggtgtagcctcaagccacagatctatctaaaagtgattaaaatgaaatcatctttaatggagtgaatgatgtacaaggggcatgcttaatcatggtactgggcctgtgtgtgttttccctctgacagctgatgtaaattgctcgggaaggctggattcggcagatacatccctggctttgaagtctttccccttcagatttgttctcttggctaaaatgaaattgtctcctctaggacatttgactattgtcatcattcgtgtctttcacaaagtgtatgtgtactgggcatataattggagacattgtactatacaaaccaaaaaaatgcctttccccatcttaccctgttaatacgacatactatgtactgtgttaatatgactcctgtgtattaaacagtgagccaagtgctatataaactcaagcataaggtcctcacgacactgcaacggatgtcccagaaacattttatagatgaaaacgttgaggtcacctagcagtgcaggggagaagcagaattgaaataaagcactgggtgaccatacagtggccaccaagacccctaccagtgcttccctggggatagaagcagtgaatgggacatcattctcttgtgtcatatcatgtagtagtatagacttagaggtaggctctcaatttcagccacttggggaaactgaggtctgctttcatggaaggcaattcagccaaggacacccccccccccccacacacacacacacattaaactttgcagagatagctgaggagatggctcactgggtaaaatagttgctgtgtgagcatgaggttgtgagtttgaatccccagaactactctattccagctgcaagagcatgctctatgatcccatcccagcacccccagacaggaggcaaagacagagaatttccagaaacgtccaggccagctcacctcaaagtggaaggtgagggcaacacctgggcttttcctaagcctgactcttaggacactgtacatttgagtccatattcatgtatgttcatgtgattgtgtgcacatgtgtgagcgcgcgcgtgcacacacatacacacacacacacatggagtggggggacaggcagacagacagacagtgtttttaatgcagataataaaaagagccctgcctgaaacctcctgtccaagcccctggacaggaccacccttcacagtcagtactgccgttgccttggtgatgtctttgcgcggcgttgagggcgctgttagaacagtggcttttacattttgcttagatgctcctcctcactggactttaccatagaggggttggctttccttgtggtgattttattcagatgatacagggtcatcatgactaggagaaggattagaaaccccagggacttaacacgtgtgggacctagggactgaacctgcctctaacaagctcccaggggctgctgcctgtggactgatgacactttaagtgaccaacgtgcaggtagagtgtgggaaacctttcctccgcttctgctttgtgggaagtctccccaggtatctacgtggctgggttgtggtgccgtgggtaagatcgtttaggtggaattgactccaaggtctgcctgcggtggccatgtctttaaaggtgcaccgcatggagaatgttcacctggaatggccaggttgaggattgcaaggtgtggcgtttgggtctgtgctgcatgtggggtgggttccttcaagggccacccctgacagaagatgtcagccaactgtggcgagtctcagctctgccactgccaactgtgtgtcagttagtgagttcctgtaccaacccagctttagtgatcttatctgccaagtggaggcggaacatggcatgtacacgtgcagaaggcatgtaatcgcttcagtcactggcccacagggtctcctaaaacaaagagggcaacgtgccctccctcagacgtttgagaagtcagtggagagagtgtgttcttgtgaagtgtctcgggaatctgttttaatgggtaaatgtggtttgtaaatattaaaattttgtactcacgtggtgcctggaaatggtttgagtagaacagttggtctagtgttactagattcccaccatcctcctgactctccaaatgagaatttctcaccaattttaaaaagagaatcttaggatccattctgtattatcctgttaaagacacaatctaaagaaggagcttagaattcagtcctaaatgacatcaacagctctccaacatcgttaccttaggcattgatttgccagggcccagatcccttctgcattaacgggtggatccgtaattaactaaagagacagccttcaccaaggctgcagcctatagctaggagagcctagtgggtgtcctctctgtaggtgaacacaagcagctctcagctgtttgtgtgggcttttctgtttttggctagtgtgtccatactgagggctttctcatctgtgtctgtctgtctgtctgcagtcagatgcatttagatgcactgtgtaagagaaacatctaccagcactggttcatgtgtccaggcagcaatgcaataggtaaggctgtttctagagaggggaagcagagggtgaggctggtggcagaacggggcttgtcttggcagggattggttacagagagtaattagtcttcatagctttcctgctcctgtccctcagtggcctttgttgggtatgctggcttcctcctaggccgacccctcagcattgatctagaatgttcctcctccacagctatgctacttgtattgctaggcaccttgccttgcctgcctctgtctcagagtctcacacagtgtagcaaaagagggagaatgtgtaacaagcaggtaatataggagcaggagggagggatttgccataatatctgctctgtgggtctccgtgctgactgattttatcaagagatggacagtagtcctgggaaacaggaaggcaatgacaccagaggtggcagaatccaggtaagtgtaggttatgttatcagcctggcagaaatgctttgagaatcagagctaatacctactcaaaaaagggaggttgagattacattataactattaagtagagggtagactaggctagaacaattcgaaatctagactctggcccaccagggacatttatctttccactgctgtgttctcagctccagtacactatgttgcggggagggtcatgtatgcagggaagagagaagcagaagacaggcctgatcttaggttgcagaatggctcacatctgtggtcctctgggagtggtcacagttgcatgtgtgctcccttgtcagctttctttcccatatcttcttttcagggaaaataaatccattccaaactttgtttctttgcctccaggagcacagggagccagggagattgggggtgggggtggggtacggggaatgcgatccagaaagcagagatgtcatgtgtagaacatattctccaagggctttgcctagagtcatcatcactgtgtcctcaactccaaaagaggtagaaatgaatgtttgtagtgtgataaatgataaatcccccaaggctctttcatgtctataccggagctctccacactatggattttgttttgtagaagcttctgtattgtggagcgttatggaggttcacctgctactcgaagcaacacaaaatgccttccaatatttgcctttgatcatctgggtcactgccattccagtggcatccaggtctgcagacagagggctctgactagacgtctctatagaaaatgagatctctggtactgataaagtaaaaatatacaataaataaacatatatatatatatatgtatatatatatatatatgtatatatatgtgtgtgtgtgtgtgtatacatgtatatgttgcataaatggttttagtaacactgtctcttgtttcaaatctattctatatctttgcccttcagttacttatgtggcagcagccttagtctgcattgccttctcagaaagcagccacagtcctatagtcccaactactcaggaggctgaggcagaagggtttcaagttcaaggccagcatggacaacataatgagaccctatctcaaaatactaaattaaatgctaaggaggtagccaagttgcctagtgtgtgtgaggtctgtgattaaccctcagtaatgaagaaaaaacatcacagtacaccagtaacttgaatcagcaaatccagtgcacactggcctgtttacaaggcaggccacttgaaaaccttggcttgtttgcccttctaaaatgggctctgcggctgtgtcccaatcttgcttgttaggaaacctgaagttcgggatgaggttgagacatagcagtgtgttttagtgactaccaaatcaagtttggtgcatagaataccaaacctgcactgaccagccaagccaacacagacctgacaacattgctgtactggtctgcaagacagatgtttataaaaccacccagcagctagatgagccctcagaaatcagaatcaacctctttcaggaagtaactgggaaactgtctactttgcggtccctgggatcaagcgccatgacctgatgtaacctgggggagaaagggcttacttttgcttcgggctcctgagaactatggatctctcacttcattgtggcagggaaagacatggcatggcagcaggagtaagaagctggctgatcacatttcgtctgcacacaaggaacagagaacagaaagaggaaggaggctgtaagccttcatagcccaccctagtaacttacttctatccagcaaggctctacttcctaaagagtccataatctcccccgaagcagtgttgccacttaggtacggcagacgagttgtttctcattctaactaccacagcgagtttctgcagagcctgtcacttccttcctagccttgatgctgttagcctatcagaggctggctgtggccaagcatgttcctgtcgggtgttgtgaggactttccctaccctgcttcattggaaagactatttaatccaagtcttctaatccccacagactcgctcttgaattaataataagattaagctaaagtggtagccttgttgagaacacaccaagattctaccgtaatgtttcctgcagaaatggcagggaatggggctggggagatggctcagtggctgtgcaagcatgaagactggatcctcaacctgtgtggcagccatacctggtgtgcttataacccccccccccttcccaccccccccccccacagtggggaactgagacaggagaaccctggagatctactgcagagctactgtgtccctaacagcaaactccaggttcagtgaaagatattaaaggccctgtttctgaaagataaataaatttaaaagtgggcagttatagagaaagatacttgacaccagcttctggcctccaggtatgcatatatgaatgaacatagcacacaggcacacattcacacacatggacacactcacatacatataccggcacaaacacacacatcacatacaattagaaaaggtgggggtttttggttgttgttgttttgtatttttaggaatacaagtgtcggctgtagagaagtgcttgtcgtgtgagcatggagacttagtgctggtcccagccctcagtaaagagccaggtgtggtgagcatgcctacaatcccagagcagcaccacaggactcaggagggtcccaggcacttagagatcagacagcccagtcagttggtgagttgcaggtttagtgagagaccctgtcttccaaatgatggtagagagatgtcctggtacacacccgaacacacatgtgcacactacagaaatgaaaatgtggaactgggtgagctcaatgtggcacacatgcttagtttatgtgaggccaggtttagtaattgctgagacttgactgggtggctctgcagtatggcataaggagagactgtcacaggcacggcatctggttttgttaagtgttttttattcccctgggaatgttgccatgcctctctgagccccggtgtgctcagtgtaaaatggttacaagtaccgcacaggctacaggggcccctgcaggactctggtcactcaacagcagctggagccctgctcctctcactggctgccagactccgctgccttccactggtgagtgtagcttagttacctccttccagacgctcctcctgacctctggagacccagtatcttcaaacacttggacactgaaacagagaccttaagtgactttgtacatttgtctcctaccccagaatgtcacaaaccagactagaatcgggacccttaaaaaaaaccttggagaccaagtgctcactagtcacttttgaaagttaaatgggaaccagcacctgaaagttggctttgtgtaatttgtgatgataatggactgagtgaacacgttaaacacgtactctaaggcatcctgaattgaagagtagctttaaaaatcagtgaaaacttcaaatatgtaattttattctacagattaaaaagctgcaaaattcatcccctaccttaggctctggcctgcccgcttcctgagtgcagttaggggtggagtcctgtctccagtgcttgtaggatccaggaatatatttgctcggagtatgtggtggagcagttagctcgattgtacgaagaaagagaaattagttggattaagtgccagttgattgtcatgtaaaagcaatagacttctaaacagttcgtgtcaaataaacagaaacagagagatgagtacttcttgtcttcttttctaatgactttattatctacaagtgcactaacttgctttatatagagtatttacctgtgtccaagtagagggcttggacagccacagtccagaccctcggtgttgcctggtgggtttctgtgggtccaggcagctgttgttggtccctatgtattcctcactgctgtttactcgggtcggcttagatatgtaatagctggcacggatgtcaccagatgtcacatctgtggttgtgcttttgcttttgaaacatgaaggccataaaatttgcaaacagctaggagatagatataaaaccatgacttatttattagaacttacctgtctagtgggtgacaagacatctttgccctcggactagtccgaacttgcgtccttactgacctctaaacaagagagctgtattccaaataattttgatattttgatttgtgtatgtgtgtgtgatggatggatgtgtatgccaaggtgcaagcccacgcgtgaaggccagaggttgatattatgtatctccctctattgttttctaccttagtttgagtcagggtggtctctcactgaacctggggtttgccatttcagcaagatgactgaccagcaagctcctggcatccacctatctcccctcctctagcactggggttatagatgtctgtcactgtccctggctttcccatggatgctgagcgagggtctgaacgctggtcctctgcttaccaagcaagcccttcccccactgagccatctccccagctctgatgttttcattggtccgtggttccagaaagcaggtggtggagccctgtccccagggcctcggctgtctcattgcctcgacttcagagatggtttggggttttctctgcatctttaaggtgtggtagagaacaactcaccagaaagtgttccccgatgataacctctgggactctcagggtcattgcggtcagtggctggtgaagggtgctttttcatacattctagatcccagtgcatcagctgagcacagggtgcttcccttcttagcaagtccttgattcctcgcccgcagccagatatgggcctctgagcattgcttgtgtggtgtcattaaacctgctactgacaaggaccacagtgcctgtgagcacagactgctaagtaggcaggaaggaggagacacagtagtgctgatgggatgggggtggaggctctgaatacctctagatctgaacaaacacctatagatccacacagccccatcccaggaactgtacttggaaagccagtcaaaatgtgatcttttttttttccccccagagaataaacctgtagtgtgttgccatctagtggaacatatagaaagtagagattaatgtattctgcccatacaatttacaagagctcaggggaagccactgaaagtattaaggcaagaaatttaggggggaaaccaaggctgactcttaataatggtctctgaagtagctgaatggtcctctgcttccatggggagtgtggatatttaccacatgggtggtatgggggttttacgtggatcccacagaggagaggtttgcactcaaattgccaatggcaaagcagacagtttctaatctgaagtcctgaacagcacctacatgttagtaaaatattctcatggtgtttttttactatgttaaaaaaaagcttccagtacctttcttgtatactttacctttcttatctattaaatttccacagaatacatatttctgcctattaggagaagcaaatacatgcccttaggaaaaaggatttaaattctagctaccatctatctctagatctccctttctgaggctctggacctaccggtgatcaaaacccacacagttacattgtaggatagcttacaatcactgaccgtgatcaaacctacatagttacattgtgggatagcttacaatcactgactggatttgtttgcttctttgttacttattttcctgatgacagatcactccctggtgccacagcagccgagtgtgcctcgaatctgaagaaaatctacacggtacaaacagtgcaggtaagagtggaaaggggcatcctgggccagggagggatacagtagacatcatcgcccgactttctattgcttggacagtccttgctcagggctctgccctggagtcgttgcataggtccatcttcatagcaactgttcatccatctaccccagaggcaggctttctctggccctagctgaaacttcatcagcaaaatctttcattgatcttcaggggaggcaagaggagtgcagagctgatagtgaaggttttaaagacatgtgccaaccacattctgcttctctgtctccttgagcttctgtgtaactggtgcaacagtgacatccacctccatgggtcaccatgaagacttgagtatgaccatggatttggcaggatatttgatgttcaagagacacccccgccccccagcaagtctgtagttctgtttgaattctcttctctctctctctctgtgtctctgtctccctccttcttcctcttctccctccttcccttccttcctctttccctccctgtgtgggttgcagatgtgtgtctttgcatgtttgtgcacgagcatgcgtgtatgtgcaaatgtgagggtcagagtctaactttatgtatcattcctcaagcacagggtctctcactagcccagaacttgcctagtaggctaggcaaccaggcagggatccacttgtttcccacccccaccccacccccagttcaccattagtgggagtagaggtgaccttacttctacacctgccttttaaataccagcgctggagaactgacctttataaagtatatactttattggctaagccactccccccagacagtttccaaaacctggtttactttattcatcccattccccatttcttccccagtgaactctaccaagtttctctcccctggtatccttcccagctacaggtacaaagcttttgaggatacatcaaagccatgctggctatatgtcctgggtcttctacaaggcacaggttataaatatttttcttcttgtggctctaagtctattagataggcatcctgtaggcactagcacatactctgcttcctacatgggcttaacaaattgcactttcatacttacacaggcaaggagcctgggtggtaagtaccatgactggcccctgtgaacacagtaaaacgacataagggcagtcccaaccacaggccatttctcgtcttcttgggaatgtgacataagcctatgactagcaaactgtttctctaaggttaccattcagcactgagtgcaaccttgtggaccagcgcaagagctgctgcccccagagccagacccctcagagttgggggagcttccccttggctgctgtttggtgaatttgtaggcttttgcaactctttcctgggagccacttaacctcagagcactgattttaaggcctgcctgaggaagctcttcaaccctactgggattttaagagattcctcctttctccactcttttgtgacagtgagaacctctgaatggggtgtgggatcccaggacagaggctagagggtgatctctccaccccagcaaggtcaaggtacacacagcagggcttgatctttaaggcgtgaattgttaggatccttagggaccaatttaaaggccctgggctgacacacaggagagacttttctccattgtactgaggtataattaacagaagtccttgtccaagtttagatgcacatgcccttaccagtgtatctccatagcccctcccatcagactctcctcccctggttatagccaccactcctgatctgctagtatatgtttttccattggagactgaagttgagtcaagttgaagcacacagtaccattctctgctatatctgacctctcttcactgagtctgtactgaaggatgaagtgaatgactgagaggtgaatgcgtgcacatatttcctgaacctctgcccactgttctcagaaagctgtatccattggcggctgcacctccccagaggggcaaaacttcagttcttgataggtccatgaccagatcttaatctttgtttgtctgaagcacagacagatatacagcccatagataaacacagggcttccctgtgatttgtaaatatttcagggctgatttagaaagggctccttcaagatggtgagaggggataacaatgcaaaagaggttgtgaaacacctcaagttccttatttatacaactaatgtgagaacagtgctgtccagtgagactgcctgggggtaagactggatgtagctctctgcagggcgtgtgtttataagcccaggaaatgtgttgctggtgctgggttactgcagtctgcccctttgctgtcacactgtttgagtgccactgcccacactgagtagcgagcacacttctcttcctttttaaaatctctatataccttatttactcatcttcaaagcaagaataatcatgacagagattttaccatgctgaggtgcggatgggatagttcacggcacagtaagaggccgatgcaatagcactctcgccttttatcacccgttgcctcccgccgctgttgcaaacaccccaaagtcacattttatgtaagaatattacatgccaccactcacaattactcctgtcaagtgggtactccctgggtgacaccactcaaaccttttatgtataaacacaaatttgacttgcctgtgacttttggtaactcagctgtgcttgtctttagcatctcagaagtgtcccttaatgccaaagaaactggcaggggccagagcttttgagcacatgagaggacaggctttgctgcctttatcccttgactgcatgttgatgttaattcactcggctacctcaatatttacttaaacatttgtccagtggtatctgagtccccttcccatgtatgttttgatgaagttttaaaaccatctgtgtggtgtgagtagtagaaaattatcgtcctcttttatgagctggggaaatgggctgggtggcatgtgacccagaatttcagtgggaacagctgatcgtggactctctaaggctggacatgcctttgcttctttgtcagctctcttttacttcccctgttgtgggtggagggatggagcaggagaggcatccagaggatgcccacctctgctgggagcacttgctgggagcactcgctgtagccacaggaattctctgccgagagttccatgtatcgactgccttccggtcttccttggacagtgcactctttacttcagtgtgcttgccactttttggacttatatagacttgcccatttctctcacgtgtctgcatcctcagtgagcaaagctcagaacatggtttctgagcatgcccagtctaggggaaaacaaagagctaccaatgcccgtgtgatttgctgggagggttggctggtagcacatttttcagcattggctgtctgttgactttttaaagcaactctttacagaattccataccaaacttcggtagtttgtgctgtcaccttcatttcatgccctcctgatcttctctctcctgtgttctatccagggcatcccatagacgacttagtactaaaattttcaaagaacagaaacttgttgggtttttttttcctgtaagtggaatttctgcatcattcttcaaaacaagaacatctttataaactttatgnnnnnnnnnnnnnnnnnnnnnnnnnnnnnnnnnnnnnnnnnnnnnnnnnnnnnnnnnnnnnnnnnnnnnnnnnnnnnnnnnnnnnnnnnnnnnnnnnnnnnnnnnnnnnnnnnnnnnnnnnnnnnnnnnnnnnnnnnnnnnnnnnnnnnnnnnnnnnnnnnnnnnnnnnnnnnnnnnnnnnnnnntgcatgcatacatacacacatgcacacacacaccacacgtatgtgcatgtacacacacacatgcacacatacacaccacacgtatgtgcatgcatatacatacacacatgcacacatacacaccacacgtatatgcatgtacacacacacacacatgcacttaataatttttatttgttctaaatagcagtgcatgtcccctgtctggaggttagaccacctgattgtgttgtgctattaaaggtcattaagtcggatttctttccaaagcctgaggaacaagaactgtcctatctcaaaggtttcataagtcagggttgatagagatgttgtataatgaaaccaatatctatagtgacaacccagttaggtcgagctagaattaagacagtttcctcctggtcctgtttgtggtacttagaagctattatgtgtgttgcagaggtggggatgagaagtgaataaaattttgtttacaaatgacaagtaatttagtcacttctaatgtagaacttggagtcttccaatgttaagtcttttgagagcacctctctggccccttttcctgttcccgtgaactgtagcagcacacctggcacatgtcagcagcccatcacctttcctcagaccatgatggcctctactgggtgcacccacatccgggcttcagctctcacaggccttctgtcagcctcattctccaacagggcggaggagaggctgggagttaagaatgttgtctaccttcacttaccatcctagagcaaaaggagctttgacgctgtggtaagcccctgaagcaagaatatccctcccccccccccccttcctggggctggaaagatggctccatggttaagatcactagctgttcttccagaggacctgggttcgattcctagcacctacatggcaactcacaatcatctgtaactctagttccccgggaatctgatgccctcttctggcttctgtggtctctgcagtcatatggtacacagatctacatataggcaaaactctgggccaaacatacaataaaataagttatttttcaaagaacactgcctcctctgctggtgtcttatctcccgttctttacacctgcagcaggaactccagccttatgagcggtacccaggaaacagctatacactgctctgcttaggggttccccaggctttgccccctcccccttcttatggttcagactccaccctcctcagctcagactaagtaaacaaagtcttccgtctgctgtgcgaccatttgcgaaccctcagctctctcctttcagcctgggctctgctgtgagttaaaaacatccatgcatgctacactctcagctctgagcagtctctctccgtcagtgcctgggactccgcagcccggcagccctggaggttcttcactgcgaaaccgctctacctgtgctgcggcactaaagcaaacaggaccgttccctctttcctccctctcttgcttttcttctcttccttcttttttctatctcccttctccctctccactcctcctcctttctcccttgctccctctcctgacttcccccttctcttctcctatctccttcctccctctcttcatctctgtttcccgctttccttttctcgtcctcattccctcctgtgttagtcagggttttctagagtaatgggactttataacattcatatggaatttatagggctgacatcaggctgcagtccagctaatccgacagtgacctgctgtgaattgaaggttcgagagtctagtacttgctcagtccacaaacctgggtatatgctggaatctcaaagaagcaagcttcactgtgagtgaaggagtagatgtgttagcaaggcaaggacaagcaggcaacaagggaaaccttctatcttctctgtgtccttatatagactgccagcagaagtaatggcccctattaaaggtgtgacttccagcctcaagatctggatcaaagctgtgcttcagggtgtgatgttgctcgccttcagtccagcacttgggaaacagaggcgatcagatctatatgaatttgaagtcaacctggtctacagagtgagttctaggacagccaaggctaccagacacaccctgtctcaaaacaaacaaacaaaaaaacgatatatgtcttttcatttcagtggtctggactagacatggatacacccacttcaaaccaagcccttccccccccccaaaaaaaaatccaaaaccaaaacaaaagtctcacaggcatgccctccatttctggattttagttcattgcagacacggtcaagctgacaaccgcttgcctgccactatgctgccttccctgccttccccacttcctcctttccaggatcatttgtgggcggctttatttttcttttgttttacaagacacacatgtacctttctgacaatatgtagcatctttctaagacctatcaagacttatcctttctcatgcttcagagcatttcaggtagaaactgaagagtggatttgtgaactttactgataatgaatggctttctgtggcagaaaactgtctggatagctctaactgcaaccagtagaatgccatatttggtgactggaagccatgtcttccttctgtagatctcctgttgctgtcggtgtactgtctttgaatcacccgagggtggcggcatggtactcctactgcacacatagaggtagagtggagtgggatatctgataactgtttgacattttctgagaactagtactttttgtttgttttgtttttgttttgagacgggggtttctctgtgttagccctagcagttctggaacccactccgtagaacatgctggcctcaaactcacagaaatccaacttactctgcctctcaaacactaggattaaaggtatgtgccagcactgcacagctaaaatcagtgccttgaatccaggtggtcaagtgtctgggctgcctcagttccttaaggaggagagcaacgatgctaaaaacttatcaagcggtgagtggcccctgtgaccacagctgtgcttccacattacaaacttagttacatcacagtgtactgcttacaactggtgcccagcaatgttaactgaatagatggtgccaatgtggagacctctgctggcctttgggtgctcgatcgttaaggctttgcagggctgggagcatttatctatcactaagaagcattgtgcttagctgtactgcagtgctctgtcacaggctaatgaagaggactcggcctggtgcctctggaaatctacttagaagattgaacctttagtaacatttaggtgttttggagacagtcattacaaatcatcaagtttgcaccaggtcagccctttgcctcctgaagggatgatctaggttcctccctcaagctccttctccatcagacgtagagataagtacttgacagacgagagaggtttgtaacagctgttcagtgccgtgtactttttcagtgcgtcccttcccgctggcatacttggaacttttgctctcattttgtgttcaggcacaaacactcgcaatgataattccaagttcagcccgacgttgcactgtgatggtttggcttcttcctgccagattcaccaaagtaaacaagctcagggatgttcttgtttttgttcttccaaggctacaacccgtaacagagtcctctggcctcttctcatttctgagataaaaagaaatgcatgctgtgtgtgtgttctctaagtacttcaaatgctaggcgaaaggtcagaactggaggagcctggcagcgagcccatgggaggagctttggaactgttgcccttcagagccgaggttgcagttagcagcatcctcccagccttctctgagaaggaactttttctttctgcatcgttttgttcatggattctgcagagaccattgccatgtcatagcaagagtcttgggctggagttatgtgcatcaccaaagtaagtggagaaaaggacatctgattggttggaacacattgtcaacaggtgtccctccttctgtgactctacacatgacttgtctgtgactctaagactggaaaaagacatgcaaaaaaccacatagtatcatcatcaaagaaaataggttagtagtttaaaaaaataggggcttaggggatgacgttcacagcagcagtacagacagacgctggggtgttgcagagatctgacagtttgcacagacagagagcatcagccctccacgggacacaagcctgttagaggatctactatcacaccatgctaattctgagattgccaaaattaccatttaagtagaaggctcctgaagtgctgaagtagattccccactaataagtctaccacatatactttatatatatggctttgattgtctttcagtgcattattactatctctgcagttaattcagctgggtgtatttatatatgcttgtgtgtgtgtgtgtgtgtgtgtgtgtgtgtttctggatgcttgtgtttgtgtgtttgcgtgcacgtgcatttacttgtgtgtatatagtcagagggctgccttgacaaagacctgaattccctgtgtattgcttcctggtacctatggcctggctgctgaactgttctcagatccttgtaggaagaacaagagagaatcatctaatgtgattcctctgacttcctccaccctcagccccaaggcagagcaccacagacctcttcctggcagagtccattacaaggacgtgcactttaatgatcacactaaaggccctgctaagtaccataactgtcagaacatctgttgcaagagtctttcccttgagaatatgtgtgtgttttagaacaggggcttctggtactgtcttcactcctgtacctttgcatctaacaaaattatatatatatgaacatagggtctataggaatataaactaggtatgcacattttaaaaattgtggataatatatcatgagaatatttgttttaaaacagttatccagcatatatgtctacttttgtcattgactaaagacaaaagcaaatgttcatactaatgggatgggtgctcgtaattttttttatataaaagaatatgtctcagctgaagatttgctatcacaggacgtagagcacactcagcaatgtttcagacttgatagacatttgattctatgataattctgagaatgccactttacataatggcaaagtgtttattcagccatttcaaaagaaatttgaaattctgtcctaatcccaagccaaaatttatttaatgaatttttttcagtgaaacacaagcaagcaatcttcaaaacttagacatgctaatgttttttgcatttccaggtatgcatgttttgtctttatgtatgtcatatatgtgctggtgtccatggaggttagcggagggcatcaaatcccctggaactggagttatacatggttgttataccatgtgggttctgggaattgaacccgagtcctcaaaaagagcaagtgctcttaactactgagctatctcactatccctcagaccaaatatagtaaagtccaaatatatactaatttgatagttgcatgctgaggaattatggtaggaaagtattaacagtcttcttcgtattccaaaattaaacattaagcagggcagacgatttcatatgtatgtataaatactgccatgatagccttcattcttcccagatctgaggggaggggggtgtccaggcatgctcattactgttacattctgtggcagaaagcacatgcaaagtacacacgtcgtgtgttcagaaagaagactgtagcgaagtcacatgaacgacacaggcgaacgctctgtgggatattccggatttgttgtgcattcagcattgaattttgcattattttgttgctgcctgttagaagccttttcctcctgacaggttctctgcaacccacatgagatcgtgacctacagtttcgagaagctgagttttacagggtcagcttatttatcaccagtctccgctcatggtggaatgcgaactgatgaggagctttcatttttaattattcatgtttatatgtgtgctcctgcctgcccacaggataacttggataggtaccaagtgatatgtgttcacatgcccacagaggttagaagaaggtgtcagagcccctggaactggagtcacaggtgactgcaagccacctgatgtaaatgctgggaagagaacccaggtcctgtgtaagaataacgagtgttctgaaccactgaaccatctctccaaaccagcaactagggcttttagatgagataatattgaaatgtagaatacagagcatgctttttctgtagtctttctagtcaaatcttccaaaacacaagacctaggctccataaatattaaggttttaggttaacagacctacctcacattctcttgggacaggagcaactgaaatctacatagttaacaaaaacttctcatgaaaaacagtttttttttttattaatgccagtccttgggactggagagctggctcagttagttgttaagagtatttgttgctcctgaagaggacccaagtttggttcccagcaactgaaagatggctcacaaccattcataacttcagttgcaggtaatctgacacctccttctgacctctgaaggcaccaggcatagacatggtgcacatacatgcatgcaagcaaaagagtcctacgacataaaattagataaatctaaagcaactaaccgcagtcctggctttgtgcattgttacctttctagttttatatatatacatgatgcttaagaatactttttcatgacaacagctttctaacatatgcaacctagcctaatgtctagaaggagcaatgttttcatggtctgcattaagaattttgaagagctaatgagaaaaatccactccaagtagctaggaattaatgagaatcaatttttttctttaacacattgattttatagtgtcctggcatagttaatcaatactgggtttgttaaagtgttttgctctgttttgtttttttaagatattctggagtgtatacaataacatccctcctgtgaccagcctgcctttgagatgtagttatcacttaatgagaggagagaggcgaccactttggtaagtgtgtatggttcacctggaggtaaaggtgggagggaaatgtaaatgtctgggaccctcatgaggactcattttgcctatggtgtgcctcttaacagcaagcatgccctgctcatcaagggccagaggctcagaagagcctcccgtagctgctgtaattatttgatatagtatgagggcactggatagttagcttgcccaggctcagcctctaataccaataaacccttacatcatttaacccttcacagttacttactcacaatgagaatgtgattctgtctcagctcattgctcagtgaatggtagaaacctgaattaaacaaaaaccaagtagagttcagttgaaacctgtaactgagaagtccgcaggtacggctggtgtcccccacatctggttttccaggtttcatccggactctgacactctccttcatgtttccttagctttctcattgttggctgggttttaagtcagacattcccattcctgcgaagacagatctctctctggagactgaacctaaagccttacaccctgtgctgcgcaagcaccgtaccattgagcttcatccacatccctgccccccacccccatccccccacacacaccctgttttttgagataaggtctgacaaagttgcccaagctggccttgaactcattttgtagccatgataagccttgaacttgccattctctgcttcagggatgacagacctgtaccaccagtcctgctagctgtgagccgcaattgacacccttcaagcttatcagttgttgggattctccaagccaccacaggctcactatgggtcagctctccatccctggccaaccatggagatgaagaagaaactataagcaaacctagaatctttaaatgtagtgtgtcttcacagctaggatatggaatcagccctccctgagtccctcttacatggaacttggcatgctcttccatgcaggaagtggccgttaaaccctggtctgccacacaaacacctgttaagtctgtgaccccaggtttacatggaaattaaatgagacaatatcatgaatacactttggaatacctgtaaagtagttgcaccaattgtccatccccagagagccagggagcccctgggtaccacttcctcgagaatgaggacctcgtaaccctgcacccaattcatccgcatcacagctaattccatgttgcctcctctctcatctccgttccctttaacattcatctgactctgctcataatcacagaactgagggacatttacttataaacacgtgtgcgcctttattttttttctgtcacaccagctattgttaaatggaaatagaaatattccatcatggagcacaactttaaatgttgttctttgatgtagggaggaggagagtaatgcgaagggtggcgtgtggaagatgaaagttcccaaggacagcacggtaggtctctgctgataacttcccagacctgcctggcgtgggcttgagagtgttgtgttcttcagtgagcaatcctaggtggagacgttcgtttctgccattgctgatggtcacttaatcctatcaccttgaacatgtatcattgaaaaagccaggtgttgtggctcgcacatttctccctagcactcggggtggtgaggagaggggcagaggcaggtaaatccctgagttcaagttcaacttggtcttcaaagttccaggatagccagggcaacacagagaagccttgtctcaaagagagagggggggggagggagggagggaaggaaggaaggaaggaaggaaggaaggaaggaaggaaggaaggaaggaaggaaggaaggaaggaagactgaaaatgtataattgtgaatctacagacatcctgtgtcatatagccatcaaggtttagagcagagccattgggagcttcatgatggctatttcctcccaggcatgcctaacacatgcaaactgatcttccacagaagagcaggatacttcccaccaaggactctgtcctcctgaccaaagaccaatgggaccatgaaatggaaaatggggacacttaagggttccccattcattgtggttcatggagatgggcaagcctcagcaatctagatttctcaggagtaaatcattagcctgaaaaatgaacatccattaagccctgggaaatgacaaaactcctttaagaatagacaaaatggtctaggcatggaagtaatgtccctctgataacagaaggtataaacagaggccagagaatcatgagttcaagttttaatgtgccattcagtgagaccctgtgtaaaataacaaaaataggggctggggagatggctcgtctgggaaagtgcttgccacggaagcataaggacttgagttccaatccccaggagccatgtggaaaagcttcgtgtggctgtgagtacctgttacccagtgctggggaggcagagatgggaacgcctttgggacttgccagccagcttgtctgggaaaagagtgagattctcactctcaaaaaataagatggaaaagtgactgaggaggacagcagagatcaatctctggctcccacgtgcccctgcacacatatgcaaacacacacatactcaaacacaaatgcacaccccaatccatacataagtaatacaaatccttagaataaaatggacttttttttctgattcctttcacttgattatggtcaaagaattgaaatacttctgggaagctacacacgtgggcaggagtcatctccctgtgagcacacacttcaagttacaaccagattcactggtcagggctaaagatctggttattaacgttgccagcatggaaaacagcagagctgaatgggagtcaggcaaggtgtgtgaccctctctgctctgctgagagagaacaagcagaaaacaggaagtgcaagatacagtgctcccccaccccatgtgtgttacttcacttgtatgctggtttattttgggggtgatggggagcagccctgaagccttgtatatttatgagccttttttactcgccctagacttggaactcactggcaggcaccgtggtgctcacacccagagaaaactgctcaaggcagtttgttctggcccacctcgccagctcacaaggccaaattcaggcaccaatgacacactttttgtctggataggtgcatgggtttccatggcttatcctcctattagaattctgggaggccagagctctgcctgtattcacaacagaagcccgaagccccccaccccaccccgccatgctatcctctcccaccccagcttcatcaccaagggagctcaagatcaaagctggaccgatgggagaaggaaaggtctaggaaagaagacttgagcctttctaggagtacagggtcaccttcagctcccaatttaaatgctgtcacgtcacctcggctaaaaccttaagcagctgctgcaagctcgttagaatgtaataataagcattgttacagttaatgtgcactgagcgcctggcatatggatgcatgccactatttatggctcagccttaaatcttgagccctctcgttgcagccactctgtgaagcagttcctggcaaacattatgcttgcaacatccctctgaggtcagttgtgtggttactccctcccagatggaagttgaggcagctcatggcctgctcaggtcacagagagtaaagtgagcaactccttaggattcagactgagctctgaaagcggaggaactgtggcaagggggagcctggacctttcccgggggagaaaccaggagagccatcgagcctccagtgtcctgcgagtggatccccgtcacttgacagcattagtacctgttcatagaaggagctctggtgtttctcgtcagcaggaggcagactagaatggatgcacttccagggaaattgtgcgtgcaccatagtacataaatttatcattcagtgcaaataacctgtcagcagtgaatggagttttacaagtctctggcattcagtaaataacaatgtttcttaacattcttgactgcagtaacatcttaagtggtagcattttaagtaccatatcaactgcagggggaaaaacaaagagaaggattttactaatggcactcaaatgtaatgggttggtttgtacactttgagagttaaaagacatcagaaaatgaagtgagttgacggcttgccccctccccccagctcttctggcattcgtgggagcttcgctagcagtgaagcccctgggtcgcatgtgtctgtgcacagtcacttgcagcgttcctgtccgtgtatgattgcacgtattcactttgatgagttggaggttccaactgggggtggggagctggtgtctctttagcacctggtgataactgcctaaacatttccttgtttttctttttattctctcctacgtttagtccacagtttggaaagaattgttgttagcgaccattggagagcagttcacagactgtgctgcagcaggtagggaggccacagccctttgcccacgccctggtatgctgggctcatatttgttattcacagacctttgattttatgtctggtccttctgcttgcctgcagggtattgattttgtagctgtgatgtaatttagacttgtttctgtgccttggggtttggggtgagattcgtgtatataagcacatgcgcatatttatatgtgtgtacagtcagcccttcctttcttcagatcctgtatccatggattcacagatcaaaaaccagtagaaggcatgaacagtacctgtaataaacacatgcgcacgctcattattcaagaagcaatgcaatgcaaacaacttgcacagcattcgctttaaatattataagtagaaaagagatgactcaaaaataagtttggcttggtaatacagctcggtgagagagtgctcacctggtgtgcaaaaacaaactgctccaaaataaatacctaaataagtattatgtgcaaatggcattttatataatggtcttaaatagtcatggtatggaagggatgtagaatttatcttgcataaataccaaggggtggctatatattataactataaaaacatacataaatgtgtgtgtgtgtgtgtaggtatgttcgtacgtatgcctacattatttcctctcataacagttgcagccattcatctaatataaataggcagaaggagaaggtaaatctctatcagtgagctagcatcattggtggtaggttttctgtagctgcctcatctttgggagggggacagtgcctgccatgcctagtgggatggggtgagtaggcacggtttcttcatccgtcccagcttatcctcttcctcctgttctcctgactctgcacacagagcagccgactcagatgactacgatgtctcactgttcttgctgaggttgaaacaagagacttgcatctgcagaaggctttggcatgctgagtagccttcagagagcccctctgagatctgtgtgtgttggagctggaaccgtggactctgtggtccagccatgagctccgccgagcccacacctcttcccttctgtgatccctttttgtttacatcgtgtttatcacagaaccattcagagagggctcattgcttgtgtcagggtctcttttcttctggggctctccaaagcatctgaggatacccttaaagttctgtggggtgtggttgtggttgttgttgttctgttgttctgttgttctgttgttctgttgttgttctgttgttctgttgttgttgttctgttgttctgttgttgttctgttgttctgttttgttctatgctgcttttgcttcagagttttatctgctttcttttgctgatttggcattgtttttttgtggactggcgtatatcagctggcacccagacttaggctgtctctgagagcctttgtcaccctgacacccatgacctctgaccttcacctgcctggagcggggtaggggaagtgctcacctgttctgactttctgtaacaccgttctcacggcttttactcactgcaaacaaagtgtgtgttcatatgaaatgggcttacaagtgcagatctcttctgttctgctggagaaaagctaacaactttagatcgcccagcccgaagtgcactctgtgtgtagctctaaacacagaagtcccggaatagtcataacacccagtatcgagcagagagaaggccaattcttctgtggctgacaagagagttgactattaacctccagcgcttccattaaccagctctgtcacttgaggcaaccagctaatctttctcagcctcacttacaaagcatcttcaaactcctggtcccgctgtcttctgctgccagggctctgccacagcctaggtgtggctggctgcttctccatgggaacattatgcatttcatcacatacctgccttctcctaagatcttttaccacactgtgcaaaagggcccatcctgtcctgcttgccggaagccaagccagagtgaaatagtgaccgttggcgctgtttggcgtctgctgctgacctcacccattaccagtagtgcatgaaaggatcatccgacaggactggggagcactcacgactccccgcaaactgggtcaatggcctgcccttcttgagagtggaacacttgatcacctctttctttaatataataatcgtccttttatatgaaacttatcatctcctctccccatggtgagatgagcgatgccacaagtagatgcagccttgctttcgttttatcttgggtttggatgcggcgcatgcatagcaatgtccctgcattattgctgtgaagcctggcaacaagtcacaaagtcatcacatccttttcacaagattaatgccctttgccctccaacctgccctcctctttctcttctttgtcaggcgccatccaagttggtcgaatccagctttgaacaccatagtctaattccgtctggttttgaacacttctatacatgttcacagggtgtcagaatatgcaccatagccttgatcaaattaattcataaaggaaacaggcagagaggaaggcaggaaagggggaaatggaaaaaaaggggaattatttcacagaaaatggtttctctcagcagacttggtatgcctgtacttgtctcctaatgtccaggagacaagcagaagaaccaatggcatgaacagctcaacctatgatcgatggcaaattagcgtgtatccgctaacataaaatccctaactggcaatgctaatgcttctccctcggatgctgcttattggcacagagtacgcagatacggagagacgtctctgtttcctgactgtgtcatcagcatgcaaaacttggagtcagaagctcaatttctgtcagtttgctgccaattagtgtggacagggcagctgcgcaggagcgtgagggtacagtgggttcatcctccagccgccacgttcaagggcgcccgtgttgcccaaagcctctgttagtcagtataggttgatccctaaggaccattggctgggtgctaacagtagagcgtcactcagaagatgctcagtgcacctgtcatgctaacgggtagctgccagctctttagcccctggtccaacacactcagaagggggatggctagaaggaagcaccagagggcagagtaactaggaaaggagcagacaacgcacacagcagaggagccactggacacagtctagctccagagagattcggagcagatcgtgccaacagtcccgaagcatccagcagcttagcaggacgtcacagaacgtctcactggctcttaacagagagggccaggcttcaagcacatagttcatctgagtttacttggctctcagagggcagggaattatgcaacctattttagaaaaaagtctcatccaagcagagtcagaaagtgacagaaagctttgggtaacatgttaaaaagggtagaatttccttatctgggagactcacttggcgtgaacactgattactgaatccccggctaactgcgctgcggctcttgtggcttgtgccgaactggcttccctcggcagcccccacggaagcagtcactcaccacgggtccctttcctgtctgtaactcacagctagagtggtgggcgcatagatgtgatcaggccagcttacccaccccttgccttttcccctcttccctcagatgacgagatcatcggagtcagcgtgagtgtgcgggaccgagaggatgtcgtccaggtgtggaatgtcaacgcctcactagtgggcgaagcgactgtgctagagaagatccaccagctcctgccccacatagcttttaaagcagtgttttataaacgtaagtgctccatttccactcgctgttttcgagattctcctgccagacttgtagagctagaagcacattgcgagtgaggcgaaggcaggaccacccgagacgctactcacacagaccacacagttcaacacaacgctctttgggtatttctttttaaaatcaagtttagtttcagaaattaaaatgagattttttttttttgttcttgcctaagtgcatgaattggaaaagcaactatacgttgtattcattatttcaaatagttgaacctgaacttaaatttgtcagaggcaattctattctgttgggagtaataataagagcaaatgagaaaagtcatccagtgagctggcaggcagatggtcgagcatccttcccacacaggaatttaccatgtctaacatatgggggggggctcagggatgagtgacagttctcctgaaatgctacccccttcctcattgtgactgtggcagagtcaccaagagttcccatgcagcggtgcacacaactcttggtgtgaacagcgtgtggacccattgtttccattgtggtgtgtgttcatcgcctttgtgtgctcttcacagacactcatctttttcataatgagaacatcctatcgtgttagaaccagtgtttgatatagtgagtaacaggaagtgattaacagccccacgcacatctgtgatgggttgtctatgtccccaactgttctgggagtcgctaacccattttttcttactattgtatttcattgactctaaggtgcttttgagcagaatatgccttattatttgattacttaatgaaaaaaaaatcagccaagtgtcttcagttaaaccaggatgatatgttggttgtagagttttggagatttgcaggggacagagcagaggcatcttagaatctctgaaatataagtcatcattgtctcattagtcttggtccttgtcgagaggctaaaattcaaaatttatgattaccctagtgttatagcatctatggacacccaggcctccctgggaggagttctgtaggcaacatcaacgaatcaggatccacacagggagatgaatccctcactctgtgcactcagggggtactgatcctctgaattatgatagaaagtttaaaatgaaagagacagaaaatgcatcctggagcgttgctcttggctgtgcagggtggaggcagaacaggcgcatgggtaccattcctgttccttagggacacgtcagctctagctcaccccaggtagcaatgtgtgttctggtttccagtccataaaaataaccagcacaaactgcacaaggaaacgtgagctagcatcaagttcaagcgggccggtacttgagtgtgcccagcacttgactgagaggaggagacagcagttggggggtcgttgggcttttactgtacttgtacagagtaaccataagcagtcaccaatgccctgcttgccctccctcacctgggtatccagaaggttggtctctgatgatctccaaggttccttctgctttacagttctgtgaatcgacaggtagcgaactggtcagcagctcagcgtaaagtcggtggtatcctcctagataattagggcctgaatttaaggccaaggcatagtcacctaagaacgaccaggggcaggcagttcactgcttagctgttggggtggctggaaagaggcattggggttaggaagacaccaagcaaggagaaaggaaattgcgcccgggcaagctgaatcaaagctgaacagaccctgcaggtagttagcactgtcagctgtgtgagtcagaaggaactggctgcgggtctaagcaaagaactgctttttaatgacacacattaacatttaaaagctcaggctgtgcacataaaaaaaaaaattggaattccctgtattatttgccatggagcaggctgtcctttacttggcactgttgccagcacctgttgtataagtgatctggacagaaattggctcccaggatgagggatagccctgggtgagccaggctggaagtggccagttcataccacctttgtcttgctaggggatcctggctctctggaatctgtagaagccagctggctagatgacggaaatgaatcccagtttatccagccctggcctccagcaggcattggcattcctgtgatttcttttctattaagatagatgatttgaatgagaaaaatcataatttatacactcaccctccatagttccattaagttccttggagagccgaaggccaaaggcctttcgttatgtggtgtgagcgctatggagggtaagggtgggagagcccagaactgaaggtgagccagcctctctcctcctgtccgagtcctgccatgtgggtgcagcagagagcagtctccacagtttcatataattgggaaaaagcaaaactgtgtttgtggcacttgaaaattgtatcggtgttaagtgtgagtacccgtcagcagctgggtagcataaggaagccctcatttgagcccacattttctatagcttcttcagcaatcaggaattgcatggattactactaaaaagtctgctggctcttggatctgggaacagccctctaattgctgccccagggatgccaaacggccccacagtgctgcagtgcacctgctgtcaagctctgaccactgacacttctgggtttcagcagtggctgtcctgaccccgaacacctcgagataagacaaagctttgcatcttcactgtctttgaattcataattttcaaatcagcattgctgtcatctatggctccttatattggccccgaaacatagtatcgctcactgaataccggtctatgttttatttagtgtcttccctaaaacatctttcttaaagacaagaattagagttgaggagtaaactctttaaggggacctgagttcaatccccagaacccacacttaaaaatagcaaggggtagggccagaggagagggctcagcagttagggttgtgtactgctcttacaaaggacctgagtttagttcccagcacccaggacagatgggttacaactgtttgaaactccagctgcaggggctgtgacacccagttctggcctctgcagacacctgcactcatgtaccttcccccacacaaggacatgtaacttaaaaatgaatccttaaagaagaagctgaggctggagagatagctcagcagcagcacttgctatagaagtgtgaggacccgagttcacatcccagcatggggaaaactgggcatcgccacacacactaaccctgcactgtgtggatagaggcagggggctcaccagtgctctctggccctaatcctgcccttaatgttcagtgagaaaacctgtccaaaggaatatgtcagagagtgacaaagcaggacacccagtgtccttcctctagtcatgtggtataggtatgtgcaccagcataatccggtgcatgtatagtacctactatagtacctacatgtacataccacagctctgtatataaagatactaccacacacatacacacacaaatatcacatacacacacatatacatacacctaaccacacacacacacacacacacacacacatatacactacacacacagatatacacatatactacacacacatcgcatccacacgtacattcacacacacattacacatgtatgtacatgccacatacgtaatattcaaatacatatacatacagcatgcacaccatacatacacatgcttatgcagacacacatacacatacagaaagctgagtttgctggtatctacttataatcccagcactgggaaggtagagacaggtggatctctggggcttgctggccaggctagcctttagcaagttccaagtcagtgagagatcctgtctccaaaacataagatggatagcatctgaggaatagcagccaaaatgattctttgccctccctgttctctcatcttccctcccttcctccttccatcccttccccctcccttccttcctccctccagtcccacactatccccttcacatgcaactatacctgcgcatgcaaaaatgtacccaaataatgaaaatattttaaaagctaaataactcagttagaaacttgaagttgtgagacgtgtacagttatgcttgggcagaggttaggtcacccatcctagttgccctgggagttataaagtatgtccctcccagtggtttatccagatgaattgctgccgggagcagctacctgagctgatctggaaggacagctaggccagctgtccgttcccttggtagcctgtataaaaacaagagaaggaggagctatggaggtgagcactcctggaggtggagcactcctggaggtggagcactcctggaggtggagcactcagccgtgtctccctttattgcctggaggagtgtgcagaagcactaggactgagtagccctggctatatcacaccttgcttcataatgacaggtagacacccctcagtcaaacttggccctttgggttacagctaatattgggtgtctcggggcctcccatttctcatctcccagtttaaaaagtttaagtctttgaaaagcatactttttaaaagtcaatttcctaattagtgattctacaagacaaaccatgaaaatccctgaggtgtaggctgagggttgggaaaaataatagattcattgatttttatggaaggtgatgagaagcagggggcgtaatataattcccacccccctcttgtgtggttctgttttgttttgtgtcattttattcttgaaggtaggcttgtgcctggctctgtcttcagccgtaggtccccctccttcccatgcatttttgtggggccccttccttctcctcctggcgtttgccttgagcccggcgttctcctctcataggttttggtggatgagtcatgccccaggcccagcaagaagaaacaggcagcaagcccgcagcttgtttattccttgttttaattttcattattacatttctcaggaaatgcacgccttagctaaaagttactggaaaaaaaaaaaaggaaaaaaaaaaaaggtatttgagttctagccaacatctggggaagctgaatgagatgcctagaggagggttggcccagcctttgcttaaagttttctttccttcttttcttttttgtttttttctgtcctttagcccatgaagagcatcatgcttttgaaggtggacgtggaaaacactaattgcactctgtaaagaattctttgtcctttgctgattggttttggaaacggtcttaacaggagggagagtgaagagaagacttgccgaagcccgatgctggtccatttagagtgggtttctgtccttgcaaaccgggccattaggactcaaagtggcaggtggggttggggaagaaggtgcgggtttctgccatcgtatcacttgctttaaagagaaagagtgagagaagaaagaaagaaagaaagaaagaaagaaagaaagaaagaaagaaagaaagaaagaaagaaagaaaagaaagaaagactttcttaaagctttccaaattctctgggtttttttgcactcttcccctccccataagattccttattcagggtaattattgttttctgcccaccctttcattgaggcataagagttgggtttccccttcagtgactctactgtaccttgttaaggaacatagccgccacaggactgcctgtgaagccacagggcaccaggaggaggcctagcctagcaaaaccctttttctgataaattgttgtgacacttccctgcatattgtgagctgggcattgtttcttttgtgtgtgtgttccgtagaaagcacactcaattgatagcacacacatcttaaaacccctttaaaaagcagtataaggaaaataaattgttggtttgcctaaaatgaaaactttaatcacaattgggtgtcaggctccaaatcaaactctaggttttgggggcctacagtgtaagtatttctaaccagaattccccctccccaccatatctgaccctttcaacaaaagacccaatgatttgtcctgagaggaaaccttctatttctgatttatagaggaggcgatgtgtattaattgtggggagtagagcttcttccatgttgcagcatgtttacccaaaccaattctcacatcttttgttaagtgagccggctttcctgcccctgtcacgtgtcctttctgaaaaccgatggccttcctgcagaggcgtctttcccctcatctgtgcacttacaggaagcacctagccactcacacagctgcccttgagtgcatctcattcctgtggactgtgttattcgatattggattatagtaccaaagaaatactgccttcagtagaagaaaacctttcagagcctcccagctcctcccagatgttccccggttccctctcatctttgccccacccctggtcattttccttcagaaagggcttctcccctgcgggcttgggtcagatccatgggccagtgtgcagcttctgttcttctcaaaagggcgaatttttaattccccttgcactgtgggaaggagaggtggggttacactaagccttccacatgcatttgtaaataaaattcccattcagatatttcagatggctctcggtagcatctgtttataaaaagtcaggggcctccacttgcattgctaaacaggaagccaaattaattagtggtcagagcgtaagaggcgcttctttcccaaccttaagtccctccacggtttcactcatgaggggctcggatccttcttgtctcaatgacgtgcatttctctgaacagtttctaaacttgttttaaaactataactcaaggactttaaaacttactgtagacacaattcctttttataatataagtatttttttctgacagattagcacaaaggatataattgacttcaatattataattgtcatatgcatatatatatttccataagtaaataaattttgagaaaattttatttttgaactttatttaaagcatttgtgataacatgttcaaattttgcgtgtatgtagcttttgaagtaaaaataaaataaaataaataggaatgttaggctcatgttaatgctttcgagtttctattgtttatgaacacaaaacatgacaaccacacaaagcagttggtttggttttggttttggttttttgtcccagtggacttgtgcacctgtttctctttgggaaatgctaaccacgagaaggatttaacctgaccaatgttcagaacctgactctgaatcactttgagtagattttgtcaacttttgctctggaaatggttttgattgaatatttagtcatgattgaccgagaactaagctgacctaagcagtttaaagcctttcgttgcctcctgacagaagctgatgattgggagatagaggcaacatttggggcacatgactcagagtcagagcagttcagccatcttggcagctgctggggcaagtggagaacccagtagaatcttggtccttcagccaagtcctgcaggtgcagccctggctattctgcagaatgctacacagaaaccaaggggcttgcatccttctcctgtaagtctgtgaggtgagccaggaatcaggctgaagccagtgtgttttcttctctgtcctacgatccccttgattgctacagtataggctcttgcctacattgggagagatccacccctgaatcaggacaactaggagccacgaaagacctgcccctgaagtatttctgtgacgtgacttttgtgagcactttctgaaagtttttaagattttcttttctccctagccatctcctctttctgaactgacctagcaaacctgcaatgctgtaatttaattcatggtccccttgacagagaacgagcacaagaaggaaaacaagactctgagaaaccgtaaggttaagtttactagactgtccttagcgcccccccattctttgctttaatatgcctgcactgtaaatacagttataaaacttggccatcagaaagaactttagatgctaattgcattcagtagacacaatatactgtatagcagctgagccttgactgaacttgtctctggttgaaggatagagatctagccatcaggagagctgggcatcaaagtctgtgacttgtgatctacacaggcttctgtgtcaggaagacagtggcatctgtctgcctgtccttccctgcaggtcatcctggtcagcactgagcctctgacccactctggctaacattacagcgcatgctcagatgtcctcgtgacaccagctgcttgtcctcactccctctactgactgaatggcattagatttggggtctagagaccactgtagtgtgacagatgctccactccccacgaattccaactttcctatgcacacaaagctgacagcatttgcaatgatcacatggtggcgctgccctccagctgacagttctgaaccagcgctcctgtggggggggggaggggcggggggaatattttaagagcttgctgcctgctgctctagggctttacaaaactttctttagagagcatacaaatcatatttagcgatagacattgaattctcatatgcctaatagaaacaaatcacagacagaatgctgtagacacacttttaaaaatctcagctcccagcctgctcttggctttttaagtactgatagatagggggaaaaaaacccacataagagtatagggaaatgttttatcaatatctgattagcatggctaatgatgaactattagggttcctttctttttcgatagatatagaatgcctttaagaatgcaaatttgcccttcccctcccctgcgaaaggaaagaggagtgccttacgtggtttctgtatcactttagcttactcttcagagtttggaagactcacagagtataaaagggggaacagagaacaaacagaaaaatgctttagaaatgagcagatagggcagttaggtgggtccccgcctcaagaaaaaccctaaaccgattccttaaccatctgactagagactggaggttagcatttccgtttgtttttattttgcatatgaatgatcatgaagaattctttcattaatctgctgaggccagaagtcttcatccttcatggtgctgacaagactctcaattttaaagagatcccaaggacacagaatttgagagtggaagggacctttgagatcatccggcagtgtgtcttgactgcttagtgggcagaaggaccactgtggccctagcttatcaagcatgttccctggctgccccctgcagctttgggcgtctgcattgtgagctagcaccctataactctaatgaaggccttgaggccttaagactttgagaacctgcaattatatccaacttctgcatactaccggtgaggacacccacccaagctctccaagataccctgatagcagggttatcacaccaacagtcctaaaaaaaaatcactactcaaagggaagataaaaataagaacgttatagctaggaacacagtgatagagccgtggttcttctcttttctaaataacattctagcctgttaagagaagaaaaattaatgttcagaaaaaagtagctactccatatgtgcagtaactacttttctataatgtcttatggcatctggggttcagcatcattgaacaagattaaatgaatgttacagagctataaaagcgcatgtaaaataccgcaaaactgttcggaggactatcaaagtagcctgggaatgagttcccactaaaattaattgtcactttctaaacgtagcttagccaagctgttactaaactggagggagtctttaatacatacaagtgttaaaaaggaatcagataggcgctccccagagcatgtggatgggaggcagaggtcatcgtgaagtcagtacgttttgtccatcattgctgctgaaatttatagtctcattgtatctgtgtgtgtcagatgtgcttattagaatatccaataaactgacctttggatattctatgctctgtgtccttctgaaatcatggggttataggaatgtgtgttatatgttattgttttggttgattcatttgatgaaacacaacatttccaattttacctttgaacattaaagttggatttttttttctttgaacatctgtttgggaagaagtgtttatttgggatttgttaaactggcaactttgtgttacggaaatgactctaaaatcaatgcttccgaatttctgatgggaaattagtgtatctattgttacatgcaaaaaaaaagcaatttattacatttattaaaactgtaaaaggataaaatagactgtaattttatcaccccatatattaaatgaggactattgaagactttggatacgtttttaacacacgtgcaagcttgctagtcttaagcgatattgttttgggagtgtgtattgaattcccttcagatttctcagactctaatcaggtaaccaggttttcaaccactgtatgtgtccttaagcactgttggtgctgggtccttggtattcatttacactaagtcaccatgacctcacgtgtatcctccgggagcatttttccctctttgaattagcacacaagagaatttcaaatggaaactcctctcacacacttcagctggaggcatctagcaacatttgtctcacgtttaaaatcttatcagtggcttgaaagtgattcattctttcaagctgtcttacctgtgtaagccaaaccaggtttgcctgcctcatgtttctggtgtgtgtgtagttcctcccccaccttccgccaccccatattataccatctgtgccctgtgcagtctgggaccccttcacatctggctacaagctggtgtaatgcccttccttttgatctggtctcatcgagtgatttgctcagtatttttaaggtcagactgaaaaactttttctgctctagttattttttgattttatatctctgtgtgtttgatgtacagatacatgtgaacgttgcttctataagccagtaatttttattccagccttttgcagcggtaaggtaagtcaagcctgtattcttctcactcaaaaatgtagtgatttatatgtttggtacaatgtttattcatcccagagtctttgctgctcttgcatctgggactccattgctatgactttattgcattccttcttttttcaagaaaaaaaaaaagtagagtgtgcttaagagttaccgtctctcaagactcggctttgaggtctttgctcatctgttgccactaattccttctcaggacttgggttcttgtgacttcaaacaaacaaacaaacaaaaaactttcatcttctggggttaaaatctcatgcagttttattatctttatcttaattacatctctctctctctctctctctctgcgtgtgtgtgtgtgtgtgtgtgtgtgtgtgtgtgtgtgtgtgtgtgtgtgtgtggtggttgtcataatcctgcacaaggcacagcccaacttcctaccaaacggctctgctatgtgtggagtgcctccacagcgcctgggggggtagcgggttctatgtgacttctcgtttctgatttatggaataaatgcagttgctataggactcgttttggccccgtggaaaacattttgcatattcaaattctttttttaaccttttatttagaactgcttaagtacattaagtccattacttttctttctctttgggtgccaaagtttacctaaagttttcccacctcaccaagcaaaatgcaccgattcttcctttccgcttgcataacatatcccttaagaacaaacagaaactccagaaaactgatgtgtcttccattcatccctacagtttcctgtctcacttacaagcaggcagttcaagcttatgtacgtgaagcccaattcattttaacacagcaaatttcatgaaatctgcgagaggcaggcagggcataacattgaggctgtgaaatctcctagtgcctcctcacgctggagtctgctcgcagtgacggagcaggttctgtcgctttatcgtctagtgggcacttttgggaacttgctgtttgttgtttggttagaagttctgccttgccacctcacatacagggagctctcagggggccaagactgtgtgcatataccttttcttcctcggtgactctttctgtgtgatgattactgttaggaaaagaagacaaaagaaacttttaagtgccttcactagtgaaggcactaaaaaaaaaaacttaaaaaaatttctggaatcctacaagctgataggtcttttgttagaggaagaaaagaaaacagtagctttttacaaggctcagcaagttcaaatatatatatcattgaaatatatttctatttcccatcatctgcctaggccacggtgctgactagcttattccttgccagagaaaataagtttaaatcataagcatatttaactagcaagcataaatcataagcctctctaaccgtaagcgtgttgaactctgcacagtttgtacagatgccgtggctgactctgtacccctccctccccatggcgaggatgtggacagggctcctactccccaatttcctgtgcagctcagggaactgaaaccatttgttttactgcgcctacaggattctgtaaagtttggacccggagcaaggtttaacttgatcctcctttcataccgaggaatgatgggggtgaaggtggcctccctctagaagctatatccccaaagtacctcaatcacaaaagacaagatgctgctgtttaaaaatgtgtcttcttctaaaaaaaaaaaaagtacaaataaaaaaaaaataaaataaaacccacagcataatagggtaaaaaatgctagcagagatttatgggcttcaaagagcaacttctaggaggttgactctatggcattctttttgacaatgcacacaaaattctgcttgtgtcttgtaagccctggctgcccctacgagtcaatgtctgggcaaagttcagcgtgctttggctatagctatggctgtgttcatgtgctcatgaacgtagagtggcagcaagagtatttactcatgggcactggcatgccattgaagcacataggtggtgtccccttattatcactcccagttttcgtatgtgggagtgaaggttaagacaggtgaggaccttgcccaaggtcagacagggggagtccatcttcatgactctcccaagttactgtggctctagcctgttctagagccaggaccttgaagaacattgaagattccaaagggcaagaagtttgagattccttatggcctcactactactactactactactactactactactacttctacttcttcttcttcttcttcttcttcttcttcttcttcttcttcttcttcttcttcttcttgtccttcttcttgttgtccttcttcttcttcttcttcttcttcttcttcttcttcttcttcttcttcttcttctttttgttgtccttcttcttcttcctcttcctcttcctcttcctcttcctcttcctcttcctcttcttcttccccttgcccttgcccttcccctcgcccttgccctccnnnnnnnnnnnnnnnnnnnncccctccccctgcccctgcccctgcccctgcccctgcccctccccctgcccctgctcctgcctctgctcctgcccctgctcctgttcctgctgttcttcctcctcctcctttttaaatctgtagctttaatataatggaagagttgctggcctcatccaaaatattcacattacagatgaggcaatggcccagagacatggagtgactgtctgcttaaagtcgcacaggcagcttgtggaagggtcacaactggatccccaaacctcctgcctgaaagccagagtcccagctttcactttgatgcctcatccaccaccctcccccccaaaagtatccattttcccacctgcttttgcagcagatcctgtgagcagatcagtcttgaaaatagtttccatccccggccccctctccgcacttgcttattttctcaaggttttaacggggaattaaaaacacttccatttgaagcttgcttttctgtctcacttattgagtgcccaatctgtaggcgcacatgcctaacactcttcccagaagaatgtacaagaatcacacgtttgactgctgtggatggcaggtgaaaaagaattactgccgtagtgtggaggcccttaaacatattcacggccagcactggattatcccagcccagatggatcaggcacagctcttcctctgcttactggtgacctttagctgtttttgtttgtgagtgcttctctcagagactagaaagaagaacagagatgccatgacttggtttcttgaccagagtaccggagtcctgattataattttagcagtttgtcctgttaaggcaggagagtgattgattgtaggagactctgaatggaacccacctgggatgcacaacttgaccttgattgtgaacagtcagggagcttaattgttgggttgaaatcctgttagctggtgcctagagtgagttactcaacagctctgagtcactgcatcctcatccttaggagggagaagtcagctgcttagaaacaaatagcacagggggatgcagctgggactcagctcttgttaggaattagcagaaggcgcttctctgagtctgtccccaatggctgatacaaggacacttgctctcttgacacttgaggtgctgaccctgctcacctggttaggataccagagagtctttgctggcagttttctagccaaacctgtgctctgcttctgtactgatctgtgtaccaactcgtaccattcagggaaaaaaaccaattgtcccctttggtggattctgtgaatctgctttccaagttgatttgccatgagggagtttaaaatataagtgaacttggcaattaattgtttttcaataatattattggcatttcttgggggatatgcagaggaaggttggtgtataaatgtcttctaagctgaacaaattcttggtgaaatgtaagtcccttgtgttccactgtgaattataggcccccaaggatataactgtgaggtaactgctggacagtcgtgagggttctttggatcgtgtgaaggttattattcctgtcattgtatatgtatatgtataaggttattattattcctgtcattgtatatgtatgtgtggggatgcatgtatgtgcacgtcgaggctccttttgagataggatccttccctggtccacaaggctagccactgagcccccatgagcctgccagttgctgtgtcccaacacgtactactactccacgttgctttttactgtgtgtcggggagactgaactgaggtctgaaagcatgcacagcaagcatctcgccgactgagtcatctacccccaggctcccacatgcatccgtcttagtccctgacagcggaagggacatctgacatggcattactgtggcacatttctgtatgctatattgactcattccctcatcaagtgattgctgcccagctgcactgtgctaggaccagaagatgtaaacataaacagcgagtcctgtctgctccacggagcttagaacttagacatgtgagaaatggcatgaaaatagacccacaagctaggtggtggcggcacatgcctttaactcccagtattcaggaggcagaggtaggtggatctctgcgttcaaggccagcctggtctgcagagtgagttccaggacagccagagctacacagagaaaccctggtcttgaaaaacaaaaaacaaacaaaaaagccactagaccctaaggagaggaagaaattaactcagatatctttgcgttccacagacctgacttagtacagactcactgaaatgtttgaatgctgtcagaagcaaaatttgctttggttttcaattcaaaatatccttagctttctaaagctgagtgtctcctctaggttcattattattctaaaatcctctaatacagtttagacactggggtcagtaaccacaaaggctgtttgtaatttgttgccacttcccagatctctttaaaagctaagcaagccccctgacttttgctccctaattcactaggtctttatgtatatacctgaggagtaacagtcataaaaggcccatgcaccagcatgttaacttcggggttcttacattgtggaatgtctcacgatggctaactctgtaatttttaaaggccgtgtaactccttctaaaccatgcatagcatctgcacaagaaatgtgacactaagtctaaggcttaaatagctcagggccactgtcttgtgccttgccagcaaatcaggcactccactaagtgcaggttaacaagaccagagcatcgtaaatgagcctctgccccgtgacccagccagagaccccttccatattctcagctcaaccctatagctctccctctctcacaggcttttaagattggcaggaggccacaccctaccatcccagtgctttgtggagtggctcaacattcactaggacttccttgccctgtagctctgatcactttaacaaagacaacaatagggagcctttgccagggaggaacctactcggaaatgcttttggagaaacggttaaaagcagcattgttagcaggagcatgcccttgtgcctagatgcgcttattccatgggacaccaacgctgattcgcctcctgacctgggcttccagcccaactgcatccttcctcttcaaaggcttggctctgagcggatcacacattttgcttgatgacaaattaatcaaacttgatttcttggatgagataggtactaaagagctacaactccccacgggccgaaagtcaatacggcccttctggctccgattagagaaacaaaaggatatctgagagccatcttcctccctgcctgggccgagggaggaggctgaaaggcagaggggcttgtaaaggagaggagccttattaaaacacatttcagctgtggccaagtgcacggcgagccctcctgatgactttgagagat

SEQ ID NO: 849 - DNA, 2536 bp, Mus musculus
ccgcggcctggccggcggagaacatggcgctgcccccggctgccgcaccccccggggctaacgagcctctcgacaaggctctgtccgcgttgccgccggagccgggcggtgtcccgctgcactcgccctggaccttctggctggacagatcactccctggtgccacagcagccgagtgtgcctcgaatctgaagaaaatctacacggtacaaacagtgcagatattctggagtgtatacaataacatccctcctgtgaccagcctgcctttgagatgtagttatcacttaatgagaggagagaggcgaccactttgggaggaggagagtaatgcgaagggtggcgtgtggaagatgaaagttcccaaggacagcacgtccacagtttggaaagaattgttgttagcgaccattggagagcagttcacagactgtgctgcagcagatgacgagatcatcggagtcagcgtgagtgtgcgggaccgagaggatgtcgtccaggtgtggaatgtcaacgcctcactagtgggcgaagcgactgtgctagagaagatccaccagctcctgccccacatagcttttaaagcagtgttttataaaccccatgaagagcatcatgcttttgaaggtggacgtggaaaacactaattgcactctgtaaagaattctttgtcctttgctgattggttttggaaacggtcttaacaggagggagagtgaagagaagacttgccgaagcccgatgctggtccatttagagtgggtttctgtccttgcaaaccgggccattaggactcaaagtggcaggtggggttggggaagaaggtgcgggtttctgccatcgtatcacttgctttaaagagaaagagtgagagaagaaagaaagaaagaaagaaagaaagaaagaaagaaagaaagaaagaaagaaagaaagaaagaaaagaaagaaagactttcttaaagctttccaaattctctgggtttttttgcactcttcccctccccataagattccttattcagggtaattattgttttctgcccaccctttcattgaggcataagagttgggtttccccttcagtgactctactgtaccttgttaaggaacatagccgccacaggactgcctgtgaagccacagggcaccaggaggaggcctagcctagcaaaaccctttttctgataaattgttgtgacacttccctgcatattgtgagctgggcattgtttcttttgtgtgtgtgttccgtagaaagcacactcaattgatagcacacacatcttaaaacccctttaaaaagcagtataaggaaaataaattgttggtttgcctaaaatgaaaactttaatcacaattgggtgtcaggctccaaatcaaactctaggttttgggggcctacagtgtaagtatttctaaccagaattccccctccccaccatatctgaccctttcaacaaaagacccaatgatttgtcctgagaggaaaccttctatttctgatttatagaggaggcgatgtgtattaattgtggggagtagagcttcttccatgttgcagcatgtttacccaaaccaattctcacatcttttgttaagtgagccggctttcctgcccctgtcacgtgtcctttctgaaaaccgatggccttcctgcagaggcgtctttcccctcatctgtgcacttacaggaagcacctagccactcacacagctgcccttgagtgcatctcattcctgtggactgtgttattcgatattggattatagtaccaaagaaatactgccttcagtagaagaaaacctttcagagcctcccagctcctcccagatgttccccggttccctctcatctttgccccacccctggtcattttccttcagaaagggcttctcccctgcgggcttgggtcagatccatgggccagtgtgcagcttctgttcttctcaaaagggcgaatttttaattccccttgcactgtgggaaggagaggtggggttacactaagccttccacatgcatttgtaaataaaattcccattcagatatttcagatggctctcggtagcatctgtttataaaaagtcaggggcctccacttgcattgctaaacaggaagccaaattaattagtggtcagagcgtaagaggcgcttctttcccaaccttaagtccctccacggtttcactcatgaggggctcggatccttcttgtctcaatgacgtgcatttctctgaacagtttctaaacttgttttaaaactataactcaaggactttaaaacttactgtagacacaattcctttttataatataagtatttttttctgacagattagcacaaaggatataattgacttcaatattataattgtcatatgcatatatatatttccataagtaaataaattttgagaaaattttatttttgaactttatttaaagcatttgtgataacatgttcaaattttgcgtgtatgtagcttttgaagtaaaaataaaataaaataaataggaatgttaggctcatgttaa

SEQ ID NO: 850 - protein, 203 aa, Mus musculus
MALPPAAAPPGANEPLDKALSALPPEPGGVPLHSPWTFWLDRSLPGATAAECNLKKIYTVQTVQIFWSVYNNIPPVTSLPLRCSYHLMRGERRPLWEEESNAKGGVWKMKVPKDSTSTVWKELLLATIGEQFTDCAAADDEIIGVSVSVRDREDVVQVWNVNASLVGEATVLEKIHQLLPHIAFKAVFYKFEHHAFEGGRGKH

SEQ ID NO: 851 - DNA, 88915 bp, Homo sapiens
tgcagacttcaaggaggtaaaccatgcactctgggagcccagaggaggcatgactgagccaagaagggtttccagaagccttggacctggatccaagatccaatgttcagccaggacttggaggtacagtggtatagattagttatgcctgtgccattccagttgttaaatattgtgaatttacacccctgctctagaggagttggtgaggaattgtcaggcagaaaggtgggaatgggctttccgggaagagtggagagctggtataagagtaatccaagaagggagagatgagaatacaagggaaggatgaggccagggtggtagagggcctgactgtgaaaggtctgtggcagacaaagaggtttctcctccatcctgtaggccttgggaaaacagggtggactctatctcatcaacccagtgatccacctgcaaaacaataaccctgagtcagccctaggacctggcaccctgtcacctgttagggagcagggcatttgagaatgtagagggctgatggtgagaacaaagacttcggagaaataattttgccgttttatttctttttaaaaaagaaagagaaaaaagggagggagggaaggaaggaagaaagaaggaaggaagggaaaagagaaaaggaagagtagaaaccaatatggcatttggtaaggctgagtagtggacacagagattatcactgttgttactgatttgttacatgcttccccactttgcttaaaatatttcatttaaaaaatgaatgtgtcacacctgtaatctcagcactttgggaggccaaggctggtaaaccacttgaggccaacagttagagaccagcctggccgacatagcgaaaccctgtctctgctaaaaatacaaaaattagttgggcctggtggcaggcgcctgtaatcccagctacttgggaggctgagctgtaatcccagctacttgaacccaaaggtggaggttgcagtgagctgagatcacgccactgcaatccaagctgggcaacagagcgagactctgtctcaaaagaaaaaaaaagaatatgtcaggtgtactgtacatttaaacagacatatagacatatggtccttctacaaaactatttgacaagatatcaaaagtcctaaaaatgcttcttttgacccagcaattccatgctagaacatacagacaaagatctatgtacgggaagcctacattgcttcaagtatagtgacaactgcgtgggagggtggggaagttgtgctaaattaacttcccaaataaataaaatgagcaattttaatgaaatcttccctaaatacatggtgcctgtgctggtacaataagtagagtactgtggacacaactaaccttttttttttttttataatttttgattaatgtaattaactatcaaagtacatgttaatagattcaccaatcctaaaagctgttggggtggccctttgcacctccccactttctgctacatagcttgtttctctggctcttttggttctcgtttcctttagttggctgttatttcttgctactctcacctgcacactcactagaaatcttgccttcccccatctaatcagaactttaaaacataaaaataaaaaacccaggtagccaagtttgaacgcatcatgtctgaagtaaatcatgtctgaacgaagtcctggaggtctgtctccaaccacctgaggaacctgttgaaatgcttttccccaggacccaactcaacatgtcctcataagactctggatcacacagacacttaatttgtatgaatgttagaatttgagaacctctggcttatgaattctcatatgacaaaatatcccttgaattcaaggctatgtcaggccaacacgtcacctctggtgcagctgagctgctgcccaaagctggagtggctcaggagtcagccatgatgggctggttcctgtgccatgccaggtgggaaaatcacagagacttggtgatctctgttttgggggcttttttgagacagggtctcgagagctctgtcatccaggctacagtgccatggcacagtcatggctcactgcagccttgacctcatgggcttaagccatcctctcacctcagcctccccagtagctgtgaccacaggtgcacattaccacacccagctaattttttgattttttgtagagacatggtctcgctatgttgcttaggctggcctcaaactcctggtctcaagcaattctcctgcctcggcctcccaaagttctggggttacaggcatgagccatcgtagactggttcgacctctatttggaactgagatcacttgggcaggtggagggttagatgaggagagaggtacttctgggctcctctatcttggggttggctgaggtttccgatcagtggcccttggatgattgaggccaacctggattcatgatgtggggagaaatagggtaactgtctcatattttccaagtgtgagactgtcttcacagactgattaacttccacaacaaaataaaatcatgcagcctatttaccagagatcaattaaattggccacactctttttataacttattcccattggactgaacatttaatagtttatattatactcagctaaatttcaatataatctaccacccccacttttacctagtacttttatcaaaatgatcgcttgtacttgagtttgatatgtttacttaaaagcttttttatgtcatttaacgaatagtcattgaaatgttgtcatccaaataaaaaaacagttttaaagccgtatatatgtctactgcttcttccctttaaagaaaagtttcgcagattttatcttgcattttaaattaagcctccacttttcttggatatgctgatggtcaaactatgaaacctgtaactgaagaacacgtgctaaaaggatcatagagcatgttatccttacataacatacttagaggcatgtaacatacttcgacgcatgtattattacagcctcaaacaccaccaccaccacaacaaaacaaccactccagaatgaaaatactggtatatttgtataatgcaaagagaaatacagatataaatcctcaaaacggaaggtacattaataaaaatgtagcattataagccaaaaatattatatagtacttgcagaatttagtctttcagtttaacattataatgtctaacaaagaaatattatttaaattatagttctcattattaatttaaaacaaccatcagtagaacagcacagcttaacctagcaaacattttaaggaaatgctttgtttcctagaaggaggatatcattatattccattcatttataccataaacaacagaagaacaattttcaaagtggaaattagtttcataagacagaataaaactgggcttctcaaagcacaagccatttccataaaattaattttttattggcaaaaaatacttaaaacaattttgatgtagtactctgcttctcagagccctcccaatcctcgaaccacaatctatacacacgaacacatgcaatactgtatttttctccacatcattactaaccaaaacactttactcttttaaaacttacaacttgacagaaatgtttccattcaagattgctataatacagagagcagttgtcactgacgtggtttttagcagcagaaagtaaaccgggaaccaaatcttacttgttacttactgctttaaaaaaatgactgccttgctactgatctccatctctgctctttaagttcaatatcaacactgagactttcaaagaaccagcgcagcacaaggaccctgcagccggcaattcagagggcatttcggacaacttccccccaccccccactttctcctgcttccaacagaagatcctcaagaaatctaacttgtgaagaagtccccctaggttcctctacttcactgcaaaatgtaatgccacttgaggttgtcaaaaatagcttctgtagaaaactggccatggtctttaggaaacgttgcatgaagaaaattagtacagcctttatagaaaaagaaaaaaaggaaccacacatggaataaaagacgtcagtaccgctacaaaaagactgcagggcctattgtcaggaagaaagtcgagttaggaggacgaatgtgcggagctggagtgggctgagcatcctactcctcacccaccccacccccaaaggagtcagtacaatccaagtgtctgtccacttcgagtcattttgaaggcagcttagaaaattaaacaggggccagaaggaaaagatacaacgtcaccgtccgagccaaagggaaaggctgggttgggggtctatgtggcggggcctccctcataaaccaatgcctttcaggtcgcagggatgggtcgcctgggtggtccgggggctctggcagcaggggaactgggccctgaagcagtccctcagctccctgttgaagaggaagcacacgacggggttgatgccggcctgcgcgaaggtcagccacacggaggccgtcaggtaggcctgggggacggcgccgggccgcaccaggacccgcaggtagctggccacgacgtagggcccccagaggagcaggaagagcagcgtgacggcgtagaacatcttgcacagcctcttctccgtcttgaattcttccagcacgaggaggcggcgcgcgccgcggcccggccctgcgggccggatgcccacaagcgcgggcggcgtgggcccgcggccgaagcccgccgtccagttggcggccgcctggccggtggcgcccgggccgtggaaggtccagtcgtggctgacggcgggcaccaggcgcgcgggccgcatcttgcggcggtcgtggatgaagaagagcaggcggaggtagacgaggtgcgtggcgcccaccaccacggccagcagcagcaggaagcccagcgcgccgggggcgccgtcgggccgctgctccagggcgcacggcgcgtcctcgtcgtcgccaccgccgtccagcactggcgggaaggccgcggccagcgccagcgcccaggcggcgcacaccagcatggcggcgcacggccagccggccaggcgctctgcatagaagcggtggtgcgcgatggccaggtagcgggtgacgcccacgcccagcagcaggaaggcggcgtggaagcagaagagcgcggccaggaaggcgagcagcttgcagcccagcgcgcccggcggcgcccccgccgcggccgccgcacgccgcgccgccagcatgacggccgggaggcaggcgagcgcgcgcagcccgtcggccaggcacaggtcgagcagcaggtagtacggggcgcggtgcaggctgcgctcccgcacgatcagcagcgcgaacagcacgttgcccgctaggctcacgcacagcagcaggctgagcgtggccagcttgaggcccagggcggccgcctcgccgccgccgctgccacccggctcgctcgcgttcgccatcgcggcctcaccaggccgtgcgctccgccccggggccgtcccctgcctcgccgctcccgcaggccgcccggcccgagctccgccgctccgccggccctgggcgagctccccgtcctgcggggctcagcccgctcccggccggcccctcctgggctccccgagccgccgctgtgccgccgccgccatctcaggaatggtgcgcgcaggaggaggcggccactccctgcgccctaggcgccgcgggcttcactgcggacagggcctcgccaccgtccgcagccccccgcatcctcctccgtctcctcctactcctccgctgctgccgccgcgcctcttggctctgccccccgccgggcccgccgccgccgctgccgccgctgccgccgccgccgccgccgccgcggagccccctcccctccgccggagcgcgcagcgcggccgccgccgccagccccgccgaggcatcccgcaccgcctgggcccggctgggctgggggcgcctccgcagcagccgcggggtcgggaggcggccgggagggaggcagggcccaggacgcaaggtggcgacaagtcgcgtttggccccaggtaacgggggtccggcggcggcgcccgcgctggggtcacggtggccgtgcgcgggggaggttgcctgggctggcagggtcgggaggcctcagaggggacaggaatatctggaatgagccttctgcccgaaagctgggagtaatttacgatagtaatagtcatcgtaatcctaaaaccgctgatactcaggtgcgcactgatgtgggtggcagtgtgctggggagcttggcaagcattatctccctcaacagtaatcacgaagttgttgccatccttaatcccactttatacctcaggaagcagaggcttggaggtcaagggagttgagagccgggaagtagcggagctgggattcaaatttcgcttggtctgatttccagtgctggactcacagcgactccgcagcatcccctgctcgctaactcatccgtgatcccggtgaaggacctatatcagggaaaagaaatgcagcatttcatctttaagtgacttggaaggtgaaccctatgccaccttcctcccaggatatctattttctgggtaagcctgaaagggcagcccctgttatgattctcagacacaccgcatttgtctcgcaggaccttgcatgtgctggtacctctgcctggaccagccccacaacaggctccctctccgtagggcctccttctaacccgtctgttttactctgtatccctgccctctagtcatttccttcttagcacttataatttgtcattatatactttcatttctttttaaaaatcatgctcttctaactaggctctaagctctttgaaggcaagggatcatgcctggtttttggtaccactgcatccccagtgcttagcatggtaaagccagaattaagcaacgcattgtttctcacccacactcattttttttttcttctgtgcagaaaattatttgttgcctactgattacatgcaaggcaggcaccttgatgggcattttcaggatagtgcaagatcatagagggccttaatgatcaggctaagaagtcgaaactttagtctgcaggcagtcaggagcccttgaaatcttttgagaaggggagcgacatgactaggtgtgctccaggaacattattctggcagcagtgttgaggagggatgacagagcagagccggtaaacctagtccagagcctcaaacttcactatgtgcagaaatcactggggaccctgttaaaatgaagattctgatttagtagttctggaatggggccggaggttctgcatttctaacaagctccggggtgagactaatgctgttggtctgctgaccttactttgaatagtaaggcccttggggacagtttggatatttttttaaaaatctaagtgatttttcaagaaaatcaactattgagcacctgacttgggactcctaagtggccagcagcaagtggctgaccaggcacatctgtaaatgtatgttgatagaaaatagattttggagggtgtatgggttaggaattgcagtttgatactagtagcaaaaaacgtgtacatgagtttattttcctcgtgaaagaagaagtttggaggtcagtagttgctgacattgatttattggctcaaggactgaatctctgaaaatcttttagcccttccctcatgatcacagtaggctgccgacgccccagccatcatttcttcattccaggcagaaagaagaaaagggaaaagagcagcaatattccagccatctaagtaggaagagctttctagaagccctacattataaacaaacacttaaacatatcattggctatcaattgagagtgagcacttgagcaagggagggtaggaaatggtttcttatttctttgtttaaagttagacccatggctgtagagaattcgatcctgccttgctgtggcccttagcgcttgggctgcctctgcccagaggagggaatgccttcttaataacccacacaaattcaccaactctggttgctttatggtaatactaatggcagccaccttttactgagcacttgccgtatgccaagcattgtgctaaattctcgacatgtgttatttaatgtaatcattgtaatggccagatgtggtatgtgctgttactgtcttcattttgcagaggaggcagaagggttaatttgttcacgctttcaccacttacacttactttacacttactttcaagtaagtgtaagagctggaagtctgactttatttattttgaaacagggtctcactctgtcacctaggctggagtcagtggcatcatcatggctcactgcagcctcaacctcccaggctcaggccgtcctcctatctcagcctcctgagtagctgggaccacaggcttataccaccatgccccgctaatttttaaaaaattatttgtagaggccggatgcggtggctcacacctgtaatcccagcactttgggaggccgaggcgggtggatcatgaggtcaggagatcgagactatcctggctaacacggtgaaaccccgtctctattaaaatgcaaaaaattagctgggcatggtggcaggcgcctgtagtcccagctactcaggaggctgaggcaggagaatggcatgaacccgggaggcggagcttgcagtgagccgaaatcgtgtcactgcacttcagcctgggcaacagagcgagactccgtctcaaaaaaaaaaaaaaaccaattatttgtagagatggggtctccctatgtttcccaggctggtctagaactcctgggctcaagtgatcctcccacctcagcctcccaaagtgctgggattacaggcgtgagccaccacacccagctgaggaactctgtgtttagagtccatcctcatgatctccacaaacactgcctctttgttataactgtgaagaaagcttttgagtttataaaagcagtaaactaacatacacaaactactgatgctcccgggcacagaattataacccctttcgagagggaaggatttttcaaaaccatctaatcctaacacttgaattttacaaacagagaagctcatgaatagctgagtgggagggagaacccaggtcctcccactcctaggtcactaccttccactttaaatcttcatattttttattctaatgagcacatggtgttcgacaagtcacttaacctcttggaatctcaaatgtgtccatttatgaaatgggacgttggaccaaatgatttctgagggtcctgggctctgaagttgagtttaggtataaggaaatggaagttaagtgattatgtctcccaaatggggagagatttatttttcagaaaaggacacaaaagaagagacattattaattccttataacttaaaattttctgttttctgtttctatctacggtgcaaaatgctgctcttgagatttggtttagtcattttcccaggctcaaatagcagaagcagcagtagaaaatacataaatcatggttctctcacagcatttatatgcctacttctttcattatcaacatttgttcagtagattaatacttaaggaaaaactgttcacatttcattggccaggatcaacgtattttccttttactgtttctaggaagctgcaggcaagaattttaaatgctttcttaggcaccaaattgcatgccttcatctcaaagcaaaacagctctatgacatttttttcctataagaaaatttccattattcttgtataatcaaattattccttttggacatagaaacaaaagtatttcccacccccactccccaaatcatttatgtcacttctttgatgtacgtatagatggtgtgaatggtactagaaatcctgactgttcagaggaactggttggcaccctttggcagatacagtcaaggtcatgggttccctaatcatgaggtccagtctggccagtgtatcctgtttaacctcaggcttctggccagtcacctgccaataggtacattaaacaccaagttagagaaggttggtttgacttaactccatcccaactcttagaaaaagtgagccaaagtctaggcccagtggatgttggattatcaaagggcagcactcaagttgacctccccatgggacgaagtcataactttgacaatgaaagtgggccttgcggtgaggaccactctggttcatgtccagtttccaccactgactagctgtgcattagtggtagttgtacatgaaccagattgtacctaactgtaaagagcccagactttggctcattgggcaagtctcttgcctgctctgaacgtctgaatatcaaaagcccattgtgggaagattcaattaaatgagattcatttacaaagagtgtagcacaaggtgtgcacacaagtcgtgtgcaataaatggttaactacacttatgcatatttgctcttacctgactatataaatgtcttggctaaccatgatttaattgacttttgtatttcccacctcagcttaacctagcaggatgccctgtacacagtaggttctcaatatgtatgtggcaagtatgagtgtcagtctatataatcaagagtgcaagaagtgcagctgcttcctagaaacctaatttctgactctgtgttgccattttgtcttgctggtggggaaaaaaagaggtagccttagtgcatcttgggtttcatcatgggtccttgctttctcggaatatactgtaatttcaggcaggtgcctaaattgcctagtatatggtcattcaggatagtgcgcgcatgtgtgtggggtgtcccttctcatatttcatcagttgttggcatatcgttcctgttcttccaagccatcgtggtttggtgactcttggctgccttgtgccagacttgtggtgtgagaatctgggctgaggatgcatttgatattagatgcatccacaggtattcttctcagcagtatatctgagaaactgggtgcagctcccctctctctcagtacccttctcttctcctcctcctaccttcatctccagggactccctatatactctggaagagggtgaaaacccagttcttccttgttcttctggacaatgtaattatagtcatccctcagtataaacagggaattcgttccagggcctccgcgtgcacccaaatccatgcatactgaagtcccatagccagccctgcagaacccatatatatgagaagtcagctcttcatatatgcaggtttcacatctctcaaatactgtatttaccatcttgttttgattgaaaaaaaaatcacatataaaccaacccatgcagttcaaacccatgttgttcaagagtcaactggaatcaatttccctgggaagctgtgttccccaaattcaggtgtttggaaaaaataaaagccgggaagccaccttgccgtaaacctctcctagtcaaggaagcccagagcctgctatccacttgaatgttgggaaggaaagggaaaaatagaggaagaaaaatgatcactgcatatctcaaaatattgtgcttgctgtctgtatttgttgaatgaataactgaatatctttatgtgtatatgtatagcatattgttaaacttcatttaagcaaaatatgtttagtgaaaactctttaacagttggttttctttctccacatgcaagagaatgaaattgcgccccaaccccaccccatatattttaaaaaattcaaaattgatgatagacctaaaactcagggctaaaactataacaactcttagaagaaaatataggagtaaattttcatgactttagattaggaagtggtttcttggatatgttcccaaaaggataggtgacaaaagaaaaaaatacataaattggatttcattaaaatttttagggtttgtgcttcaatagacaccatcaagaaaatgaaaggcccgcctacagaatgggagaaaatgtcttcagataatgtgtctgatgggggacttgtatccagagtatataaagaactcataactcaaaaaagacaacccaattttaaaaatggacaaaggctttaaataggcatttctctaaaaagaaatgtaaatggccaataagcacatggaaagatactttgcatcattagtcaataggacaatgcaattcaaaccatctgagataccacttcatatctactatagtggctattatcaaaaatgtagatgataacaggtgttggtgatgatatggaggaattggaaccctcagatgatgctggtgggggtggaaaatgatacagctggtttggaaaatgatttggcaactcctcaaaaagttaaacatagagttaccttatgacctagccatttcacgcctaggcatttacccaagagaaatgaaaacatgtccacatgaaagcccacatgtaaatgttcataacatcgtcattcctaataaccaaaaggataaagcaacacaaaggtcaatgaatgaatggatggataaataaaatgtcatatatccctacagtggaatactattcactcataataacaagtactggtatgtgatgctccagcgtggatgaaccttgaaaatactgtgctcaatgaaagaagtcaaacacgaaagaccacatattgtacaaatccacttacatgaaatgcccagaacaggtaaatccatagtgatagaaagttggttagtagttgctgggagctgggggaaaggattggagagtgaccactaatgggtccagagctttttggggggtgatgaaaatgttctaaaattaggtaatagtgatagttccacaactctgtggatatcataagaaaacagaattatcaaaaaaattcatatgaaagtgaggtcacctctgtggcctatggaggtgtctttattaaaaggtggataggagcctggcaagtaacatgaactcctagttatggctttctgagtgagtgcagattcttaaggtgtgatttcttgtactcttacctgaggctggccacagaaataagtcatgccttgccatatgatcatgtgcataaggattgccccctttggtgggccttaacgtttacgtgctttggggctttgatgtttaggtaaacctgggaagagagattaagaaagttttatttaaccaatagctttatattacagcacagccactagaaaagctatcattttttagatccaaaaatgcactaagctgttttgcatatatgattaataatttactcctacaaaatctcctaccccagtttgacagatgaggagccttgagttttaaagcaattaaccatagtctgtggtcacacagcacaaagtagaagagcaaggtaaaattccagtctgtctggaccaaaagcctgaattcttgacaaatatgtacagaaagctttgtcgactaatatataattgaaagaaaatctattgggatgatagaagtattaaactgggattgtatctgctagtacagaattgcgaaaaaccattatgctaacggcataggtggcagtattttaaccacctgaaaataaacactttcaatatcgaaaagaaacaaacaaggagtctacactaacatgttatcactatttacaatgccattattgatatttctataatggttttctaagcaagttatagcaacggctccaagtgagaaaaaaaggccttcttaaaaaatgtggcccctttcttttgcattatatttactagctgtttaaactctctctagtggttaagtcatgttgtgatcctaaattttgcattgatagactcaatgcaaccaccaggactacagtgctactgggagtgccgaagattacaagatcaaacctattccttaagcatctcttcatgtgcatggaataatggtataaatattgcatatcaaagctgctactgctgtaatccttgccttcatctcctttctctcttatttggtcgaaaatcaaatagtgcatcgattattgatactttctactctagagaattacagtgaatatactttatatggtggcgatttggggggtacatccatataaaatgttctgaactatggaacaggttcatagttccataagacacatctttaagttcctgtaagacacatctttaaggatgtacctactgtttcttgaattgctagtttacctattatgcaacgagttccttgtaataaaatatgaaagtttggctcttttaaatgcccaccctctatatacatacacctcccacacacatataaattcttcctatgccaccagcaccaagctttgcattgggtttttatttagatgaggtagagaccctttcatttgcagaattgtaacagttgttgaggagagcatctgtaaaaataaatcttagagataaggcagacagatttttatgataaatcacataaaaagtatgacttgggttcgattctccttagactcccatgtgaacttgcagtggtctgatttccatatgtcaaacattttggataaacagctgcatttctcagagaaacccctgctaccacccttccttcattctcttacttcatctggtctggacagctccctgcacagctgtggccctggcactgccttccaaagcatgctgttctcttctctccctgtgagacttcctgtttcctggaatgaacccacatctttctctttcttgttttattcttttgtttcattttcaagtggtatacatatatcagtagcttcctgagaaagctgctttggacgtaaatatatatatttttttgagacggagtctcgctctgtcacccaggctggagtgcagtggcacagtctcggctcactgcaacctctgcctctcaggttcaagtgattcttctgcctcagccacctgagtagctgggactacaggcacgtgccaccatgcccagctaatttttgtacttttcatagagacggggtttcaccatgttgatcaggctggtctcaaactcctgaccttgtgatccacccacctcggcctcccaaagtgctgggattacaggcatgagccaccgtgcccagccggaggtgaatattttaagattttttacgtatctggaaatgctcttactttaccttcttcatacttgatagtttggctgggaataaaattctactgggttggcaattatgaccaatgatattgaacatttttttcatgtgcttatttgccatctacctatcttctttgctgataaacctgccatattttttcaataaatcatttatttttcttaattgacttttaggagttctttatgcatcctggaaaaaagttcttttttggatataagatttggaaatcctattttcccctggtttctggcttgtctttttatttttttaatagtgtcttttgaagagcagagattttaattttgatgaagttcagtttatcaatttgaattattttatgaattatgcttttacatcatatctaagaaattcttgcctaaaccatggttgtgaaaattttctcctatgttttcttctagaagttttatgattttaggttttttacagttagttttatgttccatgttaatattataaatggtgtgaggtggattgaatttcaatggattgaaattcatttttttaatgtatggatattcaactgttccagcaccccttgttgaaaaacttactgcacctttgtcaaaaacaaattgtccatatatgtgtgggtcttttcctggactctttattctgttgagtttatgtgtttgtctatcttgatgtcacactgtattcattattgtggctttataataagccttaaaatcagggagcattatttctccaaattgttcttctttttctagttgttttggctgttcttggtcattagcattgacatatgtgttttagaatgaagttatctaattctatgataaagcctactgggatattaattggggttgtgtctagatcagtttggggagaattgacatcttaacaatactctcctatacacaaaaaaggtgtatctcttcatttcttcagctcttcttttatttctctcagcagtcttttgtacttcccagtgtatagttcttgtatatctggtgtcagaattatctatcaacattttgtgtttttgatacttttatgaatggtatttttaaaatttttaattgttcatttctaccctaaaaagaatataattgatttttgtatattgacttcatattttgaaattttgctaaactcacttatttcagttttttgagggtaaattctatcaggttttctacatagacatgcgtcttgtctggaatagacaatgttaccgttttttcagtctggatgcctttttatttctttttcttgccttgttgcactggctagaacctttaatacaatgttaaatagaaatgactggagctaaccttattggtctcttctctcatattaaaaggaaagcattcagtttttcaccattaagcgtgatgttagctatggatttttataggcgcctatagatgaggaagttcccttccattcctactttgctgagaggtttttgtttgtttgcttgttttaaaatcagcagtgaatgttggattttgacaaatgctttccatgcatctattgagataaccacactgatttacatttttagtttgttaaatagtgaattgtattgattgactttcccatattaaaccaaccttgcattccttagataaatatgacttggtcatgaactactatcctttttgtatattcttgtattatacttgctaaaattttgttttgaatttttacatctatattcatgagggttattgatctccagctgtttttctttttttcttgtactggctttgtcttttggttcaggatgaaggtgatctaatagaatgacttggaatgtattctctccttttcaattgttttttaaaagtttatgtagaatttttttctttaatgtttggtagaatttacttgtaaaagtatttgagcatggagttttctttgggggaaggtttttaactatatatttcatttcttttatagatatatggctgttcaagttatatattttaccaagtacattttggtggtttatgtctttaaaggaatttgtccatctcatctgtgttaccaattcattggcataagttgttaataacatttcattgttatcttctacatagctataatataaagtcagtattgatatcttctgtgtcatttctgatagtggtacatttttccctgaatagtcctgccagaagtttatcatttttttcagtctcaaataaccagatttttactttcattgatgttctctactgtttttctgttttctatttcattgatttctgctctgatatttattatctcctttgatctatttaatttgcatcctatttgcttttattttctagtttcttaacacagaagctgagtccatctatttgagatctttattcgggcatttgtgttataaattttcccctaagaactgttttggtagaattccatgaatttgataggtgtttttttatattcattcatttcagaatacttcctaatgtccttttgatttcttttttgatccatgagttatagagaagtgtgttatttagtttataagtatttgggggattcccagagatcttgctattattgatttctaattaaattccactgtatcagagaacatacttgtatgacttgagttctgttaagtttatcaagacttttatgacccagaatatggtctatcttggtaaacattctgtgtacccttgaaaagaatgtgttttgtatggttgttgggtgaaatgttttgtaaatgtcagttgggtcaagatggttgatagtgttgttgaaatcttttatgttcttactaaatttctgtctacttgttctagcagttattgagagatgagtgttgaaatctctggctataattctggatttgtatttctccttgcacttctaacagtttttgtttcatgtatcttggggctctgttatcaggagtaaaaaatatttagaattattatatcctcttgatgaactgactcatttatattactaatcgaccctcttcattccaaataatattctttgctccggaatttacttagtgtgatataaatatagcctctccagctttcttttgattagaattagcacaatgtaccttctttttttactttaaaaattatttcattgtaggatatgctcataacatcaagctaaggatcaatgtaactcctacttttgcttacaatctatgcctgggattccaggatgtgtgtgtgtgtgtgtgtgtgcgcgtgcatgtgcatgtgcatggatgtgtttttttgtttttattgtattttattttatttgagatggagtctcaccctgttgcccaggccagagtgcagtggtgcagtcacatccactgcaacttctgcctcctggtttcaagccattctcctggctcagcctcccaagtagctgggactataggtgaatgccaccacacccggctaattttttgcatttttagtagagacagggtttcaccatgttagccaggatggtcttgatctcctgaccttgtgatccacccacctcagcctcccatagtactgggattacaggcgtgagccaccgcggccggctgggatgtgtggtttttaatgaattcttacaattcttttgttcctttaacaggttttctcatatattcctggacaatagtaggtactcagtaaatatttggttgtttcgttttgttgtttttcgagacagggtcttgctctatcgtccaggctggagtgcagtggcacgatctcagctcattgtaacctctgcctcctgggttcaggtgtcctcccactttagcctcccaagtagctgggactacaggtgcacaccaccatgcccggctaatttttgtattttttgtggaaatggtgttttgccatgttgcccaggctggtcgcaaactcctggactcaaacgatccacctgccttggcctcccaaagtgctgggattgcaggcaggagccaccatgactggccaatatctgttaaatggaatgtttgagtctactacatgcagaaagaaaaatgcacactctgtcctttagttttaatctattgttgcctttatatttaaagtgcatttcttgtaggcagccttattgttggttcttgcttttatattcaaccaaataatggctgaaattcaattgggaatatttaaactgtacatttaatgcgaatattaatatggtaagatttaaatctgtcatcttgctttttgttttctatttgtcttaactgctctttgcttcctttttcctatttttatgctttcttttagattaattaaatattatttataatttctttttatctcttttgttggattattagttataattctttgctttgttattttagtgctttatttaggattcacagtgtacatttttaacttatcacagtctaccttcaagtgatattatacctcttcacatacactataacaatttacagtggcatattctcatttctccctcccaacttctgtgctgttattgtcatagatttttcttttattcatgttataaagcccatagtacattgttattatttttatttaaacagtcattattttttaaagagattttaaaaataccaaaattatgttatattttacccatgtggttatcatttccagtgccctttgtttctttctgtacatctacgttcccttctggcatcatgttccttcttcttgaaggaattcccatgacatttcttttttttttcagacagagtctcactctgtcacccaggctagagtgtagtggtgccatcacggctcaccgcagcctcaatctcccaggctcaggtgatccttccacctcagcctcttgagtagctgggactacagccatgcgccaccacacctggttaattttttaattttttggtagagacagggtttcaccatgttgcccagactggtctggggcacatagcctcaggtgatcctctggccttggcctcccaaagtactgggattacaagcatgagcaactactcccagcctgtgacatttcttatggtgttgatttactggtagtggatactttcagctcttgcatatctgaaaacatctctatttctctctttttgtttttgtttcactgattttctctattatttttctgttttgattttattaattttttattttattaatttctgctctttatttttctcttccttatgcttgctttgggtttactttgctcttcttttcctagtttcttaatgtaggaatttaggctgttaatttgaaacctttcctcttttgtaatgtaagcatttagtgctgtaagtttccctctcagtagtgctttagctgcatctgacatgctttaatatgttgtattttcattttcattcaggtctatgtatctttgaattttctttgagacttcctttttaacccatatatatatatatatatatatatatatactgttcaattttcaggcatttggaaattttctggttctttttctggtattgatttattttacatttgttaagttttgttttatggttcagaatgtaatctatcttggtgaatattccatgaactcttgaaaaaaaaattgtgttctgctaaagtgctatatatgacaaatagatcctgctgtctgatttgttgttcatttcttgtatatccttgctgatgttctgtctagcagttctatccattgctgagagtgggctgttgaagttcccagctataattttctattgcctatctcctttcaggtctgtcaagttttgcttcatgtattttgagcctctcttgttcggtgcacatatatgtaggatcattatgtcttcctggagggttgattcttttataattatgtaatgtccttctctgtctctgttaactttactctaaaatctgctttatttgatatttatatagctactcttaactttgtggggttattgttacatgatatctcttttttcattttttttccctttcaacctacccacattgttgtatttgaagtgagttttttataaatagcattttgttgcatcacgtttttttgctgttgtgtatttgcttgttatttaatccactctacctggtgggggtaaaagtctaagattctcacttggccttgctggcttaggtaggggaaggatcacagttttttctgttgcatttggctggcatagttagttttctgtcttgcaaggctgctcctttggctagagaaactagactcttcttgtctgcgcttgttagcattttcaggttgccagcttctccatctctgagtctaagagatatgagacaaaaagaaaacccagggaagttattgctgtgttgttctttaactactgaggtccctaactggtattccactttttggcctctttcagagtcttcttatgtttattttatataatgttcagggtttttcactatacttcgtgggaggaattgagaaagcatgtcttattccatctttctggcagagaatcttctccatttttgaatagatatttcactgagtatagaattctaggttgacaggttttcttctttcagtactttaaagagattgttctgttatcatcttagttgtatgatttcctatgaaaaaaatctctgttgttgttgttttttgtttgtttgtttgtttgtttgttttttggtagagatgagagttcttgctatgctacccaggccggtcttgaactcctggcctcaagcaatccccctgccttagcctccccaagtgctgggtttacagatgtgagccaccacacccagcctaattcttattttgttcctctgtataaaatgtgtctttttttctgcactgtagcagtttgattatgcccttgccctgccttggtgtgattttcttcatgttttttgtgattggagttcattgagattcttgaatccaagggtttattcctcttaagcagtcactctctaaaagcaggtggctcaacccaccttacagtaaaaattagactgctattaatttgtagttgaactctgatattttccaggttctaaattgtttatttaataggtggtcatatgttttgtacaccagatattcaagcaccttctgccacagtgctctgttttgaacatttagggcataacttgaatattttcataagtcaaagactcacctcattttccagatcatagagatgacttcggagaagtgaaacttttcctaaagtttcctgaagttgcaactgttaggagcacaggcagacttagggtttgaactccatacctcttgctgggtgatgatgggaatgttatttaaccattttgagcctccggtgtgtaaagtgggagatgataatcatacttgttaatacctcatcaggttgatatgtgaattagatgagaatagttaaggattcacaaaatggtagctattgttgctgttgatatttttctttaatagactttctttttttagagcagtttcaggttcacagcaaaattgagtggagggtacaaggagttttccatttatcctatcctcacttatgcatagccttctccattatcaacatgccacaccagatgggtgcattttttataatcaaggagcctatattgacacatcattatcaaccaaagtccatagtttacattagggctcactctcggatttgtatattctatgggttttgatgagtgtccaatgacatgtatccaccattatagtatcattcagaatagttttattttcataaaaatctttgctccgcctattcattccttcctctcctacacctgaacccctgacaacccctgatcctttaactgtctccatagttttgccttttctgcaatgttatattagttggaatcatacagtatgtggcttttcagattggcttcttcacttagtaatatgcattaaagtttccccaatgtattttcatggtgtaatagctcattgctttttagcagtgaatgatattccattgtctggatgtaccatagtttactgatctactgactgctaaaggacatcttgtctcctttcaagttatggcatttatgaatgtagctgccataaccatctctgtgtgggtttttgtgtggacgtaaattttcagctcaattgggtaaataccaaggagtataattgctggatcatatggtaagagtatgtttagttttgtaataaactgccaaactgtctttcaaagtggctgtaccattttgcattcttactagcattgagcgagagttcctgttgctccacatcctcaccagcatttggtgttaccaacgtttcgggatttagacattctaataggtgtatagtggtatctcattgttttaatttgcagtctccagtgacatatgatattaagcatcttttcttggtacctatttgccatctgtatatcatcagcaagatgtttgctcaggtcttttgtccaattttaaaatcatggtgttcattttcttattgttgaattaaaaaatttctttgtagattttggagctattggtatttttatttgaattactattatcttaagtgcttggacaagagtttcattaagacctcagcattttaaccagtaaaacatgaaaatgttttcttctcattttttggagggaggtggataaatgatcttcacttgaaaaaaaaaaaatgaaaagatgttctgggttactttgatccagaaagaacttcaggctgcctcttaagtagagctgtgacttcatgggcccttcatgctctaataacctccccacaaaattagtttgtgccatgtgtttttcaacaattgccttattaaggagtgggaagtacctgcttagcacagtattgcgtttctttgttaggaatctgtggattcacaaggtgctctgctgttatcagggtggtgacattacacctattagcaagtctcctcaacttgcagagaactgctctggcctggatcattctgtagaaaaactagttactaatgctattgaagaaaaatatgtcccatgatagatggaggtattatattatctgatttccattctcccacccttcactatgcatcaatagatttatatcataggattcattttcgttttatgtctttttatttacgcaccaattcttttgcaagtaattttaattcttcgttttatgagaatgaggctctgtgcctgtgtactcctatgtaaaataaaggaaattattgtttttaatgcagatttgaaaaaaatataatggatttcagctacaccaatctctccccatttagatgagatgaacacctagttagatggggaacgtcattcctcatataatttgaatacatcctgtttccatgacaacttgtacttaccagcttgcctggtaaaagaagtgcttgaattcttcctctgataaaagatttgaccaaccactggggccccagtttcttaattccaataatttcattccagcctggggccagttttctttttaacatgggatgatgttgaggattagaaaccaaaaaaccattttagaggtgaattcacctccaaaataaaaggagaggactcataggccaaatactaatgagcacgagaaatgaagatacttgtgcaggtcatagtcattttctgatatcttccagttaaattgaatcaacagagatgatgcaacaacttattaagatgctatttgatttgacaaagaatgattcagttattcatttccatctggacgttataatcagttggcttgtttttttcactgctaatttatatcttgcctttatgggtggcttgtgccctcttactgctgaatttcaattctaataaggagtttggttttattaatgattttccctcagaatgaaaaataggaaattatttgcatcattaactgtgcttttgcaaactatgaaaaacatgatactgcatttaattgacaaatttatgtttcatgtgttataaaatattttagtccaataaggcaagcagacatgacccttaggcattttaggaatgatagggactcatcccaaatttaggataattcacagtgtatttctgagtgacctggtaggttttgaaaggacaaaagtgactcagctatctccaagatcattgtcaaccacagtatatatttgtgacatcaaatacttgtataaagtcatctgagggataccatgttcatcatagcctccatgagagctcctcttttgtaatgatgacctagtatgatcaatatgtgcatctttttagcctctgggaataagatactgtcttaccacaaacactaagaaaatttaaagcaaataccataaggtgcaacctgccattatgtagataatatgtaactaataagaatgaacaggaaaagagtgaaaaattaacaggatctttctgtattgtgagtatgcaattcctgctgatggtaaaacaaaagagattcagtaactgaaggggtctcattggcctaaacactgcaagtgtccttctgtttctgaatggtgcattttgcacagtagttagagttctaaaaatgtcatgtaattatgattttttttagaaaacaaataatgcagcttcctttcaagaattgctttattttcctttactaattgttcatcaattgataatggcttctcaaactttagtgtacttagctcttaagaagtaaatgacttataaagtatttcaatctacactttaatgaatggttttaaatcacagaaggattcattattcagatatttattgacttcccagtacatgagcagtactttataatagtctctgaggacctcaaaggtgagctccccacccctcaggaagcttgggttaaatatggtacagggaaagatggtacaggaggtctttttgcagcctgactcataacctcctaatattttgccaaatcagcttatattttctgtatcaagatttcttatgtcataaatatgattatttcagcttaaaataaagcttcggaaagcacaatacacttcctcagagaactggcttacaaaatgttcccctaaatgatctatgaaccgtaaatgaaatccccaaaacaaaatcttatccttaaagcagcttcttagatgtaaacaaatgacttgcttgctgttgatttatcccactaggcgagcagttatcagctcatagtggggattagaggcctccaagatggttgctgaaatcctctggaacaggcagtgctccaggacccgctccttgtgtatctaccgttcgggttttcccaggaccaaagggttttctgggactcagaactttcagtgctcaaattggaacagtcctaggcaaattgggacagttgttcactccacctgtctctagatccccaacgagcatacaaaggaggacactcgtattcaaaaagcagagaagatgtagggttatcccctccaggaactgtgataaggaaacgagaatcaacacttgggtgacctttttttgacttttatgtagagcctcaccaaatgttcctgatttgatccttcaggcagcactgcaaagcaggtgttattggcacactcattttttaattgagaaaaaaggagactcagaggttcaccgatttgtcccaaagcacatggctgttagacattggctcaagcacatgtttttggactttcctctgatcacattgcctccctactgctcatcgtttcctttcttttaaaaattgctgaagaccaatttgaggcctgccggctctccccttcagtccagtttctgatgtaagctatctctgtatctctgattgattggctggccaggaatgttcagaactactctttgataagaagccagtgattggcagagtgtttattacagggttgcacatgatagccacaatcactggtaataatctgtgtgcctaacaggaggagttggttatacaaatcattactcctccaatcagtggaattctgtgtggccacaacaaaggtctttaatcagagctcttagactggccacaaaacctatatactgacatcgttgggactttttttttttaaatcagggaagagatttttttttaaatcaggaaagtagtttgggcactgcccagctgtgtctctagaactctgtgaatctcttgtccctatctggggtgtgtttggtgactgattccctgtgagggaacttggcctggcccttgaaggatggttagacaatttagatggtcagaggagagaagaaaggtctcaggcaaaagtgtggagatatgagtacatatggtgtgtttaccaagtggggagtaagcccatcattgattcagtaaagctgggtctcccatgtgccagacaccgtgctaggaacccagaagacagtggtggagggggtgggcccaggcctgtcttcgggagctcatgttgtggcagagctgaaaatgcaccaagaaatagggacaaatctgtttggaatatatatatttccatgtatagctgtttctccaaatatatagatttaacatatatattccaagtatatgtaaatataggtgtataattatatctctctaaatatatttggaaatatactcgcaaatgcatttgaaaaagggggtcaaggtgtggacaatttcaaaggctagattccagatttcagacctcagcctgtgagaaacaggcagcgctttagggcttttgaacaaagaagtaataggacaaaagtgctttttaggaagaccaacatgccgtccatgagaaagatacactggcagaggagaaagacaagaaattaggagacaaagtcacagactcttcctttcaaccaatatctgctgtatacccagtttgtttccttaataaatgttgctggtgtgccagccatggacaggccctgcactaggcactgggtggacaaaggtggacaagagaggcctggccctccccacttggactggatattctgtttcggaagatcggcagttgatgtgtgcagctgacacgtgcactgaaaaaaataatgaggaaggggagaagacctgctttagagtggaggcctaaggcaggagaaggagtcagccatgcaagcggagggactagcagttcaggagaaagaacagcatatgcaggtgccctgtggccacagagaagctttgaggcagggggagagatcagccatggatttggaaaggcaggaaggatccagaagatgccaagtactgttggccaccagaaagagtctgggtttttttctgagagcaggcagaagcaaaccagtgtttgaggactgttgttcaggctgctgtctggcaggagatgagagggtcgggtgttagaagcagggagacccgttaggaggctgttgcagtcctccaggccatgcttggctgactcaggagtgaggactgggagtggctggcaccagtgggaataaagaaggaagagcaggctaggcactgtggctcacgtctgtaattccagcattttggaaggctgttgtgggaggatcacttgaggccaggagttcaagaccagcctgaacaacatggtgaaaccctgtctctacaaaaaatttaaaaattagcagggcatggtggcatgtgcttgtagctactggggaagctgagatgggaggattgcttgagcctgggaggccgaggctgcatgagccaagattgtgccactccactccagcctgggcaacagagcaagactctgtctcaaaaaaaacaacaacaataataatagagaaaaagaaaaaaagaaggaagaccaacacacggattgcaggcagatcaggacgagaactcaatgtctgataggtggatggatgtggagagtgggacaaccaaacctcaaggccacattttccaggctcaatgaccacatggacctcagtgtcctcactgcagatgcttaacacatgccatttcctttgcccctttctcttccattagcagctctgaacaagagaggcctggcctggcccctaaaagatcttcagaggtcttttggaatctagataaataacactagttgagctttttctatgtgcaacttgcaaggtgctttatagacaatgttttcttatacatggctcagagcagtcccttgagagtgctcttgttatctgtaccctagatgaggaatctggagctcagcaaggttaataacttcccagagtcacagggtttacctatggcaggatcttggttagagcagggatcagtctcactctgaagcaatcactcttgaaccacaccgcagcctcccctgacccgtgagtatcccagaatagtgtcaagtctcccctacctttccaagccattgctctaggactgaccagctgcaacacacctttgctggaagcttcagtgagggcctctgccccaggccagtcccttcctgtgccctgtacctaccggcactgaagactgccatctagtggccattgccttcctttttcttttgctgttaaaggaaaacggagttcccacataaaagacaggcctgcatatttatagtatcacaccctgtaaacaggaaacttctcagtgttagagaaggagcccagcaacataaacagcatattgccaatgagttccgccacccattcaacaaacacttaaatacacacacacacacacacacacacacacacacacacacacacacattctattggaatgtaggctcccagagagaggaatttcttttgtctgtattgctaatgaacctggagagcttagaacagtggcatttgcatagcagatatgcaacaaatatttattgagtgtggaatgaatgaacgcctgacatttactgtatctttactatataccagggacttgacatatacattttctcatttaatcctaacgataactcgagagatagagaccattagcatgtccagtcctcatatgtggagactgaggcacagagagggtaggaagcttgccaggtttagggagaactagctttgacccaggttttctgacattagagaccatgtgttccctcctttcaagggagccactggccaattccctcccatgttctgcctttattgagtggaaggctcccttcccaaagtgttgagacagaggccatcaatggagggaatgtcactagctaactctgtggctgtgtgacttccagtgtccctgaacctcaggttcctcattgggtaaaggaggagactgagttaggacccctgccttcccttccaacgtcatcattctgctgttcctgtgactcccagggagcagatgtgagtagaagagagaggaccacttgttgctaggcaaccagcacccacctcacccatgttgccatggtgatgatgaaagttgggctgatgggattaccagctcctgctaattgcatatgagtgctcaggtttctgtctctttcttgcctgcttgctcgctctgactttctcattcttctaggaactgtagagcgatttccccctctcctccatctgcagcctccctgaggcagccctagtgcaatggaaagcaactgggaatggagcctggctgtgtgtctgaatagctgtgtgaccttgggcaggttacccagcttctctgggcctttcttttctcatttggaaaatgaaggtgttggaaaagtgatccctgtctaaggttcttcccggctctcaaatcctttgatgcctagggagcttgtcaggggagcagaccacactgttactaggcaaccagcaggcaccctgcccaagttgccttggtgactggatgctggaggggaggggagtagctgctgcagctaattgcttaattatttatgagtgcctcaagtccttcttgttgtttttgttgctaggggctgtggggtcaccttctcttcctctcttctgccaccccaagtcgtctgtgttgcgtgtcatgcagtgggacagcacgttggtccggacctcaagctacccacgttctagtcccgcctctgtcatttcctagagctgtggcctcgggtaagtcacctcacctctctgggcctcagtttcctcatttgtaaagtgatgggtttgcttagatgatcgctgaatcccctttctaccttgaaattctagttcctgccatccagttcccagatgagggaaatttccccaatttattatcttctaagaatgattctgaagagcaataaaaataattaagtctcttacatatttcaaacaggaagggaatgaaagttgtgaccattgttccctccttagccattttgtataatctcttttattaatcttaaggtcatttaaattttatctattcatatataccacctacttccaaaataaatttgaggggttcagtgtaaggtgcatatatgctattaggtctttaaaatagaaataggaataaatataaaaatagtgatgcttcttcattggctaatattggtgctgtgattgagcaccaaatgtaattatgagcagcctggaagccaaagcaaaaagagagaaaggtatataattgctattcagtaaagaaaaactgccagactgttcctagttctaaattctggagggaattttttcatgtggtacacaatccttttacagaaactgcagataaaaattcttgactagcccttttttgctgaggatattgttaaaggacataaggaaggagctaaacttgacagtttgactagctttaatcattagaaagcaaaacttcctttctacccatgccttggaattttatacagatatgtgtcacttcgtaaatataaattttcagaatcaaccattatttatatatcagctatatataaattcatgtaaccactttgcaaagcaatttggcaatatgtatcaaatttttaaatgcagccaacaattcttctccaaacttattctgagattagcttgtgtagatgaagaaagccataaatataaaaatacttatggtagcattatttatataagaaaatgtctagaaaccacataaatgttggaggctagtgaattaaattatattacctctttacaatgaattactttgcagcccttaagataaagtagatctatatgttttgatatggaaaaatcttcaaggatataatgttaagtgaaataagaaggtacagcattggtattaaatgcttccattttggttataaaaaagatatagatttataacttatgaatctagatatatgcttgcatgtgcatacttgcatttttctggaaggaaactgttgccagtggtttcctctgggaatgaagattgatagtcttgggagggagggagacctactattcacagcttgtttttacgttgtggacttgttagtgttctgtgtagagaggtaggagagtctggcagttgaaagtctagactctggagtctgaatacctatgttcaaatcccagctgtcccacttactagctctgtgaccttggggttatcttaatcttatctctgttcctcatctgtaaaatgggttaatagtatcttcctcattggcttattgtaaggattaaatgagttattacgggtaaagtgctcagagcagtttaaacaatgccatataccacgcttcttggaaaaatgaaaggagatattaagcaacaagataaatgcatctaaccaaaagcaccctcccctgttttagtgttggacagattttataaaatctgtcattgcttccagcattgtatgttgtatagaagttaagtttaaagcagcggtcttgtttttattattgtcactttatgtgaccttgattaccttttagggagggcatctactctgggattcatgacagtctgctatgatgctgttgatgcccctgaactcatcttgttttgtagctcttccatcccagcgaatgctcaaggcatgaacagaacacatgctaggccaggtagaaggtcaatgaggagatggcatcccacgcccttcactgttcaaagccagagaggaactatctagaaattcaagtgtaaagaggatgtccatgctggttgtgacatgtgtgttcacaggcctcatgcctttgcttttcttttgaaaaagaaagtgacagagacctggggagatgctgtgttaggagggcccctcctactttgggctcaggaatctcaccgcctaagggacttcctgggtgctcagaggtacaggaagcagagcgctctgtgttcacaggtgcccgctttcctcctcccgactcgccggtgctttagggcagatctggatactttggctgattttgggaaatgttctctgaagttagccacacgttaagccaggcttgaggccttcactgtggtcacatggtagctccagaggttgggatgggggctctggccccttcaaatcagcggagttaggaagtatgctctcaccaagaggaatgcaaagcccacctgctccaacctcatgccccagtcggtggttctcttgttcgttcttctttctcgccctttgttctgtactcgcgggcactggagtctctttatccatttggccatcggttcccctctccatttatctgtcacacccaactgtgcttccatctgccctccatccctccttctctcctccagccatctgccagccttcactccatccttctgactgctggtatgtctgtccatccctccttccctcgcaccacgtgggtctggggctccatcccctgtcccatccatccctccatctgtccctagcctgccgctccatcccgctgcccttttgcatggctgcagagccagcccgcagaccgttccccggtccctctcacccccgtgggccctctagcccgtccccggccgccactccaggccaggccgtcagtctcccacgctgggcccgcgcctgagcgggatcggccccccatccctccgtgggtctgtctttgttcggcggccccggcccggccgtgcctcccacggcccctccgcgcggctcccaggccctgaaggcggcgggcggcgggcggcgggcggcgggcggctagcccggggcggggcggggcgcgcggggcggggcggggcgggggccgggggtgactcagccgcgctcgccccgcggtccgcgcgtccgccggccttgcaggcggggcggagaaaattgcgctgcccccggccgccgcgccccccgccggggcccgggagccgccggggtcccgcgccgccgccgctgccgccgcccccgagccgccgctcggcctgcagcagctgtcggcgctgcagcctgagccgggcggggtcccgctgcactcgtcctggaccttctggctcgacaggtgagggggcgcggggcccgccgcgcacggccccgacccgggtcctgccgccaccgccgctttgtctcggcgcggcccctcgccccggccccgctccgctgtggcacagacctcggcccctccgcgcgtccgcctgcgcaccccgggactcgccccgccgggtcggaagccagcttcgggccgcgccgggcggctgttcggcgtcctcgcctccgggccgggggaggacagcgcagcccgaaaagtttcggcaacactttctaccccttgttcccttccgatcggaacgcggcgtgctggcagggccgtgggagagggtaggcgagctgggggtggccgcgtccctgctgcagggagagggctgtcctgcttaccccgcggggcgcctgggagctcaggacacgacctcagctgtgacagcgctcggaaaagttgcccatcccttgggaggtgtgcggtggtgcaatgattattgcacggcgggcgctcccaccccgtgtccggccgctgctgccgtggactcctcttccagttcttcctcatccactgggcaggtatttcctgaacacctacagtggagccacacacctgctatgcgctggagattcaataatgagcagcagctgaccttgtcaggaagggggtgaattatggctttctcaagggacaacccaggtgccatcttttcagaaagaccccctgactaccgtatctaaaatagaaaccttgctccctcgttttgtattctcctgccctgccttctttttcttcctaatgcttaatgcagctggattttattatatatgaatttgtttactttcagtctgtctccccagctcctcaacacctcccctcagttaaggataaaagagcagtggatttttgtttttggacattttggacctagaactgtgcctggtccctagtaagaacaccagaaattgttatgaatgaatagatggatgaatgcaaagccccttcttagtgtctgccctgcagtgggtgcccaatgatgacacctcaaggttgtcccaagagcatttggaaattttgatgaaaccgtgtctactctggctaagtgttaggaagaaatgtgtgacagtgttctgagaagtttgcttggtacacacaaatctggttttaaaaggctttgcataaaatgactgcaagattttgttttaaaaaagtgatattcattttttttttggttaagacaagctcatttcttttttccttttgggttcttatagcacccgtctataagaattgtcacttgctgccattttctttgccggagacccaaaaaagttgggggtgggggagatggagtgagtttcgttctttcaaaacattttcactttcattatgggatgctaagagagcattatactgtcataacaagcgtgcttttggcagaccttagcagaatgaaatcgtgtctgttttcataggtgtgctgcaactgtgctattgttacctggtatctgttttcaaggtgttaaacctggacctgtggtctaaattgtgaatactgctgactggtggaaacagtatcaagagagtttctttttaaacaggtctaaaattagtttacatgtaggaacaacacttttaaggactggtctaaaatgtcaatactacagataacacaatcttttaagactagtagcttaagattatagtaactttaatgaagacaaaaactatatctatactattgatttacacatttttgttctctaaaggtcgatcatcaaatgaaatacattattgccacagtgtccagatctttaatagaaatggctgtattaatttagaaattataatgagttccaatattgtacatatgaattcattttgcccgatcaaacaactcataatttttattgaactttttctccttctgtgggaatccattacctttatatagggtgcccctctcccccttgaggttatgaacacattatgatctagaagttcattagtaacttttctccccaggtaaacaacattctagagactggtgaggttctcaggagagccctccaaggcagccttacctgcagcatagccaatgtctgcctggcaagatgacatcggtttttgagttccatagcatgcaaaggcctcttgctacttaaaactcccctttggcatcctacctcccggcctgtcctactttccagcctactgtgtgctgatgagcaagccatctagctgccccaagcctcactttcattgtaaaatgggatagtcataggctatgtctcacagggcagttctgaggattaaatgagagacatgatgtacaacacctaacaggtgccagctggtagaaggagcttcctaagcataaactactaacactgtcattaccatgctccccagctaccaacccctccccatacccacaccccaacaaacagtctctggagcagcttgtctgaattctgtgttgggaagccagaaacctaaattcattcccctcactggatgagttggagaactcctctgtaaagttattagtatttttaatagtcaactccaataagtccttatttggttaaaaaattagactgtatggttaaggatttcggcatttgaggaaggtaattttagattgggggtacaggctgaagagtttttctccccttttctggacatttaaaactatcctgtcttgattcttggaagccactctgggttatgtgtctctaactgcttccttttgatcttatggtgacccgctcgcctctgagttttttcccacaagactcaggcctcaggcctcttctttgtgccatttacaccagggatctcatccagtcacagtgctttcaggtccacctgaattctggtgactctcaaaaccttacactcttagatccagtgctccttcccctttgtctccatggatgtccaatgtaatacacaaccagactcaacatatactgaactacctcctcaactgccttcccaaacttgtttccttctatctgtatctcagataagagcagttaagagcaagtctatccttccagttgcccagcccagaaatcttagagtcatctgtaaccacctcccacccccgcccccccgaggaaaagccaaagggcttacaggaaccataaagctttgcagctcttcctgccccacccaggacccttttctcccttgtcactctcccttctgccatgcccttctttctgctcatcggtccccttgctctttcgccttcatcccaagcagggaccttagccactgacaccccctactgcttggagtgctctcacctccatcagtgcttgccctgctctttcctgtccttcaagcctctgctcacatgtcaccttctcagaccttccatattagtctgttctcacactgctacgaagaattacccaagactgggtaacttataaaggaaagaggtttgactcacagttccacgttgctgtggaggcctcaggaaacttacaatcatggtagaagccaaaggagaagcaggcaccttcttcacagggcagcagtaccaagtgagtgcaagcagggtaaatgccagacacttataaaatcatcagatctcatgagactcactcactattacgaaaacagcatgggggaagccacccccatgatccggttaccttcacctggtcctgcccttgacatatatggggattatggagatcacaattcaagatgagattttgggtggagacacagccaaaccatcttatgttgcctgaccactgttatgaaatggcgcaagcatcctgacacacacaccccgagcccctgaccctgttttattttctccatagcattaccaccattggcttgtcttctcccactaggatgtaaacctcatgagggcagagttctcgtcccggatgccttgtccttagctcctggattggagcctagcacaagtcagtccgcactgaataccctgaacagggtgttgttgaattctacccgcagtgacttcaccttctcctgtggtggctccattactctgctaatcatttgcaagtctccatctccagccttcagctctcttcggagttctggacacatgtctgaaagctaaggaaatccacaggcactttaaatgcagtactgattcttcagtgactgagctcatttctctctattctctttcttttctgctgaccacgtgttggttaaccatcctgccatacttccagtttttcagaattggaatttccatttgatccttgaatcttctttctctcaagcaccctcctccatccagttctatatttcatactgttaattcccctgggaaaacttgatccaagtctaagccattttcctctctccatgccctctctctgcaggttctggttatgtctagttccagttacctcctagccggctcttagcttcctgcctgctcccaagctctgcccctttccaggcatcccccacctggactggcatggttagccttctaaacatacgccttatcttaccattccaaaactcctttgccctgttcctctgccatagcagcagatttttactttatgtctcttaccacctaagaggacctcttttatgaagttgtgtgatccagacagtagggattctggatctccaccactacgtctaccagagcagctttgagaggtggtggtgtggtggtttgtttttagaaatgggaccccttaggctggatgtggtggttcatccgtgcaatcacagtactttaggaggctgaggagggaggatctcttgaggccaggagtttgagaccagcctaggcaacatagcaatacctcgtctctattttaaaaaaaaaattagccgggcatggtggcaagagcctgtagtcccagctacttgggaggctgaggctggaggatcccttgagcctagatgtttgcttgagcctgaatttgaggatgcggtgaactatgatcacaccaatacactccagcctagttgacagaatgagacccgcctctacaaatacttacatatgtacgtacatacatatataaaaagacccctttagtttcaataaaagattccctactttttttttttaaggaaaactatggacttagagattatggtatacattcatatattgcttttttaagtggaacccacctcttaaaatataagatatgaatatatatatatattttgagacaggcattctctgttacccaggctggagtgcagtggcgcagtcatgactcattatagcttctacctcctgggctcaagcaatccctccacctcagcctcccaagtagctgggacaacaggcatgtgctactacacccagctaatttttgtattttttgtagagacagggtctgactgtgttgcccaggccggtctcaaactcctgggctcgagcaattctcccacctcagcctcccaaagtgctgggattagaggcgccctgtccaaacccacctcttctttaaccttatcacctaccactcttcaactccacattaccactcagtctgtccactcttcctggtcacgtcagactactggccctttccttggatagatctaacttccttatgtctgtgactccagagagtgcacattacagtgcctggtacacagtaggtgctgagtatttgcagactttttttttttttttcatcagaaaggtgagccatcatatacagctgtcaccaaccctacccaatcatggtttagctccaccaagcctgtgtttctcaaagtgtattccctcatccgcccatcagaatcacctggctgtgcttgttacaatacaggctccccaccctgccccagacctactcattcagacctctgtggtgaaaggtagatttgtaacaaatgccatagaaatccaaacttgagagttactgctctaggtattgatcatatcaattgagtatattatttaccagtcaccattccaggttataagattgcaaacatgactacaccttgggccatgtcctcgcaggagggatatctcacatgctgaatgtttcagtagtatcaatgaagaattctgagaagtgttgagttctacagggacccaccctaaagggtgcagtacttcaaaatacattccaatggtgtgttccataataacaaatctgatatgggaaggtagggctgagcttgacaaaagggaccccaaagtcatccttgttcattgagttgcctactgggactaggttggggaggagactggatggaagggccatggttgacagggacagagtggctggcatctgaacttttcttgtctttttcccacacttgccctcctgaatctgtaaactctaaatggcccaggattttattttttgtgaggggtaaaggtcctctgagaacatctggcagggcaaggccctgacatagagtacttccagcctttctacctcaggtcagtggttgcttcttgcagaaaagtatgagggcctttcacatcctcactcagaaaagtttctggtccttacctggcactagctgctcaaaaacatttctgcttttaatattacagagaccatttaaacttacttccaaacccggggcacatggcaacaatttagtgatctgtcatgggaatggttcacaacttggtctttcttaattttgtcgtaaactcttaacactgctgtacttctctacccatcctccatgtactgaagggattaatatatctcaagatgaaaggagccccagttgctactgttaaagagctgtaagatagactaggaatgaccataggaaggcagggagaaatcaaaatcaaataaacatgcagaaataaaacctttaaatgatgtatatattttcagtagatgcattattaactgtcagtaatagggcttgggccatttttgtatgcgactcttgatcagacaggaagctggtgtagccgcaagccacaggtctatctaacagtgattaaaatgaaatcatctttaatggagtgaatggcatacgaggggcatacttaatcatgtaactgggctgtacaaattttccctctgacagctgagcccgatgttgtaaatccaacaggaagactggcatttagaagatataactctgcctttaaagtcttcccctttaaggtgggttctcttggctgaaacaaaattatctctcacataggatggaatattgtcatcattggttttttcagcaaacatttattgtgtgcctgtgtattgggcatgtgtatcgagtaattggatatactgtaccacatactgtttcagacatcttttcccactttaacttgttaatatgaactacaatttactcattcgtgttaagcactggactggatactgtacataattatccataaaattctcacattattgaagtaggatatatcagcaacattttacagatgagaaaattgaggcccagagaagtaacttgcctgaggtcacacagcaatatagaacagaaacaggatttgaattaggactgtatgactccaagccctggtgtccctaaccccactgcacatggctttcctgtgagcatgaacacagatgggacacaattctctcatcctaaagtatcggagctggacaggacttaagaggttatctggctctacctcttaattttacaaataaggaaaccaagagccagtttcatgggagatgattaagccaaggactccctgcctcggaatttgctgagaaaagaagagagcccttgcctgaaaacccatatttaagtgcttttacagaactgtccttcacatataaggataacttcttcttgatgtctttgggtgatgacaaatgcgcttgtgacaatagtgatttttacatttgtcttgtgatgctgtagttcattagattttactttccaagttagcatttcttacgataacttgatttagatgacataggccagcatgtctcaaactctaatgtacatgcaaatcacataggatttagcaggtctcatgaggacctggagattgccgctccaacaagctcccgggtgatgctacccattgcctggttgcactttgagtggcaaagatgcagcagggttcgaagaaaccgtttcagcttctttactttgtaagaagcatctctaggcatacatatggattgtaagtggtgctgtggtctgataaaagatagccaggtaatgattaagatagtgtccttaggtatttacagaggtatctatctccatgaactttcttaatgagcttaggctgcagcaattatatctttaaaagtggggtttaatggggaaggcatatttgggaagtctgaatggaggattgtaagctgcaggacagctggggccatgcttggtgcagtgtttttatgagggtgccaggctgaatattggtcatgcaggagctgtttagtttgggctaatgactaagggcatggttgtcaggtaacctttggttcaagtcccagatctgccactaaccaatggtgtatgtttgggcaagttaccttaccaccttcagatttagtttgcttatctttaaagtggggttgcaactattatttacctaaggtgttttaatcaggataaaaggagatcatgtatgcatgtacaacatgatatgtggtcttttcaattattgggggcccagcatttctggaataagaaaaaggataaaatgggccgggcacggtggctcatgcctgtaatcccagcactttgggaggctgaggcaggtggatcacgaggtcaggagatcgagaccatcctggctaacacggtgaaaccccgtctctactaaaaatacaaaaaaattagctgggcgtggtggcgggtgcttgtagtcccagctacttgggaggctgaggcaggagaatggcgtgaacccgggaggcggagcttgcagtgagtcgagattgcgccactgcgctccagcttgggcaacagagcgagactccgtctccaaaaaaaaaaaggataaaatgctttcaagcacttcacttcttccggaatcatgttatttatattacatttgggggtattttttttgccagggattctagtggcatctagcgctttcctgcacctccacctctgtgctttgccagcagtgtggctagatatatggtggggaggcaagattgacaggcagaaacagtaggtgggcccacggagggatatgacacaagatgtgctatgggacacctatgctgacaatgactgctcagttattactgggagtcagcctagtttaaggggaaggtcatgggcctcagagccagatagaccaggagaagaacccagacctgctacttaaaaacaagttcactgagcctcagtttcctaatctgtgaagtggggataatgaaaccagcctgacaggattgctgtaggaattagagataatatgtgcaaaaccctttcatataatacatggttaataaaagggagccattattacattaatattattaaagaggaaactcctggtggaactattgaaattctttaacctgatccatccaggggcatttattgttccattgctgtgttctcagctccagctgtataccgtgggagggcggcatgtgattcagaaaattccgaaccagggtcctgattcctgggttctgtgattttccacagctctgcctgtatcttctactaggaatggtcattatcagcatgtatgttcctccctcagctttctttcccacctcctcccttccgggagaattaaaaaatgatatgaacattgtttctttgtctttgggagcctggggaattccgagagaggagggatgctggttctaaaacataaactctatgggaaaaggcctttttctagaatgatcaccattgtatccccagtggccacagaaggtgtgctaaaacatttttgttgattaaataaattttaaagcccctgagactatttgttaaacattgccaggagggtttctttgcatgggcaccatggacattctggccagggcaaattctctgttgtgagggctgtcccgtgcactgtaggatgttcagcagcaccgttggcttctacccaccacatgccagtagcacctcctcggttatgacaaccaaaaatgtcttcagatattgccaagtctcttctggggtgcaacatcactctcagatgagcacccctggactgtggagacagggtttggactagggttctgctggggaaggaaggtttataacatgaatgaaaggaaaagatttttaaagctaagacaatatactgtatgtgtgataccagtaaaaatgtttccttctttgacatccattacagacatttaccttcagttgctacaaatgtctactcaggtgacagggaagagaggtgtggctgccggctgcccaggcttcagtgttgccatgaacagcttgcactgctactttaagaaacagtaaccgtagatgatacagctgcagttcaattttgaatcagcaagtccagtacagactgacctgtttacagggcagatcatttaaaaatctcaggttatttgctcttttgaaattgattctatggatacggcccaattttgcttggtaaacaagtatgaagttcgggcatgaggtttgggcacattggtgtttttcagtgactgttggaatcacatttggctcacaaaaggacgccatgccttcctctggcccgccaagtatttactaccatcagtacttccgacatcactattttgttactttgaagcctgaatattcagaaaggtgcccatcagctggaaagaatctttaagatcacagaatcaccctcctccatgaagaaattaggaaactgagtttctatgaagcctgacatatctcctttctttttgtccttcctttttctctttctttctttctttcctttcctttctttcgttccttccttccttccttccttccttccttccttccttccttccttccttccttcttcctttccttcttcccttctttctttcttttttttgagatggagttttgctcttgttgcccaggctggagtgcagtggcgcaatctcggctcactgcaacctccgcctcccaggttcaaacgattctcctgcctcagactcctgagtagctgggattacaggcatacaccaccacgtccagctatttttttgtatttttagtagagcctggatttcatcattttggccaggctggtctcgaacacctgacctcaggtgatccaactgcctcggcctcccagagtgcagagattacaggtgtgaaccactgtgcccagcccatatctcctttaaaatcccaatacatcagtatcatcaggtgttagactgttaaaatagagctcttgttgagtgtaacccttttggtttttgtgaagatcttccctaccctatccattggaaagactattttaatattgtttcttctcagaatattatatgaatacaatcttgtattaaaaatggtgttcaggcctcgaggtgatggctcactcctgtaataccagtactttgggaggctaaagcagtgggatcacttaaggccaagagtttgagaccagcctgggcaacatagtaagaccctccctctacaaaaaatacaaaaattagctggctgtggtgacatgcacctgtagtcccagctacttggaaggctgaggcagaaggattgcttgagcccaggaggtcgagaatacagtgagctatgattatgccactgcactccagcctgggcaacagagtgagaccttttcccaaaaacaaacaaacaaaaaaattgggattcagcaaaaatggtggacttgatgaaaacataccaagagaatcaactgtaaaactccacttaaaaaaggcaagtgtgtatatggcttgaatgggcagctcagcagtgagggatgaagagcaggaaatcacaaatgggtcacctgtattcaaatcacatatttgtggctatgggcaagttcccaaacctctctaagtaccagcctgctcacctgtaatggtgataaataatattgacagctgcataaataggattgcagggattcagtgcttcaacggaggtcagaggctcagcacactagcaagaattcggcacttacatgttagtcactgacactggtgtgttacactaataagtacttcctagttgttattttattctagagtccttttagggcctctggaaacgtgatttcttcaaaaaacctggataatgaaactgaggggacctatgtaacttggtacaattatctcctgcactggaatacaagtaaagaccagactgtggagacggaggcatttaaaaagaaccatatatagcaaattttcatcagtgcttttttttttttttttttttggtctaggttaaatggtattatcctcacattgtgtttgcttaaaattgacataatactgtatgaagcaaacatttgcattatactcattataaacctttcaaattgaagtgaactttaaaaattagttaaaaaaatttttttgaaatacagttttttgaatgaaaaaagaatgcaaagtatatttcctccctttgagccctagaatctcccccgcccaccccccgcaacacacacacatagggaagaagccctgtatatactctcctatgtgctttgggggatccaggaatgtatttactgggcatatgtagtagagcagtcagataaaggaagaaaagtcatattttaatgttaaagtgatagatttttcatgctaacagtctattcagaaaaagtttaagagttttgaagtttttttcccctgatttaaaaaataattaaagctgaaaaagatataaaacctacattaaatagccaacttagtatctatccaagttgatactttagtaactatagcccagtcaatccacgtggactgatgtatttcatcaggggcccaggtatgaactgtcattagcaaggtattgattgagtacttcattctttgccacactctttgacatagttattttaggcttaaagtctgacaacaacaaaatgcagtcatggtgtttaatgtggatttgcttttctaaaacaatgtccagcaaatcgagttgtaaattcagtgctttacagtagatttctttattggactgcacctgcccagtggaagtcccgtgttttcccccaaactagtccgtgattgtgcttctttagtgaccttctgataaggaagcggtattcagaattgcattttttgtttttttcagacagagtctcgctctgtcacccgggctggagtacagtggcccgacctcggtgcactgcaacctccatctcctgtgttcaagcgattctcgtgtctcagcctccccagtagctgggactgcaggtgagcaccaccactcccggcttatttttgtattaataattttagtagaggtgggttttcaccatgttggccatgctggtctcaaactcctgtcctcaagtgatttacctgcctcagcctcccagagtaattgaattacagtcatgagccacagcggctggccagaaatgcatttttgatattcaggttcaactcttagggagcattcactggttcatagttcaaggactgtagtccttgctgtgcttaccccaacctgggcatgggcctttggcattgcctccacctctgagctcatgtgagttttgtctctagtgtgcagtgttttagcaactgtccaggaagtacaacatactgagagtccttgggggcaacgtctctgggatcagtttctggtaaagagcattgcttttatagattccagatcctagtgggtcagctgtgattgaggtgctttctcctctcagcaagcttcttatttctcactaacaaccagatgtgggctttcatgcattatttgtgtgatgaaacataatcttaggctgatataattgtaccccaacatttttgagcatgaactgctaattcaatatagagagaaagaaaaggtggcaggaattgagagtcttgaactcctaaggtttgatgggacaggtcattttaccatcccaggcaatggtccttggtaaaaccagttaaattgcagtgtttctggtgactaaacctgtagtatgttgccatctagtggaacacatagcaaactaaagattaatgcagtctgaccataaagttcagctgagctaattaaatcagccagagaaaagaactgaaagtattttctaaaagcaagtgttttggtaacagcaaattcatatgaaaccagagttgactttttttaaagtaggcaaatggtcactctgtttctcaagagtgcttgaatatttgccacccagttactaacaagttttcaaacatatcaccaggccaggacactgcattttcgttgtcgtctgtacaataggcagtttctcatctaaagtcctggagaaaatgcttggttatcagtaggttattttggtatgttttaaaatgtgattttcaggtgtccattccctttcttattaatacatacttatctttttttttctgttaagtttccaagaataaatctgctgatttttagaagaagccaacacatgacttcacaaagtagggatttcacattttaaattccaactagcatccccaaaatgtccagtcctgtggtttgagacctgatttttaggaagacgtgaaagattctactgtgggctgttttgtgagcactgactgcttgttttgtttgtgtctttgtcctgctcctgcttgcctagatccctccctggtgccacagcagctgagtgcgcatcaaatctgaagaaaatctacacagtacagacagtacaggtaagatcaagagagggactaactggattaacacggcacacgtcagacacctaatcacccaacttgaaatctgttgctgtgctggcagcccctgtccagggttctgctctggagttggctctcgggtccaggttggcacagctgcccttgaccaagtctgctccagggccagctgagcacacagtcaggtggcctgctcttctcttggccacctgctgaacctttatctactacctaaacctttcatagacccgcacaaaaggcagactgcagtgtggttaagagcgaaggtttttcaagatctttatctgtgttcctgttcaaactccagctctgccagtgcctctctgtgcctctgttccccatcagtgagaggcagtggcgccttccctgcagggttactaaaggtttagaggtcacatggggagagcaggatagtgtggagcgtgaaggtggagagtctctgcttggtttcctacttcacttcgcaattccatcatcctaaattaggcatggatcaacccctttcatctctgtaaaactggtctaatggtagcacctacctccatgggttactgtgaagattgaataagattatgtttatgccatgcttagtggaatacctaatacatagcagattctcaatgaatgcaggctcttagttctattagttctttctctatctaactctgatggtggagttggaaaaacacaactgaaaaaacacaactggccaggcgtagtggctcacacctgaaatcccaggagtttgggaggctaaggtgggaggattgcttgagcctaggagttccagagcagcctgggcaacatagacccccatctctacaaacagtttccttaaaaattaactgggcatggtggcacacatctgtggtcccagctacttgggaggctgaggtacaatgatcacttgagcccaggatttcaacactgcagtgagctgtgttcacactactgcactccagcctgggcaacagagcaagaccttgtctcaaaaaagaaaaaacctgattgatttaattgatcccatttctattttcttcaatagcaggttctacccagtttctcctgtcttctagtttagcgggctggtgcaggtagagaataaggctattgtggctgcttcagagttgcattgaccatatgtccataaattttctagaagggagagattttaaatagctttcctgttgtatccctaaatcttttaatgtcttagaaattccaatagatctgcatctagattgtgtctcttaggcagcctcttacatgcagaagtagcacagagatccattttttttttaggctatggtcccagtatctggttcaaaaaatgtggcatgcataattatgaagtcccaggaatctgattgtaaggtgctgcgtgtggctaccaagggcagtgagctgggtgtgaagacacagtcctgactgtgggccatttctggtgtcgttggggaaatgacataagcttgtgggaagcagagcagcagtgctgctgtgcagtgccaagtacagacagcaccgcaaggcagcaccactgtccagagaaatcaacgcgctaagagtctgggaggcctccctgcacgtctcttctgtggatttagggacttctgttaccatttcccagcggccattttttaatcctcagagcacttgatttgaaggcctgtcctcatgtaaaggctctcagagtctcattagacttttcccaacccacatgacattagatcatcagggttatgcaaggggttctggggctgacactagtcagatgaggggattggcttggttttcctgaccccacgagataacccagggtatttggtagagcccctgaatccacagcattttagggtcttcagggagcaatttaaagcacccaggcaggcacatactaggaaatacttcctttaaaactactttattgggatataatttgtatacagtaaatgtagatttcttaagtataacttttgacaagggtacgcacatacaaccatcacgcagatcaagaagaaaaaagtttcccttacaccagaaagtgtcttcgtgcccctgccagcctccatcccccaaagcaaccactattctcatttctaccacattacattcattctgttactgaattttatattgatggaataatacagtactatattattgtgtctggtcctttgcactcaatgaatattgaaggattgaatgaatgaatgaggccgagcatggtgactcttgcctgtaatccccgcactttgggaggccaaggtgggcggatcacttgaggtcaggagttcaagatgagcctgagcaacaaggtgaaactctgtctctactaaaaatacaaaaattagcctggagtggtggtgggcacttactggggaggctgaggcaggagaattgctttaacccgggaagtggaggttgcagtgagctgagattgcactgccctccagcctgggtgacagagtgagactctgtctctctcacacacacactctcaaaaaaaaaaaaaaaaagaatgaattagaagttaataaatgaaccactttcctgagtcacaacagactgctcccgtaagaattctgtgggctgcacattctcagtgggggccaaagttgattcttgcaggggaagtagatcagtgaacaaatctcattctttttacgtacaaagcatagatgtccatgcagtccataaacatacggtgtctctgtggtattaaaatttcgtcataggtgattaggaaaaagggttcttttagggcctaaggggggaacagtgaaaaaaatggctgataaacactgccctaaggatcaggaaattcctttctgtctcagctgtctctgctccctcagtttctcatctgtaaaactgaggtagtaatagtgcctactcgctaaggtagagtgaaagttagatgagatggtatatagttcttagtaatgcttggcacttagccctcagatgtggccagcttttacttaagtgttactggattctacccctcagctccatcagttacctggctagggtgtgggctagggttgtcacaatgccttggttgatgtcccatatgtgacacttactagcttggacaagttatataacctgtctgaatctcagtttactcatctgtaagatggaaataattgtgatggtaattttatcatgctgttatgagacttaaatgatacaatgaggtaaaaagccatagtaagtacccaatcatctgccataatttgtctacttctactgagatatcttttcgtgctttcttcagtcatgttttatatcaggaaactatataccactgcttctagattatttatttcaagtgattatactctggatcgcaccaccactaacacagaggtgtatgtaaagatatttaacttatcaataacttttgagttttcagcctgcgagtgtccataacagctgataaattgtccttagtatttaagaactggccaggatactatcttgtaagtaatttgaggatatgcttttgtcccactgtcttcttattttattctaggattgtatattaatttttttttcttcagaaacagggtctcactttgtcacccaggcaggagtgcagtggtgcaattatagctcactgcagcctcaaactcctggtctcaagagatcctcccaccccagcctcctcccaagtatctgggactatagccatgtgctaccacacccagctaaattattttattttttttgtagagatggggtcttgctatgttgctcaggctagtctcgaatttctgacctcaagctgtgttccctccttgacctcccaaagtgctcagattacaggcatgaaccactttggcctgtacgttgatccttttactctcactccattagcactaaaaaaaactgcttctccaattatgtctgtgttttcctcccatatgtgtttagatgaaaggtaaaaatcatgtgatattaatgattgtcttattaaagacatatgagtctttttatactttgaggccctttagcaaatcaaagtagatggtttgggagaggaatcgttaccccgtctattagttgaggagactgaggctggaggtaagaggcccaaacattccatgattggaaagagccagtcatgccttgcctctaggactagaattccctcccagtccaattctctttcttttactccccgtgattgaggagtggaggagactcagcctccaaaggacctgggaacccctgctgaggacactttcatcacacctaacaataattctctctgcctggagttaaattcatttctactttcctaactttcttggaaaattccattttacatctaggcgtattttccagatgcttattgattctcttactcctttgtgaacctgtccaaattttccacatttctcttgtgattttgcatcctcagtggttgcagtgcagaatagaaaatggcttttagccgggtgcattggctcatgcctgtgatctcagctactcaggaagctgaggtgggaggattgcgtgagcccaagagttcgagttcagcctgggaaacatggcaagacccacatctctgggagaaaaaaaaatagaacacggcttttgaacaagccctgttttacctgttggagaatgaagagctacctgccatttgtgatttgcaagagaagtctcccttctccagtttctttcagccttatctgctacaagactaaaaattccacccctgaaaactcattcctgtacagcactctgtctcgaacatcagttatttggtgtatcgccttaaagattttgccacacctatctcacttgtggtacattctacccagtatttcttataacttgacttcttatttaaatttgcataaaacagaaaccatatttcctctataagtggaaattcagcatcgtttatcataagcagaaagtcttcctaaagagtatatataacctattgaaattaagaaaatgtttcccctgcatatgccaaacctatcctgtgtgctgtcgataatatcaagacttcatatccgcaggtcaagccgcctgactggagttgtgcagttaagttagggcagcagattgctttccaaacccttgggaaatgagggctcttccttcagaagaagaggttttctaggtcagtattgatcatggaggatggtggaaagattgattccaagtacttgctgccctggacacagcaagacagcccatggtgtgtggtgtcctgcaatagaatgacctggagtgaaccacttggctgaagggaggggcctgaggggagagaggaggaaagccaacactgaaaagagaaagagaaggacctgcagccaggtccacttcatagttctgtctagcacagactttgcatccagtataacaagattctttatccatcatttagtttattcattatatgcataataggatcaacatctatagctacaatccagttatgaagaaatataactgaagttaaattgcttgtattcctccacattctcagtggaggctgttgtgtctgtgtattgggtggggtgagacttgaccttgttaattaaaagtaatttagtcacttcaactgtgaaactgggtctcttctaatttaaatctcttttgggaaaaatgaccaccctcttctccttctccatatgaacaggcatatgcagaaatacccctgacccctcctgaccttgggccatgcccaccacctttggccctgctgtaacctcatgttatgaagacccctgctatgtacacacacatccagaccccaggccctgttgtccttaggctttctagcaatttcaagctccagattggagatttaggaaatgttggctgccttcccccgaccccaccagaatgaggggaactctataaggttgtggcaggccctcccggccagaataacccctcctgccttcacagctgttctcagacctgaccgccatgttgctcagcgctgtaggaatgagggccttttctgggagtcttggagcctcttgggctgtaccaggaagcaggttccacactcctctggtctaggcatccccaatctttgggtggggctctctcccatcctttcagggttttaaccccactgtcctctctctccaagcttttaactccccaactcagagttggtttttactaactttctatgtggtgggaaattaccctcacatcctgtcacatctcgtttactctatgatcacaactccacacttgggctctctctttaagccaagccctttttggaattcaaaggaaaacccatttctctctcaagtacctagctcttgtaaatcagaagcactttgctttcagcctttgtgtctgctgtgagttaaaaacatccattaaactcttcagttgcctattcggttcagatgcctattggccctgcccataaataccacttattcagttggtgggaagccccaggcaactagtaatacctaatgagcaaaaatatttgttttgtttttttggaaatactctcttgctacacatgccacaaccttggaataaatcctggaattttttttttttttttttttttttgatgtgtgtttgctgggtggttttgtttctggtttgttttacaaaacagacatatcactttgttgtctgtcaacacatgacatcttttcttctgaagaatttccaagtgcattctttttcttcagaacatttcagtaggaaattgaggaggaaatttgccagttttcttggtaatgaatgattatctatttggcagaaggctgtaaggtggggcatagttgctccaatcagtgctatcagattggggatttatcaagtggtcagcatattaatgggtctaaccatactttgtttccttccttaggcctagcaagtgctttcactttgcatttcatcattacattttccagtgaaatagctgtatccttatacagaggaggcaacgtgggtttcacgggctacatgacctgtgaaggttatgctgagaacctaggtcttaaatccaggtattagactccactggacaggtgtcttccctgcctcagtttctccaggagaggtgccagattggtgttccagaacatacctcccaaggagtggattgctgtggtcaaaggctgaccctcctgcattcagctaagttccccaaggacccgtcacagtgctctgttcacaactgatggtcacagatgttgactgaatgaatgatgttcaacttttatacctctcctagtcttagggtgattatcaaggcttttgggaaaaaaaagcatttaaccatcattaataaacattgtgcttagttttacttttactgcaatcttggatttgcaagtctaacagaattaattataagcctaaaggcttctgaaatctatttgcaagattttatatatagtaaaatttaagtgtttccattttcaagatgtgttacagagagtataatcttgaattaccaggcttccgctgtagcagacctttcacttctgcaagggcggaagaggttttcaggagctgagtaatgctagattccttcctgtaggtatttcaccagcagacatacttcacaaatattctacctattggatgaggtttgcaacagggaaacagaccagtttaatgacacatgcttttcaaatagggctttttttttttttttttaatggtgtgaccggatattttgctcctattttatgctcagcaaaaacgtacaaatatgtgctttaatgaatatgttaagtctatcactgatcttcttgggctgtaatctcttcctgtcaaatttgccaagccaagcagaatcagttgtctgtttttgttttcaagagaagcttctaaagctccaatccttagcatgatctttagtgtttttctgatctttgaaatggaagaagtgttttgttgtattttttcagtgtgcttcaagtactaggttaaaaagtcaagatttgacaactttgaccggggtatgacggcaggaactttggtttgtgatgcctttgaggagacttgaagtttgccagcaccaaagtcctcttagttttaccttaggcaggggttttcctcttaatgttattttgtgcataaattctacagaggtcattgccacatcgtaaccaggttctcaggctggagttgacaaccaccagcctcttgtgaattatgggcattttactggtgggaaaatatcttcaacatgtgtccctctttctgtggcttcatgacctgattcttggctgctaagattggagaaagatgtgtcaaaaacatatagtagtatcttcgaagaaaatagctgagtggttaggaacagaggtttgggaatcaaattgcctggattcagattccagccctgcctacccaccctcacaccacagaaactgaaatattggaataatcttatttgtacaaatagcaaagcatttacaggataggtacctccatagaggcagatgggtgtttgaggagctactgttattacagtagcttttaactcctcactacactagcaccattttagtagaagggagccaaagtggattctcaattaatacatctgtcatcctgtagttttttgccttcaatttgatcttatagttcatcattgccacctttgcagttaattcagctttattatttttttaacacaaaacaggcttgaacaacccagcaggattatcattcaacatagctaaaattctattccacccatgtgactcagttcatgagccctaggattgatttttctaattgctattttactcgtgctgctttcctcagacctactgggagacccagatgatcaccctatgcttacctcaccacacagaacaatatttcttatttgcacagtaattctgtgcatagcattcatagcgtagtaattctatgacctactccaaacaaatggggaagtgttttcttcttcatagcctcaatcctcatcctaatcctaatggtcataccaaactgactcttgggcaggttcgtctctgcctggtgtccttatctttaaaaaaaggataataatcatacctcctcctaagactgtcattaggataaattgcataaacatgtaaatgttcatagaacaaagcctggctcagagaacagctccagatcacttgtctttgccaagacttcctgttttactattactttattatttttgtataatctatttctgtttaccagttgccctgtgtcttagttcaggctactataaccaaataccatagactgggcagtttatgcaacaaacccttgtttctcacagttctggagcctggaagtctgagatgagggtgcgagcatgggcacatccaggtgagggccctcttcctcgtttgtacatggccatcctctccttgtatcttcacatgccagagggagggctggctctcttcatcttctcataaggacaccaagcctgtcatggtgactataccctcatgacctgattacctcccaggggccccacctgctaacaccatcctattggtagttagggtttcagcatatgaatctggggaagacacagatgtgcagtccgtaacactgtgtatcttgcgcagcttgttgtttcagcacctgagctgttccctcttcctttagcaggggagagataaggggcaaacagagtgtctaaggtagtttctctttgccatctcctttatcccacaacccccaagccatagcatcacagacttcttccaggcttgtagagaagacagggttgatttttttttttttttttttttaaacggagtctcgccctgttgcccaggctggagtgcaatggtgtgatctcggctcactgcaacctccgcctcccaggttcaagtgattctcctgcctcagcctcccgagtagctgggattataggcgtctggcaccacgcctggctaattttttgtatttttagtagagatggggtttcaccatgttgaagacagggtctattgtaacaaaatagttataaatatgttcagtacatatattcagtactaaaggctttagtggatactacctagctgccagaaaaatcattagcaaagtcctttccagttttatgtgtagacatgttgcataggaatgtttgcttaataaccatagcttcctgaaacatagagcttggcacagcatcagcaaggaacatcttttcttcttgttgttgtgtttttgtttttgtttttttgaggcagggtctcactcctgttgcccaagttggaatacagtggtgcgatcttggctcacttgcagcctcgacttcccaggctcaagctattctcccacctcaacctcctaggtagttgggactacaggcatgtgtcaccatgcccagctaattttttgtattttttgtagagatgggatcttgccacattgcccaggttggtctcgaactcctgggctcaagtgatccgcttgccttggcctcccaaagtgctgggatttacaggcatgagccaccaagcccagcattctttaatgttatattacattttctaacagagaattagaagggatactgagaaaaatctattttgaatggataaaacaatgagaatcaaaatttttctttaatgcattaatttgataatctagcagcataataaatcaatactgggtatattaaacaaagtgtttgtttttcttttaaagatattttggagtgtatacaataatatccctcctgtgactagcctgcctttgagatgtagttatcatttaatgagaggagagaggcgaccactttggtaagtgtctaacgtgtaatttaaggtcaaggtgggaggaaaatgtttgtgaacctcataaaagatcatatcacctgagatgtgtgtctcacatggacaacatagaaagtctgtgataccaatcatggcccagggtctgggggtaagtgtcctccttctttaatagcttgatgtagtgatgaagatggacagtaagttagtttgcccaggctggagtcccagttagtaataaatccttatgtcatgtcattcagtctttctgcattatttactcattaataaaatggaaatgtacctcatcttgattagtagcaaatgacagaaacctaatttgtttttgtggggttttttttgttgttgttgttgtttggttggtttcttttttttgagaccaggtctcactctgtcaccaaggctggagtgcagtggcaccatcacggctcaccacagccttgacctcccaggctcaggtgaacctcccacctcagcctcccaagtagctgagactacaggtgtgtgccaccacccccaactaattttttattttttatttttggtagagatgggatttcaccttgttgcccaggctggtcttgaactcctgggctccagcaatgtgcccacctcagccttctaaagtgctgggattacaggcatgagccaccaggcccagccaccagaaatgtaatttaagcaaaaaaattgagtatgtttttaacctgtgactgggaagttcactggtaggggtagtttctggcagatccagctcatgttatcaggaatctgatgatccccaccagaattactctgcttcattctacattggtttaattttctcccatctgaggtggcaaagtggccttcctatgctctggtcttacaccctgtaagtttaccattgtcagtactcacgagcccagataaaatcccaggtctgggtctcattctcccactttgagtcccctttcaatttctggccaatcacaaagactaggaagaggcagtgctctcataggctagcctgggtcagaagcccatctttgaagctaggacgtggagtcaaccctgcctgagtggatctcacagaagagtagggggcaagtggctctttagagggaaactgggatgctcttaccagaaagggagcagatgttaagcagtgacacacagcagatgtcccccacagggacacctatgaggccttgatacatggttgataggagaatcacatgagatcgtgtcatgaccatgacattgaagtgtaagggccttcccttgtggcagctgtatttgttgtccatccccagagtcaagcgagcctctctgcactagtgctttgaggatgaggatctcaagtcctttcaccctccctgcccatgtagccactgaacgccactttcttccctctcaatcgctagctccttcctttttcattaatctgcttctgtatccaacaaaaggactggggaagtgtttattgaaaaatgcccaatcttacccccgttaaaatggcttttatccaaaagacaggtaataatgaatgctggtgagggtgtggagaaaggggagccctcgtacactgttggtggaaatgtagattagcacagccaactatggagaacagtatggaggttcctcaaaagactaaacataggactgttagtgattcagcagtcccactgccagatatataccccaaagaaaggaaatcagtatgtcgaagagatgtctacacttccatgtttattgtagtaccattcacaagagccaagatatggaatcaacctaagtgtccatcaacagatgaatgactaaagaaaatatggtacatgtacaccatggaatagtattcagccatcaaaaaaatgaaattctgccatttgcaacaacatggatggaattggagaacattatattaagtgagataaaccagacatggaaagacagatacctcatgctgtcattcatatgtaggagcttaaaaaaaaaaaaccctgaactgatggagaaagagagtagaatgacggttaccagagctgggaagttgtgggggtgataaacaggggatggttaatgggtacaaaaatacagttagaatgaatgaggtcttggagcacaatagggtaactatagttaacaataatttattatgtattttgaaataactaaaagagtagaattggaatgttcctaacacaaggaaatgataaagactcgaggtgatggatagatagcctaaataccctgattcagtcattacgccttgtatgcatgtatcaaaatatcacatgtaggccagatatggtggctcatgcctgtaatcccagcactttgggaggccaaggtgggaggattgcttgaggccaggagttcaagacgagcctgagcagcaaagtgagagagaccctgtctctaaaaaaaattttaaaaattagccaggtgtgatggcacatgcctgtaatcccagctacttgggaggctgagggcggaggattgcttgagcccaggagttcaaggctacagtgagctacgatcatgccactgcgctccagcctgggtgacagagtgagacctagtctttaaaaaaaaattcaggggccgggtgcggtggcttacgtctgtaatcccagcgctttgggaggccgagaccggtggatcacgaggtggggagatcgagaccatcctggctaacacagtgaaatcccgtctctactaaaaatacaaaaaaaatttagctggacttggtggcggacgcctgtagtcccagctacttgggaggctgaggcaggagaatggcgtgaacccgggaggcagagcttgcagtgagccgagatggcgccactgcactccagcctgggtgacagagcgagcctgtctcaaaaaaaaaaaaaaaattcagatataccccataaatatgtgcaactattatgtgtccataataaaaaataaaaaacaaaaataagaaaaatgcccaactattttgtttttaaggtcatctgttgttaaactaaatgtatgaagagatatttaatctaactgtatgtagaatcacttagtcctgagtgtaactttaaacgttggtctttggcccagggaagaggagagtaatgcaaagggtggcgtatggaagatgaaagtccccaaggacagcacggtaggttcctactgatcctcttctagaaccggcgaggcttggagttgttgactgcctgtcatcagcattttgtgctttgcagatagcctatttacctggcagtccccaaacaggctgggggtgagaaattctgttctgaccttgatgattttctgcctttcactgtcaccttgaaagtgtataattgtgcttctctatagacgtggtgtaatatgtgactgtatcatgcagtctgcaggagtaaatgcctgtgaacttcacagaaaagctgggtgaatgtctttatggtggtcattcccttgacagccatgaccaacatgttgcatatggttttacaaagtcggaagcaggatctttccttccaaaggctcttccctcctctacagggggaacaaaagcagttctgagaatgaccatgtcacagagaatagggaggcttggcatttcactatcctttggggtttcatgagagactatgctccatctccctctggggccgatgagaacctggatggtgtgatgacctggtgggatgctggtttgcagtgatcaagtctcagaaacccagatttcccagagtgagctctaattcatcttattgactggaaatgaacgtgaacattaaaatcggttatcttaagccctgggaaactaaaaagcttctttgaaaatggacaaaggggaagtgctaggcagttttaccttttcatggtttctttcatgtggataagctcaaagaactgaaatgtctccagggacccatatgcttgagctggagtcattttactataagaacatacctaaagacacgaccagatttatttgtcaaaggtgcaaactattagtcaagatttgaagctccaacattttactgttatttggcatacataatgaaaaatatcagggcagcagagaatataagagaatgagggaatataaggtgttcttaaaatttcactatgaacactttttgcctttccatgttctttatttactcactttatttactagactttgaactctagtagaagtaatcatgatgtcaacattccttgaaaagcggctgaaaggcagttttgtcctctccttgttagctcacttggctgcgttgggtcacaaataataacgctttcatatccgtgcaaatgccctcatcccaggcagtttagcctacttttcatcatcaaccagtgggagtcttgtgggccaatcctgtctgaattcaaagcagaagggtgaagtctcccttcccctaacagcctctcgcagctctcaacttcatcagtaacagcttgaaggagtgtagctggacagatagaaaacggaagcaatgattcctaggtgggagactcatagaccagaagggacaggctaggaaagagaaaagaaaagaatgaaaggtcacttttcagttccctggctaactgccatggccttggttaaagattcagcgagactgctttaagcttgtgaggacataataatacacactattattatagttaatatgtattgagcacttggaatgtagcaaacacacagctgtttatggcatggatcttaaatgttaagcccttttattgcagtcattgtactaagccctttgtgcacacttgttgactaatttcatacccacaacagccctggaaggtcggacctattattatttccttgttcacctaaagaaactgatgaccagagaggttgttaacccatctggtttgcagatagcaagcagcctctaaggattcaaacctagtttgggggcaatttggagcctgtgaatcacaggaaggaggataaatgggaccaagaacttttcaaaggaagtaatgtgtgtggaaataatgtagctgtctattggatgccactattagatcatgaggagaaagaaactccagtatttctcattggtaggaggcagaccggggcgtgcactgaatcttccagggaaattacatacattcttacataaagttctatcgcctgccataaacagtctgcctcaaatgaatggaatttcccaagactctagtattaaataaacaagaaatgtccttaagtgttctttacttgtgtaaccttttaagtaccttataagtagtaagaaaaacagagaaaggattttgaagagaaagattttactaatagcatccacatataatcagcttctatgttttgaatcagtgagaggtaaagaaatttgaaagttttaagtcatttgaatgcattttccctagaaattcttctgaatttcaccaggggtttcactagagattagcttttaccagactttggctcacttgtatctgtgtaaagttatttgtaaaccaatgaaaaatatgccacggtgataagtgtttgcacctaggatttggaggtgtctgtggactccaagtatgggcacagaaagtgcatgtgaagttgaagaaaacataatttgtttagctcctgaggataattgtctaaaaatatctgtattttgtttgttttgttttttattcttttcccatatcagtccacagtttggaaagagttgctgttagcaaccatcggggaacagttcacagactgtgccgcagcaggtaaagcagcccacggctccggccggccctgcctcgtgtgctcctggcttgtgcttgtttcttgcagcagcttgttatcacgtgtttgactttttacatgttttgaagttgtttattttggaactacaaagttactcaattttttttcatgtgattttcgtgttcagtgttagatatgtgtgtctgtgtccatatgcatatttacatatgtgcatatttatatatgtatgtatatattcatgtatatttttccctcttagcttaatttaatagtatctataaccatctgtccaaaataaataggcagaaaagaaaaatctcacattaactgggcccttaacacaattggtagtaggttccattatctgttccagttcttccagaaggggaaagtgtcttcagtgtctagtgaagtttttaggtggacaggcacaatcctctctgtccctctcaacccctaaccccttcgtcttgttctctctgtcccctgctcaaagaggactagagtggtcggtggggacatgctcaccattatatcctgtgatctcacagtggaggataagacagaagttcttcagggcttttctttggagaccattttcaaatacccagggtatttctgagagcaaaacaaaaagcttttgttttgctttgtgtttatcatgaacccattcaaagagcagaatttaattgcttgtttaaagttttgttttcttttggggtagttccttctgaatgctcctgaagtaacatttagaatactatttttcttccccagctttcagttaagtttttctttttagctaatgacaatgatcagttgtccctcagatgtcttaatggggccgtgtttgagagccctgaggccttgccagtcccagggcacatttcagattcatctcgtgagcagttccaatcattccacttctgttttgcttacttcttacaccactttttattcagttaagataaaacctgcgctgggcgtggtggcccatgactgtaatcccagcactttgggaggccaagatgggaggatcacttgaggccaggagttcaaaaccaccctacgtaacatagagagacccttgtctctacaaaaaatgcaaaaattagctgggcatagtgacatacacccatagccccagcaactttggaggctgcagtgggaggatcacttgagcccaggagatagaggctgcaatgagctatgatcgctattgtactgcagcctgggtgacagagtgagaccctgtttcaaaaaaaaaaaaaaagaagacctgggttaagataaatttgtctataagtacagattccttctgttttaatagggagtatttagcaacttgataatatacagccaaaaatgtatcctgtgtataattataaacacataaatccctgggagaggaagttttctgcatgaattattcctgtttccagaaccagggaaaaatagtctaagtggtaataaatagccagtattgagtaaagaagaccaattgttttgtggttgacttgggacatgagcgcaccattaactattaaccattagctcttccattaactagctatgacactttaagcaagtcagctaatctctctgggcctcactcccctcatctttaagcagtggctcctcccagctctaatgtcttatgctgccagtaccctaaaataatcaaggttttgctggttgattctacttatgaatattacatgtttgctaatggatctgcctttggataagagttgcagcctttttttaccgagccatttgtgaaagtgctgtgctagtaactgtgcctggttaccaagagccaaaccaaactgaaatattgacagttcggcatccatcagttacattacgctttgaccaatagggtagaaatgggcaacaccaaaagactggagacatgaacatttccccaaaagggtgatgtgacttcatggccactcttgaaagtggtaaactgcaaagcttctctttttatttgatgatttttattttcacataaaatataacattgatctctggcaagattatttttaaagtgtaaattagaaagtaaagaatctgtatctaaaaatattttcttgatgggataataagtttctgtgaatggccatgacaaggtactatgttttttgactcttttgtttaaatgtggcatatatacagaagattgcacacgtcgtatgtgtacagtttgataaatattcacaaagtaagcatacaactgtaactagcatccagatgtacaagcaggacattaccagcccgccaggatcccccctgctctctttccttccttcaaaggtaacctccagtctaacttctaacattataggctaattttccctggttttgagtatttacgtaagtggactcatttttagtgtcaagtcatacacatttagccaggatcaaattcattttaaaaaagaaaagaaggaagagggggagaaagagaagggaagaatggagaaaagaaaggaattactttactgccgattatttcttttagtaaattggatatgtttttatttaaattatatcctaatactaaaatgttttaacttccagaagacaattggaaaaactgatggcatgaatatttagatttacagaggccagcaaattaggcagagcatactaactaaagcaaaattttctcatattgataatgcttatctctcacgtattacatattgatactgtttatgaaagtgcagagagctgaccgtattgcattaccgtgtcatgaacaaggaaacaaagaatcaaaagtttgtattcctttcattttgctgcaaatttatgtaaacaaagtggctgcaagggaggataaaacagtataacaccttactatccatccgccgttctcaactatgtgcaagacagccctaatctggaattttgttttttaaaaaaagtccaccttaatcaatgtggataaatgccttaacgttcattcattgaaggacgatcctataatagcagagctgtactcagaagattttactctcactctatacacagtgctaacagatggtcattggctctctagcccacagtatataatgcccaaaaccagaaaagggatttctagagggaggcatcaggaagcaggaagaattcataggaaaggagcagacaagtaaaccgcagaaagcagatgagcagtcgagaatgcacaatctggctccagttcgtgttggggcagatagcgctgaccactccaaggtccctgaaagcttggcaggaagtcaggagaaattcttgctctccttaacaaagacagcaaggcatcaaggaaaagttcatttcagttcacttggctttcagagggcagggaattatgcaacccattttagaaaaagtctcatcaaaacagagtaagaaatagtcacaaagctttggtaatgttaaaaagggtaaattacttatctggaaaatgcatttggctggaacactttatctaagtccctggataaatgtgatgtgactgctacagcttttgtgcactgacttgctttcctccagtgattccccatagaaacaattatttcttacaagttatcttgtgccaccttcttttttccatcttatccttaattttcagataaaaagactaagttcttagaaacagtcagactgacttggaagtatcactcattttttttttttcctgtcttcccctcagatgatgaagtaataggagttagtgtcagtgttcgggaccgagaagacgtcgtccaagtctggaatgtaaatgcctctttagtgggtgaagcgactgttttagaaaagatctatgaacttctgccccacataacttttaaagcagtattttataaacgtaagtgcttcatttccagttattactttctagcttactctatcatacttttaaagatagaaactgttttgcaaatgtggtgaaggcagatttacttgaaatttgataattcagaaaataattcaacaaaatacatttaagttttttttttttttaaaaaaaacaagcttagtctcagaaattaaagtaagattttattcttgcctaactgcgtggatcagaaaacgaaataacaaatattgtatttgttatttcaaaaatttgtacctgaactcaaatttgtaattctcagaaaaaaaattacattctattggaaacaacaataacaaaaatgtcattatatgaactggcaggtagatattcaatcatcccttcataaacaggaatttataatgtataacatctgtatttgcagaagaaatgcattctgagcacaggcgtgattgaatgttctactgaaatgctaatacttcctcattatgaatgactatgacacagaactgagggagaattcacgcctagtggtgaaatgttaacagtatgaataggtgtgtggacccattgttttccatcatgattcattttcattgcttttgtgtgctcttttgaaaaagtcttctttttcataatgaaaacatcttagtgctattaaaccaatgtttggtagatcagactgcaggtcacacatttaacagagttagagaaaaggacgacagccctacacatgtatgataaatttcctatatccaaaactgttcctggagtcagtaacccattttttaactaccgtatttcattgaatctaagatgctcttgaagataaaatgctccattattttagtattactgaaaaagaaaaataaaaggctcccaattaaactgtaacacattattggtaccagaggtcttcaaatatatgtgtggtagttgtgaggagtgcgtcttagaattgctgaaatacatttcattattgcttcactttttccaactctttgccaaaaaaggataaaaaaatcaaattttgttttgtgagtatcctagtatgacaggggatattaacactaaggcctccctgtaaggaatcatataattacaggccaaatgacctagatgttaagcagtgggactgatctggcactacagatattctgaattttaaatggaagtttaaaagagacagaaaaatggcactgcagaagttgcttattggctgcgtggtgtagaagttgccaatttgccgatgccatttttattctttagggatactttaattgtattttcaccccagatattaattgaaaggtcatcaagggttttttctttttttttatttcacaagactagcagaaactctatagacggaagtgtatttcattggcatttatgtatggggctaaaacattttttcccacctttgaaccagctccacacttgactctaaagaggagaacaccaatttggggtcgttaagtcaggcactttaggtttttgtcccacttcaccagtgtgaccttgagcaagtcacaacttctcatcctttacctttctcatctgagtatcgaggaggttggtcttagatgatctccaaggttccttctactgcaaaattctatgattaagtttccaggtagcacattggttagcagcaggctcaacacagataataagatatctgttttatcagataataaggccacaaagtggttaggctagtttttagggccatggcaataatcagataagattgtcaaagggcaggatgattcactgcttagctgttgtgatggctctgggaaagaaaaaagccaaacaaggggaaagaaaactgcaacttggccagttaaatcaaatagatacctaaaggtaggggccattgcaaagtatgtaatacagaactgaggaagggtctcagcagaaattcatactttaagggcataaattggcatttaaaaactcaaagattgttcaaataaaaatctgaatttgaaaaaaaacaagcagttttctttattgtaaacaaagcaggcagtcctttactcagcagggtatacactacttgctgcagaagtaatttggaaaaataagatttgggctgaaatctttttcacagcagggtaagctaagttagaaatggccaatgtatgcttttactctggtttggttaataggatcctagtgtaagtattcccaagtttacataagccaggtgactgtagattttccatgtagaaagaacccaagcatattcagtcatggcctctagcgggtagatgggcattgggccattgataacttacatttgatatggatacacattatttgactgagaaactcacaatgcacagactccactcactgaccagccccaccctggccaattctgctaagttcttcagaacagctgagtgacaaaggtcttttctggcgtgagaattgtttacagcaggaagctggagcccaaatctgccctctgtgttaccctctccgctctcctgtttctgtataggtatagctgagaatgctttttacatttttcagtggttggaaaaaaaagaaaaagtatattttgtaacacatgaaaattatatgaatatcaaattttagtgtccataaataaagttttatcagcatagagcaatacccatttgtttccgtattacctatagctgctttagtgctacaatggcagagttagtaattgatacagaggtcaggcatggtggctcacgcctgtaatcccagcactttgggaggccgaggcaggcagatcatctgaggtcaggagttaaagaccagcctggccaacatggcgaaaccccatctctactaaaaatataaaaagctagccaggcgtggtggcaggtgcctataatcccagctacttgggagactgaggcaggagaattgtttgaacccaggaggtgaaggttgcagtgagccaggatcacaccattgcactctagcctgggcgacaagagaaaaactctgtctcaaaaacaacaacaacaaataataataattgggacagagaccatatggtcataaagacaaacatttattctcttccttttcctgaaaatgtttgccaactccaggcttagagcaattctataatccctttctacccaaggtaacctaaggctgacagtacacctgttcactaggcactcccaattctgaatgttctgttgtactgtctctttaacccatcaacattgtagtttgcaactatgaccaccccagactgcccctcacacctagaagtaacacagatctttggatagtctgtatatctggatttattgtttggaaaccaggtcactgtagttctatggtacctctacttgaccctgaagcatagtgtaatttccttgcagatcaaagcgtgttttcttcgatatcttccctaaatatctttcttaaaaagaaaacacacacacacacacacacacacacacacacacactcaatgtgaaatatttgcaaagttaaagctgtgagaaatgttctattaaattagttcagatttcaggctgcccttaggagtatggccaacctgaggtgacctgggaggtataaagtgcatctctcccagtgtttcatccaagtgcggagtaggttggggtgaacgtccaagatgatgttgaagggaaaataggcccgttccatccaccccctcagcaatagtctgaagaatttagtccttatgaaaaacacagaggccaggtacagtggttcatgcctgtaatcccagcactttgggagtctgaggccggtggatcgcttgagctcaggagttcgagaccagcctgggcaacatggcaaaaccctgtctctatcaatcaaaaagacaaaagttagccgggcatggtggcacatacctgtaatcccagctactcaggagactgaagtgagaggattgcttgagcccgggaagtcaaggctgcagtgagccgagtagcatgatgctactgcactccaacctgggtgacagagcagcaagacccagtcttaaaaaacaaaaagaaaaataaaacagaactggaaggggcttaaaaggtgaaatgggccagcccatctgcctccctagaaccccattcactgctaagtgtgggtagcgtgttggggatcaaagcacccagagtcctgaatcaccccacctttatcagacgttgcttcctggtaatggttaaccagatccgggaggtagattgtcacactcagtcttttgccttagagaaaatgttatgtatttcgtaggtctccctgtggcatcttctactttaaaaaacgttaagtgtttgaaaatatttttggtagcataatttttttaaattcctgagttccggctgggcctggtggctcacgcctataatcccactactttgggaggctgaggcaggtggttcacttgaggtcaggagttccagaccagcctgtccaacatggtgagacccccatctctaccaaaaatacaaaaattagctggacgtggtggcacacgcctgtatcccagctactccagaggctgaggctggagaattgcttgaacctgggaggcagaggaggttgcagtgagccaagattgcgccactgcactccagcctgggctacagagcaaaactacgtctcaaaaaaatatatatatattctagagttcctaattaaaattagtaattttgcaagccagatgataggtctgaatatctattggcagggggaaacttgatttggaaaaataaaacttagcaattttatgaaacttcatttcccatggagagtgttgagaggtagggagcaggggcacctagatataattgctgtcaccctggtgtggttctttgttttgttttatttttagtttatttttaaagataggcttgtaagcggctctgtcttgggttgtgtcaggcaccccctctccccaccccctgcaatgcattttgtggggcacattttcccctgcggcatttgcttgcagcccaacatactctcttcatcggcttgctgagatgactcatcctcccaggcacagcaagaagaaacaggcagcatgcccattgcttgtttattccttgttttaattttcattattacgtttctcaggaaatgcacgccttagctaacagttactggcaaaaaaataaataaataaataaggtgtttgagttcttgccaacatttggggaagctgaatgagatgcctagaggagggttggcccatcctttgcttaaagttttctttcctttttttcttttttgttttttttctgtcctttagcccatgaagagcatcatgcttttgaaggtggacgtggaaaacactaattgcactctgtaaagaattctttgtcctttgctgattggttttggaaacggtcttaacaggagggagagtgaagagaagacttgccgaagccgatgctggtcaatttagagtgggtttctgtccttgcagatgggcaattaggactcaaagtggcaggtggggtggggggagattgtgtgggtttctaccgtcacattacttgctttttaaaaaaaacacacacaaaaaactttttttttggctttctaaattctctgttcttttcactctgatttttttttttttttgccgtttaaaattccttattcagcctaattattgttttctacactcccctttcattgaggcacaagaaatgggtttccctttaagtagctctgctgtacctagttaatgagaatatgcataatcgtgacaatactgcttttgaataccacactgtacaaggaggaacactagcttggagaaatctgtcttctgattatttgttgtgacacattcctatgtactgtgagctgggcattgtttttttctgtcccagggaaaagaaaaaccatacttaatgtgattttgcactgacagcacacaaatctttaattttcctttttaaaacatttttttttagtgataaaaggaaaataatagttggattgcataacatgaaaactataatcacaattcagtatcaggatataaatcaagctctaagtctttggaccctctgtggaaacatttctaacccgaattttaatttggccttttcaaccaaaggcttagagtggtagcaagggatttcttccaataggaaacctgatgtttctgatttaaagagaaggtgatattttaattgtttgaattaagctccttgcaaagttcgggtgtgtttacccacttagggctttctttcccagtcaacgctaacacattttgttaaatgatccctttccctgctcacattgtgtgtcatttctcatcatcagtagtcctccagcctgggcagctgtccccaccctttttcatgtaggtgcaggaagttaaatctcatttccaggatgcatgtgaacatttacaaagttgaactttgagtgcattctgctcatatgaattattgggattgttgatatatattgtattatgctaccaaagaaatattggttttattagaaggaaatggtcatcctctggaccatggagactagctcagaatacgctgatttccctctcctgactttgccaagcctttggctgcttttgcctgataaagggcagggccatctgaagacacttcccccagtcggctttggagtcacgggagctagtgcctgctcacacatttttcaaaagggcagtgcactcagaacttcactgtacctgggatttttaattcctcttgcagtgttgaccagcagagagacttgaggctactttaagcctccactatgtgtttgtagataaaattctccattcaaacattttaaaggactttgaacattatctgcttatggaagttgtgcccttcacttggttagtaaccacctcagccataatacttaccatcataggtttcttaaaatgctttttttttttccctaaacttgagtttccttagtgatttcaaaatgaagtataagaatatcagatccagttagcaaaagcctaggacttgtttctccaaacattgtactaacattcaacttgttttaaaattatgactcaagaattttaaaaaattattctggacatgaattaaaacttttttataatataagtatttttctgattgaaaaaaggatataattgacttcactctaattgtcatgtatatttccataagtaaatggattttgaagtatttttattttttgaactttatttaaagcatttgtgatgacatgttcaacttttgcatgtatgtagcctttgaagtaaaaataaataggaatgttaggctcacgttaatatttctagtttctgtttatgatcatggaacatgactagcacacaaagtagatttttgccccagtgaacttctgcaactgtttctgaccctttagaaaataccaactgtgagaaggatttaatttgcctaatgttaaaaacctatcatctaaattactttcagagaggattttgtcagattttggtttggaaattgttttaattgaatatttaatcataatagactttgtatgaactaagctgatttaatcagtttaaaaacctctcattaccttcttagattaaagaagctaatactgttttgagatagaaggaaatattttgtggggcatgtgacttttgtgttaaggcagtttacccatcttggctgatgtggggaaagtgcaaacttccagtagaatcccggtcttttcatccaagtgcttgcaggggcagccttgtagtctgcaaagaaccatgcagaaaccaaagagcttgcttttttgtctttgtaattccttagggtctgtgatatatgccaggaaatctgattgaaactaatatgctttttattctcccattattccctaaattgttatatcacaggcacttgcctacattgggaaagtaaggacaaataatacccatttaaagtaacttgcctatattttgactgtctttcgtaagcacttgctgaactgctgacttaactcagttttaagatttcctctttccccccaacttttccacatttcttaaatgagggtgtaatttactgcaaacatgtacatttaatataatattgctgttagattcgtggtacactttatgaagcaaaaacatgaaaaggaaaccacaactctaataaactttaaattaaagattaagatgactctttctcacccctcttcttgagtttagcccatgtctacaccatgcacacagtcacaagactttatagcttagaaactttaggtataattgggtcctatagacataatatacaatccaccaactgagccttggccgaacttgtcccttgttaaagacgtagggctagccagccacagagctgggtattgaagtcggcaagttgtatcccggtgcaggcgtccttaaatggagagtactcagaatctgccagccttaacctgcccactagccaccctaatcaagcattaaatatctgatccaatctggccactggtgtaactccgtaatcagacatcctgtttgtaaacagctcctccttctctccctctccctctcagagacagaagtggtgctggggtttggagtttgaaaataaccttcctatgacaggaagtgggcttttgctattagttgcccaactcttagaggatcccagcttgtgtctttagacaaaactgacagcctttggaacgatcgcatggtggcgctgccttccagccaacagttctggctcagcagcagaatttatccagctatgtttgtagaatttttttaagatcctactgcattttgctcttaagcttttataaaaatttgacgagaaaatgtaaaaatgatacttggcaataagacatttagttttcatgcacctaataaaaatgtgtcaaagctagatcgctccagatgtgcttaaaatatctcaaatcctaggctctcattggccttataagtgattgggaagaaaaagaataaaataaactcacatataggagatatggaaaatatttcatcaaatattatgcccaaagagagaaaattaggagttgattttttttagcactctgaatatggaacttccttttaaaaatgtaattctacccttcacctttcctacattgtatgtttctgtgagattttactcattacaagtgaaagtagaggactgcctgtgaattgtttacttctgaaaagaatatattgagatcagttaaaattactcaagagtttggtgactcaggattgtaaaaagcctggatctcaacagctgggaggagtcagagggtgaagtgggaaaaaatagggactgagaggcaacgaaaagtccctttgaacctgtggtcatttatagcaattagagtgggttgcccctctacttctcccaagaagaaatcccaaatagattcctttcatgtcagattatactgttctgattttattttctattatttttacatatacatccaaatctaagaatacttattcagattggcccactcaggccaaaagtcactgtcttgtgttctagaaattctttcatgttgctgacataaatccatttttaaaagaacattcagggactcttagaattttagagtggaagggacctttgagatcatctaccagtgcttctcaccccttagcatgcagcaaaatcactcagatacttacttattattcacatttcttgaccccagcactagaaatctgggaggatatctgcatttttaacaagtgccctagtgattctaatgctgatggtgctcagatcgctcttggagaacccctgattttatccaactcccacatatgacaaatgaggaaagcctcccaaccctaagctctgtcaggtgacctgattccaatgtatgataccaacaatcttatgaaggctggagaaaaccattaatactgagacttgagtagatgatgctcgtgaataagaactttatggctgggaccacagcagtcatgggagcccatccctggaagtccataatataaagcctttaatacagagtggtggtttttctcttttctaaataccatttcagtctgttaagagaaaagaaattagtgttcagaaaagtagttactccatatgtgcagtaactacttttctataatgtcttatggcatctggggttcagcatcattgaacaagattaaatgaacgttatagagctataaaattgcatgtaaaataacacaaaactgttcaaatgactatcaaagtagcctgggaatgaatttccactaaaattaattgtcactttcaaaacgtagcttagcaaagctgttactaaactggagagatcctttaatacatagaaatgtcaaaaaaatcaaataagtattccctaaacgatgtgagtgataagcaaaagtcattgcaaagtcagtatttttttgttcatcattgctactgaaattcagagttccattgtatatgtgtgtcttgagtgtaccttattagaatatccaatacaatagcttttggatattctatgcttttgtgtccttcagaaatcatgagattgaaggaatctgtgttaaatgtttttgttttggttgctgcctgaaaaaagttaccaactcatttagtgaaatgcaagatttctttatgaaaatttcaatttctaatatcgaagtcagataatttttcttgaacttttattttggaacagatgtttatttcggatctattaaagtgtcaactttgcattatagaactgaacatgaagtaaattgagtgtttctgagttttctatagaaaatttatgctacctctcatcttttcacatacaaataagcaacttttaatgaaggcttagggtgaaaattttaattttagcactttacattacatgatgaatggtgaatattaaaggactttgaacattttaataaacttacagtgtttctgttttcaaatagaggtattgatgctgtggatatacattaaattctccccaaagttctcagactttaatcagataatgtggcttacaaccattgtttttgtttttaagttttaacactgtcttttcagtattcatttaaaacaagtcaccatgactttgaatatattctcatggagaatttatttcaatgattatataaaagaatttcaaaatttaaactagtgagcatactttagcttgagacagctaacattatttgtcccaaatttaaaatcttacattgaaagttattaattctttagaatagtcttacctgtgtaagttgaaccaggtttgtttgattatgttttggatctgcttgtgcccccacccccctattttataccatctgtgccctgtgcagttggggaccctttcacatctggctacaagctggtgtaatgcccttccttttgatctggcttcatctagtgatttgctcagtatttttaaggtcagactgaaaacttttctgttctagttatttttgattttatattgtgtgttgtgtttgatgttcagatacatgtgaaagttgcttctataagtcagtattttttattccagccttttgcagcaataaggtaagactagactatacttttcttacttgaaaaggtagtgatttatgtgtttagtgcaaatgtttagactgttttgcaattttctaatttgggactatattgctatgaatttgtgcttcttcatttttcagggtagtagttcacagggtttgtttaagtgttagtttgtagaactttattttgagatcttttgtaatctgttgctactaattctcattctgtattgaggttcttatagtatagaaatgtcattttcatcctccagtttaaaaatttcatgcagtttaatcaaccacatcacttaatcattattagatttccagtgtgtgtgtggtgattagaataaccttgtttattacaacacatattaaaagtttctgtccaacacctctaatatgtgtgacgctgctagcatggagtctgacgcttagtaggttatctggtattctgatggggagtaactgttgttatttttacacttccctgttgaacacatttgataatagggctcatctgggtctcttagaaaacgtatcttgcttattttaattctttttctttaccctctattaagaatggttccgttttagaataagtcaattactctcgttgctcttttgtgctgcaatttgctggtgagattcagttgtcccctgtttcggcaagtaaagtgaatttactcctcctttctggctgtctaatatattcctttaaaaacaaacaaaacgtaccaacaaactcttcttccattcatctgcagactttcctatctctccctgcagaaacaagcaattcaggatcttatgtgtgatgcctaattaattttaacacagcgaatttaatgaaatcgttgaagagcagggcataacactaggaaggctttaaaatttcataatgtttccctctcatatttgcatctgattactgccaccatgcattctgtgtgtactttatcatctagtcgttattgatgcactttttggaatgtgttctcggttgttctattagcataggttcctctgccttgtcacctaacgtacagttttcttggaagccaagaccatgcatgccttttcttcctcagtgatcctttcgctgcagtaactgctattaaagaacttttaactgcttttcgttaatgaatgcataaaaaaatctctggaatcctacaagacgatggttcttttgttacatgaagaaaagaaaaaacagtagcatttgcaagggccagcaagttaaaatatatgtcattaaaatatgtttctatttcccatcatctggctaggctgtggtgctgactagcttatttcttgccagagaaaataagtttaaatcataagcatatttaactagcaagcataaatcataaattctttataatcgtaagcatgttgaactctggtaccatttgtacagatggcagggctaaatgtgtgtgctcctctaagcattaaagatgtggacaagctcttactccccaatttcctctttaactcaggaaacttaaatcatttgttttttgcacatataggattatataaagtatggacctagagaaaggtttcagatcttaggaaacatttgagttttgtgattcatgcttactggaaaagaatgatggaagtgaaggttaaacactaaagccgtgtcccctttttaaggcgaaaataattagtgtttcatgaagatagtcaagttataaaggacaagactgtttttcagaatttttttttttttttgaaaacaaacatcttggaatccacattttaacagaggtccatcagctttcaaagagtgttccctagaagggtggttccacagaaacactttcagatatggcaaagttttcattgtaaaatacattttaagaagtatttttaaaagtgtaataaagcaataacacacagtgacatgcatcacatggccaaattttaacattttggaagccagtaagtataacttatgtactcactgattttgttttatgaaatgaaacaaaggttttataaaacctttttattgtaaaataaaggtacagaaaaccacacaaaacaaatgtgtaacttactgaattgttacaaggagaacactctataacagcaggccaagaaatagaactttgccggtcaccccaggagccctttcttgtgtccccgccctctccactaaaataaccattatcctgacctacaggagacacttgcatttctctctggttttatcacaggtgataaacatcattttacatatagaatcttctctaactatgaacgttggttcagaaaacttatttgtaagtcttttaaatgatgagtgcaaaatgacacactataagcaattgatacccccgtaagttagtaactgggcagaatttaatgtgcttttgctgtagtgtgtggctctgtccatagctataatatccacaataacaatagcatgtatggagttccatgccatctaagcatagaggttagttctccccaacactctacgaggtagatgctgtcattgttgtccccagtttgtgtatgtggaaacatatgcatgaggttcagagaggtgaaataacttgccgaaggtcacaccagtagtcagttgcagaaccaagatacatctaaggtactgtggctccagcctgttcttcagtgaggctgccttggtggaagttgaagatatgatgtgcaagaattttgagattccttatgagagtttgtttacaaagaaaaggttttacagctttaagaaaaagatggaaaaatcactggcctagttcaaacttttcattttacagatgaagaaatgacccagaaagtataaagaattcgttcaaggtcacacaagtagttggtggcaaagttgcagctatatcccaaatctcctggctgttaaaatcaatgatcttttcttcattccatatattatgtggaaaaaatgcatgttttctaacctgcttctttgcgacaactccatgtaagcagatttgtcttaaaaccagtttatagctaggacacaccatctacttgcttattttctcaaggttttaactgggaattaaaaaatttatatctgaagcttgcttttctgtctcacttattgagtgcccaatctgcagacacacatgcctaacactcttctccaaagaatgtacaagaataacacatttgctggtgtggatggcaggtgaaaaagaattactgatgtagcgtgtaggcccttcaacatattcacggccaattccggattatcccagcacagatggatcatgcaaaatccctcttctacttcttactggtgacctttaactatttgtgtttgcaaatgcttctaccagggattggaaaggagaagagcagagaagatggaatttggtttcttgaccagaatgttaggtgttctggtaaaaggtttggtggttttgccacttaagagtacagggagaccgtaggattctctctggatttgaacttgtccgggatgcccaatttagccttgaatatgaacaatcagaaagaaagcaaactgacgcaatgcaaagagcttagtttggaatttgctttattgggttgaaattctattcgcttgtgccttgagcaagtccctcaacatatctgagccccagtttcctcctttttagaagggcaaggtagagcttcttcaaagccagtaacatatgaagcacccagctcagccctttggatgtggtaaagagttagtaaatggtacttccattggttggctgtatcaattcatccatacagtgaagagaatgaactgcttcaaggaaactttcccactttcctcctcaggtattggcccagcttaacttgtttgaggtcctacaacaaacagtgttgaggtggcaacactgtggccaaacccattagtcttctaactgcttgtttatgatctttctaccttattgtaccatattgggaaaaaacaaatcatccccatttacttgagttctgtgcacttgacttctgcgttgatttgccacaaaccaacttaaaaccgaaatgaactttccaattattttctaagagcattattgccatcataacataagaaggaagttcagggtcgggcgcagtggctcatgcctgtaatctcagcactttgggaggctgagctgggtggatcacctgaggctgggagttcaagaccagcccggccaacatggtgaaaccccatcaatactaaaaatacaaaaattagttgggcatggtggtgcacgactgtaattccagctactcaggaggccgaggcataagaatcacttgaacctaggaggcagaggttgcagtcagctgggattatgccactgcactccagcctgggcgacacagcgaggcgctgtctcaaaaaaaaaaaaaaaaaaaaaaaaaaaaaaaaaagtacagttgatgaaaatgttttagaggctgaacaaattctcactgaagcataagtctcctattgtccatcttggattgcagacactcaaacttgtcactgaggggacaattgtgagaagctcccaagagttccctgtatgatgtgcatattatgttttttatatatatatatatatatataattattatattattattttaatcctggctaccttaaaggaaagttaataggccttagtattgctgagatatagaccatatacaatattgactcattaattcaacaaatatttcttgaacagctatgatgtgttaggcactggggatacaaaaacaagacatgacatcattcctatttcatggagctgacaatttagtggattggtaaatattaaaactgaactactagactataagaaatgcaggaagtgtatcttagacatttttgagttgcacatacctggcatgtaagtatgaatgcaatgcatgtttgaatgaaggaatgtttgaatgttgtcataagcggtgtttttttttttaagtcaaaaaccccttagatttctaaagctgagtgtttttttactaatctcattattgttttcaaattctccaataataataatagcttagacactgaattcagtaaccacagaggctgtttataatttgttggtgctttttaaacatctttgaaagccaaacaagcccttgactcctggccaataattcactgtgtcttcatgtatatacctgaggggtagcagtcatcaaaaggcctgtgcaccagcatgtgaaatatggggatccttatactgtggaatgtataaagattgcttactctgtaatttttaaaagccctgtaactctttataaagcatatatagcatctgaacaagaaatatgacactaagtctaggattaaataatatcttgcggccactaccttatgcattttcagcagtttgggaactccactaagtgcaggtcaacaagcccagagcatcataaatgagcatctgtcccatgacccagctggagaccccttccgattattcattccagaagcacgtgctgacaccgggttcagccctcgtggctctctcactcacagtggtcttttaagattgtagagaggtcaaatccttccacccccatgccttgtggagtggctaaatgttttctgggtcttacttgctttgtagccctgataactctattttttaaattaaagtaaacaaaagagggccccagccagggagcagtccaacccagaagacgtgtgtggaaaaggtttaaaaaaaaaaagaaaaaagatgttttaaatgagaacaggcagctctgcggagaagaacttgttcgattcggcaccactgctgtttcgcccgctgacctggactttgcagcccaagttcatccttccacttcaaaggccgggctccgagcagatcacacgttttacttgatgacaaattaatcaaacttgatttcttggatgagatggatacaaaagaactacaactccccaaggcctgaaagtcaatacagcccttctggctctgattagggtaacaaaaggatatctgagagccatcttcctccctgctcaggctgtgggatggaactaaaagcaagccgggcttgtaaaggagaaaggccttattaaaacacatttcagctgcaaccaagtgcatggcgagccctcctgacaagagaaaattactttttagtagatgctcaccttttctcaagagcaaagtttccacttagaagaacctagaggaagtagtatattatgaatctgaaatgtttatagatctcgccttttatgtttctgctgtgaagatgaggttaaaaaaaatcgcccggtgatatctggcaaatgttagagagagcccacgtttggttaagtaaacttacttctgctgggttaaaaatgaaactccccaagtccagggaatttatgtacctgttaaggcaggactaggacaaggtaaagtaatggcttcaaaatgcaactgctctggggccactccggcagcccactcatgtgagagggcgaaataagccttctgctaaatcggggagcgcaggatttcaatgcaaaaccctcttagcagctttgtcatcctcctgttctgcggagcatccaaggacatcgcttgcatccttcttgtgattgctctatggtctatatttagaagaattgctgttgcacaaaatatggtcccctgactgttctgggggtgcttcatgtccttcccaaaaaggcttccaaaaaaaaaaatggagggtttatacctttatagcacaatttttaaaagaaggccctgatgagtgtttcctttaatatgtgggcagcatgcacaaatctatataccgtgggatcttattttgtaagtttgtgggatctgcttccacgcagccgccccgccgcccggagagtagggaatgaggcgagggatggttaagtatgcggagtgaagttgggtcacacgggcccatctctcatttctgacactcagtttgaagatccttcaagtgtctttctgatcctgacaggcagtttttaaaatgtttgtggcattccaagacgcttaataatttaaagctgtattttagattccagcaatgagcacaataccccgagagttagccctccccctgcgagcggctccggatgctgccatgctgtctctcccactcttctccgacacgggtgctccaagccgcggccagccaagcccctggtctctctgcagccctctgctgggccccctcctgctcacccggtagggatgctctgagggtgagccaaggccccctcctccccaaagcctgttctctgctctccagcagagaagagcttcctttcctgcaacagagagggcacttgagttttcttttagcctcctctatggccttcgactcattccacgcatagtgtgtatggccattgtaagtgtggcactagattaagggttcccaggccttctcccacctttacatcacacacagctctgcacacagaggttcagctgttagatgagttgaaggagcaacattcccaccagctcatccgagatcccatcttaggaaacccattctccgcgcttgggggattgctgttttggtttgcgaagtgagaagactggcttcctcagccttacaccccaacttgctagtcttgtgaccttaagtgagccacctaacttctgagtctcagtttcttcatctgagtcacaggaatagtgaattctcccaccacagagtgtgaagattaaatgagacaatgcacgcgaaggctcttttcgtgctatccagtgtttctcatggatagatcttgatagtaatgcttcatggtaccacagtggtctgaccaaggtgggcctgtttttgagatacgtggccagttgttttaaaattccattctacagtagaatccagaaacctctcaatttccacaaagacccccat
